United States Patent Application Publication US 2011/0183924 A1 - sequence listing, part 156

SEQ ID NO: 406487 - DNA, 2027 bp, Homo sapiens
  misc_feature (1932)..(1932): n is a, c, g, or t
  misc_feature (1934)..(1934): n is a, c, g, or t
  misc_feature (1936)..(1936): n is a, c, g, or t
  misc_feature (1942)..(1942): n is a, c, g, or t
  misc_feature (1944)..(1944): n is a, c, g, or t
  misc_feature (1947)..(1947): n is a, c, g, or t
  misc_feature (1952)..(1952): n is a, c, g, or t
  misc_feature (1963)..(1964): n is a, c, g, or t
  misc_feature (1967)..(1967): n is a, c, g, or t
  misc_feature (1979)..(1979): n is a, c, g, or t
  misc_feature (1982)..(1982): n is a, c, g, or t
  misc_feature (1987)..(1987): n is a, c, g, or t
  misc_feature (1992)..(1993): n is a, c, g, or t
  misc_feature (2000)..(2000): n is a, c, g, or t
  misc_feature (2004)..(2004): n is a, c, g, or t
  misc_feature (2011)..(2011): n is a, c, g, or t
  misc_feature (2013)..(2013): n is a, c, g, or t
  misc_feature (2015)..(2015): n is a, c, g, or t
atatgagctcaggcctggctgggctccaggagaatctttccacaaggcaagagataacacaaagtcaaggtgaagatcagggtagccctttaaaaggcctccttgtgccctagagttgccacagctcttctactccactgctgtctatcttgcctgccggcacccagccaccatgtgggagctcgtggctctcttgctgcttaccctagcttatttgttttggcccaagagaaggtgccctggtgccaagtaccccaagagcctcctgtccctgcccctggtgggcagcctgccattcctccccagacacggccatatgcataacaacttcttcaagctgcagaaaaaatatggccccatctattcggttcgtatgggcaccaagactacagtgattgtcggccaccaccagctggccaaggaggtgcttattaagaagggcaaggacttctctgggcggcctcaaatggcaactctagacatcgcgtccaacaaccgtaagggtatcgccttcgctgactctggcgcacactggcagctgcatcgaaggctggcgatggccacctttgccctgttcaaggatggcgatcagaagctggagaagatcatttgtcaggaaatcagtacattgtgtgatatgctggccacccacaacggacagtccatagacatctcctttcctgtcttcgtggcggtaaccaatgtcatctccttgatctgcttcaatacctcctacaagaatggggaccctgagttgaatgtcatacagaattacaatgaaggcatcatagacaacctgagcaaagacagcctggtggacctagtcccctggttgaagattttccccaacaaaaccctggaaaaattaaagagccatgttaaaatacgaaatgatctgctgaataaaatacttgaaaattacaaggagaaattccggagtgactctatcaccaacatgctggacacactgatgcaagccaagatgaactcagataatggcaatgctggcccagatcaagactcagagctgctttcagataaccacattctcaccaccataggggacatctttggggctggcgtggagaccaccacctctgtggttaaatggaccctggccttcctgctgcacaatcctcaggtgaagaagaagctctacgaggagattgaccagaatgtgggtttcagccgcacaccaactatcagtgaccgtaaccgtctcctcctgctggaggccaccatccgagaggtgcttcgcctcaggcccgtggcccctatgctcatcccccacaaggccaacgttgactccagcatcggtgagtttgctgtggacaagggcacagaagttatcatcaatctgtgggcgctgcatcacaatgagaaggagtggcaccagccggatcagttcatgcctgagcgtttcttgaatccagcggggacccagctcatctcaccgtcagtaagctatttgcccttcggagcaggacctcgctcctgtataggtgagatcctggcccgccaggagctcttcctcatcatggcctggctgctgcagaggttcgacctggaggtgccagatgatgggcagctgccctccctggaaggcatccccaaggtggtctttctgatcgactctttcaaagtgaagatcaaggtgcgccaggcctggagggaagcccaggctgagggtagcacctaaaggctgtaactcacagcccctgtccaccctatgtggccccacaacacagatttagagatacaaccccccacccttctccgccattcttccctactcccaacccactctgccttctttttcagcttgtggcaatgccagtgatgtgcataaacagtttttttttttccataaaaaaaaaaaaaaaaaaaaaaaaactcggggggggccccggacccaacttgcctatagtgagncnantacaantnatngccgncgtttaaacgnngantggaaaccctgngtncccantaatnncttgganaatnccctttncnantgggataaaaca

SEQ ID NO: 406488 - DNA, 846 bp, Homo sapiens
gagacatgtggtctgggatgaaaggctgggagctccatgttccaaccagctgcagcacgcacataacatgcgctgcagctccaaacgcacacccacatacactgccagacaccaaagtccacagacacaggtgttcagacagaagcgcctgttaggagggaagggatggagaagggctggatttaggtttgatctggcagaagctgaggaaatgagggggcatgaggctgagcaaggaagggagtacgaagtcccagacccacttttcctcttccactctggagcagcatcggtgagtttgctgtggacaagggcacagaagttatcatcaatctgtgggcgctgcatcacaatgagaaggagtggcaccagccggatcagttcatgcctgagcgtttcttgaatccagcggggacccagctcatctcaccgtcagtaagctatttgcccttcggagcaggacctcgctcctgtataggtgagatcctggcccgccaggagctcttcctcatcatggcctggctgctgcagaggttcgacctggaggtgccagatgatgggcagctgccctccctggaaggcatccccaaggtggtctttctgatcgactctttcaaagtgaagatcaaggtgcgccaggcctggagggaagcccaggctgagggtagcacctaaaggctgtaactcacagcccctgtccaccctatgtggccccacaacacagatttagagatacaaccccccacccttctccgccattcttccctactcccaacccactctgccttctttttcagcttgtggcaatgccagtgatgtgcataaacagtttttttttttccataa

SEQ ID NO: 406489 - DNA, 1815 bp, Homo sapiens
atatgagctcaggcctggctgggctccaggagaatctttccacaaggcaagagataacacaaagtcaaggtgaagatcagggtagccctttaaaaggcctccttgtgccctagagttgccacagctcttctactccactgctgtctatcttgcctgccggcacccagccaccatgtgggagctcgtggctctcttgctgcttaccctagcttatttgttttggcccaagagaaggtgccctggtgccaagtaccccaagagcctcctgtccctgcccctggtgggcagcctgccattcctccccagacacggccatatgcataacaacttcttcaagctgcagaaaaaatatggccccatctattcggttcgtatgggcaccaagactacagtgattgtcggccaccaccagctggccaaggaggtgcttattaagaagggcaaggacttctctgggcggcctcaaatggcaactctagacatcgcgtccaacaaccgtaagggtatcgccttcgctgactctggcgcacactggcagctgcatcgaaggctggcgatggccacctttgccctgttcaaggatggcgatcagaagctggagaagatcatttgtcaggaaatcagtacattgtgtgatatgctggccacccacaacggacagtccatagacatctcctttcctgtcttcgtggcggtaaccaatgtcatctccttgatctgcttcaatacctcctacaagaatggggaccctgagttgaatgtcatacagaattacaatgaaggcatcatagacaacctgagcaaagacagcctggtggacctagtcccctggttgaagattttccccaacaaaaccctggaaaaattaaagagccatgttaaaatacgaaatgatctgctgaataaaatacttgaaaattacaaggagaaattccggagtgactctatcaccaacatgctggacacactgatgcaagccaagatgaactcagataatggcaatgctggcccagatcaagactcagagctgctttcagataaccacattctcaccaccataggggacatctttggggctggcgtggagaccaccacctctgtggttaaatggaccctggccttcctgctgcacaatcctcaggtgaagaagaagctctacgaggagattgaccagaatgtgggtttcagccgcacaccaactatcagtgaccgtaaccgtctcctcctgctggaggccaccatccgagaggtgcttcgcctcaggcccgtggcccctatgctcatcccccacaaggccaacgttgactccagcatcggtgagtttgctgtggacaagggcacagaagttatcatcaatctgtgggcgctgcatcacaatgagaaggagtggcaccagccggatcagttcatgcctgagcgtttcttgaatccagcggggacccagctcatctcaccgtcagtaagctatttgcccttcggagcaggacctcgctcctgtataggtgagatcctggcccgccaggagctcttcctcatcatggcctggctgctgcagaggttcgacctggaggtgccagatgatgggcagctgccctccctggaaggcatccccaaggtggtctttctgatcgactctttcaaagtgaactgtaactcacagcccctgtccaccctatgtggccccacaacacagatttagagatacaaccccccacccttctccgccattcttccctactcccaacccactctgccttctttttcagcttgtggcaatgccagtgatgtgcataaacagtttttttttttccataa

SEQ ID NO: 406490 - DNA, 1813 bp, Homo sapiens
  misc_feature (1650)..(1651): n is a, c, g, or t
  misc_feature (1663)..(1663): n is a, c, g, or t
  misc_feature (1672)..(1672): n is a, c, g, or t
  misc_feature (1681)..(1682): n is a, c, g, or t
  misc_feature (1686)..(1686): n is a, c, g, or t
  misc_feature (1690)..(1690): n is a, c, g, or t
  misc_feature (1696)..(1697): n is a, c, g, or t
  misc_feature (1704)..(1704): n is a, c, g, or t
  misc_feature (1707)..(1707): n is a, c, g, or t
  misc_feature (1718)..(1718): n is a, c, g, or t
atatgagctcaggcctggctgggctccaggagaatctttccacaaggcaagagataacacaaagtcaaggtgaagatcagggtagccctttaaaaggcctccttgtgccctagagttgccacagctcttctactccactgctgtctatcttgcctgccggcacccagccaccatgtgggagctcgtggctctcttgctgcttaccctagcttatttgttttggcccaagagaaggtgccctggtgccaagtaccccaagagcctcctgtccctgcccctggtgggcagcctgccattcctccccagacacggccatatgcataacaacttcttcaagctgcagaaaaaatatggccccatctattcggttcgtatgggcaccaagactacagtgattgtcggccaccaccagctggccaaggaggtgcttattaagaagggcaaggacttctctgggcggcctcaaatggcaactctagacatcgcgtccaacaaccgtaagggtatcgccttcgctgactctggcgcacactggcagctgcatcgaaggctggcgatggccacctttgccctgttcaaggatggcgatcagaagctggagaagatcatttgtcaggaaatcagtacattgtgtgatatgctggccacccacaacggacagtccatagacatctcctttcctgtcttcgtggcggtaaccaatgtcatctccttgatctgcttcaatacctcctacaagaatggggaccctgagttgaatgtcatacagaattacaatgaaggcatcatagacaacctgagcaaagacagcctggtggacctagtcccctggttgaagattttccccaacaaaaccctggaaaaattaaagagccatgttaaaatacgaaatgatctgctgaataaaatacttgaaaattacaaggagaaattccggagtgactctatcaccaacatgctggacacactgatgcaagccaagatgaactcagataatggcaatgctggcccagatcaagactcagagctgctttcagataaccacattctcaccaccataggggacatctttggggctggcgtggagaccaccacctctgtggttaaatggaccctggccttcctgctgcacaatcctcaggtgaagaagaagctctacgaggagattgaccagaatgtgggtttcagccgcacaccaactatcagtgaccgtaaccgtctcctcctgctggaggccaccatccgagaggtgcttcgcctcaggcccgtggcccctatgctcatcccccacaaggccaacgttgactccagcatcggtgagtttgctgtggacaagggcacagaagttatcatcaatctgtgggcgctgcatcacaatgagaaggagtggcaccagccggatcagttcatgcctgagcgtttcttgaatccagcggggacccagctcatctcaccgtcagtaagctatttgcccttcggagcaggacctcgctcctgtataggtgagatcctggcccgccaggagctcttcctcatcatggcctggctgctgcagaggttcgacctggaggtgccagatgatgggcagctgccctccctggaaggcatccccaaggtggtctttctgatcgactctttcaaagtgaaccnnaaggctgtactnacaccctgntcacctatnntggncccnacacannttagagntcnaacccccaccnttttccgcaatctcttcctattttcaacccaatcttcctttctttttaacttcgtggaatggcaacgatgggcataaaccagttcttttttttta

SEQ ID NO: 406491 - DNA, 1628 bp, Homo sapiens
atatgagctcaggcctggctgggctccaggagaatctttccacaaggcaagagataacacaaagtcaaggtgaagatcagggtagccctttaaaaggcctccttgtgccctagagttgccacagctcttctactccactgctgtctatcttgcctgccggcacccagccaccatgtgggagctcgtggctctcttgctgcttaccctagcttatttgttttggcccaagagaaggtgccctggtgccaagtaccccaagagcctcctgtccctgcccctggtgggcagcctgccattcctccccagacacggccatatgcataacaacttcttcaagctgcagaaaaaatatggccccatctattcggttcgtatgggcaccaagactacagtgattgtcggccaccaccagctggccaaggaggtgcttattaagaagggcaaggacttctctgggcggcctcaaatggcaactctagacatcgcgtccaacaaccgtaagggtatcgccttcgctgactctggcgcacactggcagctgcatcgaaggctggcgatggccacctttgccctgttcaaggatggcgatcagaagctggagaagatcatttgtcaggaaatcagtacattgtgtgatatgctggccacccacaacggacagtccatagacatctcctttcctgtcttcgtggcggtaaccaatgtcatctccttgatctgcttcaatacctcctacaagaatggggaccctgagttgaatgtcatacagaattacaatgaaggcatcatagacaacctgagcaaagacagcctggtggacctagtcccctggttgaagattttccccaacaaaaccctggaaaaattaaagagccatgttaaaatacgaaatgatctgctgaataaaatacttgaaaattacaaggagaaattccggagtgactctatcaccaacatgctggacacactgatgcaagccaagatgaactcagataatggcaatgctggcccagatcaagactcagagctgctttcagataaccacattctcaccaccataggggacatctttggggctggcgtggagaccaccacctctgtggttaaatggaccctggccttcctgctgcacaatcctcaggtgaagaagaagctctacgaggagattgaccagaatgtgggtttcagccgcacaccaactatcagtgaccgtaaccgtctcctcctgctggaggccaccatccgagaggtgcttcgcctcaggcccgtggcccctatgctcatcccccacaaggccaacgttgactccagcatcggtgagtttgctgtggacaagggcacagaagttatcatcaatctgtgggcgctgcatcacaatgagaaggagtggcaccagccggatcagttcatgcctgagcgtttcttgaatccagcggggacccagctcatctcaccgtcagtaagctatttgcccttcggagcaggacctcgctcctgtataggtgagatcctggccccccgagatctttctataatgcccgctgtggaaaggtcaaccccagggccaaataagggcacctgcctccttgaagcatccaaagggggtttttaacactcttaaaaaaaaa

SEQ ID NO: 406492 - DNA, 1636 bp, Homo sapiens
atatgagctcaggcctggctgggctccaggagaatctttccacaaggcaagagataacacaaagtcaaggtgaagatcagggtagccctttaaaaggcctccttgtgccctagagttgccacagctcttctactccactgctgtctatcttgcctgccggcacccagccaccatgtgggagctcgtggctctcttgctgcttaccctagcttatttgttttggcccaagagaaggtgccctggtgccaagtaccccaagagcctcctgtccctgcccctggtgggcagcctgccattcctccccagacacggccatatgcataacaacttcttcaagctgcagaaaaaatatggccccatctattcggttcgtatgggcaccaagactacagtgattgtcggccaccaccagctggccaaggaggtgcttattaagaagggcaaggacttctctgggcggcctcaaatggcaactctagacatcgcgtccaacaaccgtaagggtatcgccttcgctgactctggcgcacactggcagctgcatcgaaggctggcgatggccacctttgccctgttcaaggatggcgatcagaagctggagaagatcatttgtcaggaaatcagtacattgtgtgatatgctggccacccacaacggacagtccatagacatctcctttcctgtcttcgtggcggtaaccaatgtcatctccttgatctgcttcaatacctcctacaagaatggggaccctgagttgaatgtcatacagaattacaatgaaggcatcatagacaacctgagcaaagacagcctggtggacctagtcccctggttgaagattttccccaacaaaaccctggaaaaattaaagagccatgttaaaatacgaaatgatctgctgaataaaatacttgaaaattacaaggagaaattccggagtgactctatcaccaacatgctggacacactgatgcaagccaagatgaactcagataatggcaatgctggcccagatcaagactcagagctgctttcagataaccacattctcaccaccataggggacatctttggggctggcgtggagaccaccacctctgtggttaaatggaccctggccttcctgctgcacaatcctcaggtgaagaagaagctctacgaggagattgaccagaatgtgggtttcagccgcacaccaactatcagtgaccgtaaccgtctcctcctgctggaggccaccatccgagaggtgcttcgcctcaggcccgtggcccctatgctcatcccccacaaggccaacgttgactccagcatcggtgagtttgctgtggacaagggcacagaagttatcatcaatctgtgggcggaaggcatccccaaggtggtctttctgatcgactctttcaaagtgaagatcaaggtgcgccaggcctggagggaagcccaggctgagggtagcacctaaaggctgtaactcacagcccctgtccaccctatgtggccccacaacacagatttagagatacaaccccccacccttctccgccattcttccctactcccaacccactctgccttctttttcagcttgtggcaatgccagtgatgtgcataaacagtttttttttttccataa

SEQ ID NO: 406493 - DNA, 1145 bp, Homo sapiens
atatgagctcaggcctggctgggctccaggagaatctttccacaaggcaagagataacacaaagtcaaggtgaagatcagggtagccctttaaaaggcctccttgtgccctagagttgccacagctcttctactccactgctgtctatcttgcctgccggcacccagccaccatgtgggagctcgtggctctcttgctgcttaccctagcttatttgttttggcccaagagaaggtgccctggtgccaagtaccccaagagcctcctgtccctgcccctggtgggcagcctgccattcctccccagacacggccatatgcataacaacttcttcaagctgcagaaaaaatatggccccatctattcggttcgtatgggcaccaagactacagtgattgtcggccaccaccagctggccaaggaggtgcttattaagaagggcaaggacttctctgggcggcctcaaatggcaactctagacatcgcgtccaacaaccgtaagggtatcgccttcgctgactctggcgcacactggcagctgcatcgaaggctggcgatggccacctttgccctgttcaaggatggcgatcagaagctggagaagatcatttgtcaggaaatcagtacattgtgtgatatgctggccacccacaacggacagtccatagacatctcctttcctgtcttcgtggcggtaaccaatgtcatctccttgatctgcttcaatacctcctacaagaatggggaccctgagttgaatgtcatacagaattacaatgaaggcatcatagacaacctgagcaaagacagcctggtggacctagtcccctggttgaagattttccccaacaaaaccctggaaaaattaaagagccatgttaaaatacgaaatgatctgctgaataaaatacttgaaaattacaaggagaaattccggagtgactctatcaccaacatgctggacacactgatgcaagccaagatgaactcagataatggcaatgctggcccagatcaagactcagagctgctttcagataaccacccttctccgccattcttccctactcccaacccactctgccttctttttcagcttgtggcaatgccagtgatgtgcataaacagtttttttttttccataa

SEQ ID NO: 406494 - DNA, 870 bp, Homo sapiens
  misc_feature (2)..(3): n is a, c, g, or t
  misc_feature (16)..(16): n is a, c, g, or t
  misc_feature (20)..(20): n is a, c, g, or t
  misc_feature (28)..(28): n is a, c, g, or t
anncgagacctttatngaanactcccanacacagactcttctactccactgctgtctatcttgcctgccggcacccagccaccatgtgggagctcgtggctctcttgctgcttaccctagcttatttgttttggcccaagagaaggtgccctggtgccaagtaccccaagagcctcctgtccctgcccctggtgggcagcctgccattcctccccagacacggccatatgcataacaacttcttcaagctgcagaaaaaatatggccccatctattcggttcgtatgggcaccaagactacagtgattgtcggccaccaccagctggccaaggaggtgcttattaagaagggcaaggacttctctgggcggcctcaaatggcaactctagacatcgcgtccaacaaccgtaagggtatcgccttcgctgactctggcgcacactggcagctgcatcgaaggctggcgatggccacctttgccctgttcaaggatggcgatcagaagctggagaagatcatttgtcaggaaatcagtacattgtgtgatatgctggccacccacaacggacagtccatagacatctcctttcctgtcttcgtggcggtaaccaatgtcatctccttgatctgcttcaatacctcctacaagaatggggaccctgagttgaatgtcatacagaattacaatgaaggcatcatagacaacctgagcaaagacagcctggtggacctagtcccctggttgaagactttccccaacataaccctgcaaacattaaagagccatgttccacaaccatctggtggggaagcacacacacttcccggcaggttcaattttgcacttttccctggctggatccaagagc

SEQ ID NO: 406495 - DNA, 452 bp, Homo sapiens
  misc_feature (2)..(3): n is a, c, g, or t
  misc_feature (16)..(16): n is a, c, g, or t
  misc_feature (20)..(20): n is a, c, g, or t
  misc_feature (28)..(28): n is a, c, g, or t
anncgagacctttatngaanactcccanacacagactcttctactccactgctgtctatcttgcctgccggcacccagccaccatgtgggagctcgtggctctcttgctgcttaccctagcttatttgttttggcccaagagaaggtgccctggtgccaagtaccccaagagcctcctgtccgaaggcatccccaaggtggtctttctgatcgactctttcaaagtgaagatcaaggtgcgccaggcctggagggaagcccaggctgagggtagcacctaaaggctgtaactcacagcccctgtccaccctatgtggccccacaacacagatttagagatacaaccccccacccttctccgccattcttccctactcccaacccactctgccttctttttcagcttgtggcaatgccagtgatgtgcataaacagtttttttttttccataa

SEQ ID NO: 406496 - DNA, 446 bp, Homo sapiens
taaggtccctgagtagttcatttatgtattcatttgctcactcattctttcaacaccgattttattgagcacctactatgtgccattcactttctcaggacactcgagctccgtggtctctgaagcttacattctagtgagggctaacaagtgaataagttcagagactcgtaagtgctttgaagtcaatcacaatttgtgtgatgtgatgagaaaatggcagaggcagtgggtggctgctttgaacaaggggtcaggaaaagtgttgcatgctgagaagcaggtaaaaaggcctccaggtgggagaggtcagcatggccagtgaaggggagagtgggccctgatgaggtcagagtggacatagtggtccgttcccactgtagctgggattacaggaggccaggagggaggttgggttttattctaattatgacaggaagtcactg

SEQ ID NO: 406497 - DNA, 529 bp, Homo sapiens
cataggttgaaaagggctggcccttcagatctgggggtgtggtgagtggcaccagccggatcagttcatgcctgagcgtttcttgaatccagcggggacccagctcatctcaccgtcagtaagctatttgcccttcggagcaggacctcgctcctgtataggtgagatcctggcccgccaggagctcttcctcatcatggcctggctgctgcagaggttcgacctggaggtgccagatgatgggcagctgccctccctggaaggcatccccaaggtggtctttctgatcgactctttcaaagtgaagatcaaggtgcgccaggcctggagggaagcccaggctgagggtagcacctaaaggctgtaactcacagcccctgtccaccctatgtggccccacaacacagatttagagatacaaccccccacccttctccgccattcttccctactcccaacccactctgccttctttttcagcttgtggcaatgccagtgatgtgcataaacagtttttttttttccataa

SEQ ID NO: 406498 - DNA, 1781 bp, Homo sapiens
  misc_feature (2)..(3): n is a, c, g, or t
  misc_feature (16)..(16): n is a, c, g, or t
  misc_feature (20)..(20): n is a, c, g, or t
  misc_feature (28)..(28): n is a, c, g, or t
anncgagacctttatngaanactcccanacacagactcttctactccactgctgtctatcttgcctgccggcacccagccaccatgtgggagctcgtggctctcttgctgcttaccctagcttatttgttttggcccaagagaaggtgccctggtgccaagtaccccaagagcctcctgtccctgcccctggtgggcagcctgccattcctccccagacacggccatatgcataacaacttcttcaagctgcagaaaaaatatggccccatctattcggttcgtatgggcaccaagactacagtgattgtcggccaccaccagctggccaaggaggtgcttattaagaagggcaaggacttctctgggcggcctcaaatggcaactctagacatcgcgtccaacaaccgtaagggtatcgccttcgctgactctggcgcacactggcagctgcatcgaaggctggcgatggccacctttgccctgttcaaggatggcgatcagaagctggagaagatcatttgtcaggaaatcagtacattgtgtgatatgctggccacccacaacggacagtccatagacatctcctttcctgtcttcgtggcggtaaccaatgtcatctccttgatctgcttcaatacctcctacaagaatggggaccctgagttgaatgtcatacagaattacaatgaaggcatcatagacaacctgagcaaagacagcctggtggacctagtcccctggttgaagattttccccaacaaaaccctggaaaaattaaagagccatgttaaaatacgaaatgatctgctgaataaaatacttgaaaattacaaggagaaattccggagtgactctatcaccaacatgctggacacactgatgcaagccaagatgaactcagataatggcaatgctggcccagatcaagactcagagctgctttcagataaccacattctcaccaccataggggacatctttggggctggcgtggagaccaccacctctgtggttaaatggaccctggccttcctgctgcacaatcctcaggtgaagaagaagctctacgaggagattgaccagaatgtgggtttcagccgcacaccaactatcagtgaccgtaaccgtctcctcctgctggaggccaccatccgagaggtgcttcgcctcaggcccgtggcccctatgctcatcccccacaaggccaacgttgactccagcatcggtgagtttgctgtggacaagggcacagaagttatcatcaatctgtgggcgctgcatcacaatgagaaggagtggcaccagccggatcagttcatgcctgagcgtttcttgaatccagcggggacccagctcatctcaccgtcagtaagctatttgcccttcggagcaggacctcgctcctgtataggtgagatcctggcccgccaggagctcttcctcatcatggcctggctgctgcagaggttcgacctggaggtgccagatgatgggcagctgccctccctggaaggcatccccaaggtggtctttctgatcgactctttcaaagtgaagatcaaggtgcgccaggcctggagggaagcccaggctgagggtagcacctaaaggctgtaactcacagcccctgtccaccctatgtggccccacaacacagatttagagatacaaccccccacccttctccgccattcttccctactcccaacccactctgccttctttttcagcttgtggcaatgccagtgatgtgcataaacagtttttttttttccataa

SEQ ID NO: 406499 - DNA, 1727 bp, Homo sapiens
  misc_feature (2)..(3): n is a, c, g, or t
  misc_feature (16)..(16): n is a, c, g, or t
  misc_feature (20)..(20): n is a, c, g, or t
  misc_feature (28)..(28): n is a, c, g, or t
anncgagacctttatngaanactcccanacacagactcttctactccactgctgtctatcttgcctgccggcacccagccaccatgtgggagctcgtggctctcttgctgcttaccctagcttatttgttttggcccaagagaaggtgccctggtgccaagtaccccaagagcctcctgtccctgcccctggtgggcagcctgccattcctccccagacacggccatatgcataacaacttcttcaagctgcagaacggccaccaccagctggccaaggaggtgcttattaagaagggcaaggacttctctgggcggcctcaaatggcaactctagacatcgcgtccaacaaccgtaagggtatcgccttcgctgactctggcgcacactggcagctgcatcgaaggctggcgatggccacctttgccctgttcaaggatggcgatcagaagctggagaagatcatttgtcaggaaatcagtacattgtgtgatatgctggccacccacaacggacagtccatagacatctcctttcctgtcttcgtggcggtaaccaatgtcatctccttgatctgcttcaatacctcctacaagaatggggaccctgagttgaatgtcatacagaattacaatgaaggcatcatagacaacctgagcaaagacagcctggtggacctagtcccctggttgaagattttccccaacaaaaccctggaaaaattaaagagccatgttaaaatacgaaatgatctgctgaataaaatacttgaaaattacaaggagaaattccggagtgactctatcaccaacatgctggacacactgatgcaagccaagatgaactcagataatggcaatgctggcccagatcaagactcagagctgctttcagataaccacattctcaccaccataggggacatctttggggctggcgtggagaccaccacctctgtggttaaatggaccctggccttcctgctgcacaatcctcaggtgaagaagaagctctacgaggagattgaccagaatgtgggtttcagccgcacaccaactatcagtgaccgtaaccgtctcctcctgctggaggccaccatccgagaggtgcttcgcctcaggcccgtggcccctatgctcatcccccacaaggccaacgttgactccagcatcggtgagtttgctgtggacaagggcacagaagttatcatcaatctgtgggcgctgcatcacaatgagaaggagtggcaccagccggatcagttcatgcctgagcgtttcttgaatccagcggggacccagctcatctcaccgtcagtaagctatttgcccttcggagcaggacctcgctcctgtataggtgagatcctggcccgccaggagctcttcctcatcatggcctggctgctgcagaggttcgacctggaggtgccagatgatgggcagctgccctccctggaaggcatccccaaggtggtctttctgatcgactctttcaaagtgaagatcaaggtgcgccaggcctggagggaagcccaggctgagggtagcacctaaaggctgtaactcacagcccctgtccaccctatgtggccccacaacacagatttagagatacaaccccccacccttctccgccattcttccctactcccaacccactctgccttctttttcagcttgtggcaatgccagtgatgtgcataaacagtttttttttttccataa

SEQ ID NO: 406500 - DNA, 1640 bp, Homo sapiens
  misc_feature (2)..(3): n is a, c, g, or t
  misc_feature (16)..(16): n is a, c, g, or t
  misc_feature (20)..(20): n is a, c, g, or t
  misc_feature (28)..(28): n is a, c, g, or t
anncgagacctttatngaanactcccanacacagactcttctactccactgctgtctatcttgcctgccggcacccagccaccatgtgggagctcgtggctctcttgctgcttaccctagcttatttgttttggcccaagagaaggtgccctggtgccaagtaccccaagagcctcctgtccctgcccctggtgggcagcctgccattcctccccagacacggccatatgcataacaacttcttcaagctgcagaacggccaccaccagctggccaaggaggtgcttattaagaagggcaaggacttctctgggcggcctcaaatggcaactctagacatcgcgtccaacaaccgtaagggtatcgccttcgctgactctggcgcacactggcagctgcatcgaaggctggcgatggccacctttgccctgttcaaggatggcgatcagaagctggagaagatcatttgtcaggaaatcagtacattgtgtgatatgctggccacccacaacggacagtccatagacatctcctttcctgtcttcgtggcggtaaccaatgtcatctccttgatctgcttcaatacctcctacaagaatggggaccctgagttgaatgtcatacagaattacaatgaaggcatcatagacaacctgagcaaagacagcctggtggacctagtcccctggttgaaggagaaattccggagtgactctatcaccaacatgctggacacactgatgcaagccaagatgaactcagataatggcaatgctggcccagatcaagactcagagctgctttcagataaccacattctcaccaccataggggacatctttggggctggcgtggagaccaccacctctgtggttaaatggaccctggccttcctgctgcacaatcctcaggtgaagaagaagctctacgaggagattgaccagaatgtgggtttcagccgcacaccaactatcagtgaccgtaaccgtctcctcctgctggaggccaccatccgagaggtgcttcgcctcaggcccgtggcccctatgctcatcccccacaaggccaacgttgactccagcatcggtgagtttgctgtggacaagggcacagaagttatcatcaatctgtgggcgctgcatcacaatgagaaggagtggcaccagccggatcagttcatgcctgagcgtttcttgaatccagcggggacccagctcatctcaccgtcagtaagctatttgcccttcggagcaggacctcgctcctgtataggtgagatcctggcccgccaggagctcttcctcatcatggcctggctgctgcagaggttcgacctggaggtgccagatgatgggcagctgccctccctggaaggcatccccaaggtggtctttctgatcgactctttcaaagtgaagatcaaggtgcgccaggcctggagggaagcccaggctgagggtagcacctaaaggctgtaactcacagcccctgtccaccctatgtggccccacaacacagatttagagatacaaccccccacccttctccgccattcttccctactcccaacccactctgccttctttttcagcttgtggcaatgccagtgatgtgcataaacagtttttttttttccataa

SEQ ID NO: 406501 - DNA, 2109 bp, Homo sapiens
  misc_feature (1888)..(1892): n is a, c, g, or t
  misc_feature (2085)..(2085): n is a, c, g, or t
atatgagctcaggcctggctgggctccaggagaatctttccacaaggcaagagataacacaaagtcaaggtgaagatcagggtagccctttaaaaggcctccttgtgccctagagttgccacagctcttctactccactgctgtctatcttgcctgccggcacccagccaccatgtgggagctcgtggctctcttgctgcttaccctagcttatttgttttggcccaagagaaggtgccctggtgccaagtaccccaagagcctcctgtccctgcccctggtgggcagcctgccattcctccccagacacggccatatgcataacaacttcttcaagctgcagaaaaaatatggccccatctattcggttcgtatgggcaccaagactacagtgattgtcggccaccaccagctggccaaggaggtgcttattaagaagggcaaggacttctctgggcggcctcaaatggcaactctagacatcgcgtccaacaaccgtaagggtatcgccttcgctgactctggcgcacactggcagctgcatcgaaggctggcgatggccacctttgccctgttcaaggatggcgatcagaagctggagaagatcatttgtcaggaaatcagtacattgtgtgatatgctggccacccacaacggacagtccatagacatctcctttcctgtcttcgtggcggtaaccaatgtcatctccttgatctgcttcaatacctcctacaagaatggggaccctgagttgaatgtcatacagaattacaatgaaggcatcatagacaacctgagcaaagacagcctggtggacctagtcccctggttgaagattttccccaacaaaaccctggaaaaattaaagagccatgttaaaatacgaaatgatctgctgaataaaatacttgaaaattacaaggagaaattccggagtgactctatcaccaacatgctggacacactgatgcaagccaagatgaactcagataatggcaatgctggcccagatcaagactcagagctgctttcagataaccacattctcaccaccataggggacatctttggggctggcgtggagaccaccacctctgtggttaaatggaccctggccttcctgctgcacaatcctcaggtgaagaagaagctctacgaggagattgaccagaatgtgggtttcagccgcacaccaactatcagtgaccgtaaccgtctcctcctgctggaggccaccatccgagaggtgcttcgcctcaggcccgtggcccctatgctcatcccccacaaggccaacgttgactccagcatcggtgagtttgctgtggacaagggcacagaagttatcatcaatctgtgggcgctgcatcacaatgagaaggagtggcaccagccggatcagttcatgcctgagcgtttcttgaatccagcggggacccagctcatctcaccgtcagtaagctatttgcccttcggagcaggacctcgctcctgtataggtgagatcctggcccgccaggagctcttcctcatcatggcctggctgctgcagaggttcgacctggaggtgccagatgatgggcagctgccctccctggaaggcatccccaaggtggtctttctgatcgactctttcaaagtgaagatcaaggtgcgccaggcctggagggaagcccaggctgagggtagcacctaaaggctgtaactcacagcccctgtccaccctatgtggccccacaacacagatttagagatacaaccccccacccttctccgccattcttccctactcccaacccactctgccttctttttcagcttgtggcaatgccagtgatgtgcataaacagtttttttttttccataaaaaaaaaaaaaaaaaaannnnnaaaaaaaaaaaaaaaaaaaaaaaaaaaaaaaaaaatataaaaataaatatattataaatatataaaatatatttaaaatttaatttaaaaaaaaatatataaaaaaattatttttcttatttacattttaatttaatttcaatttaattttttttattaattcttttaatatataccataataacccttctcntcctcttataacactctctcccca

SEQ ID NO: 406502 - DNA, 2032 bp, Homo sapiens
  misc_feature (1937)..(1937): n is a, c, g, or t
  misc_feature (1939)..(1939): n is a, c, g, or t
  misc_feature (1941)..(1941): n is a, c, g, or t
  misc_feature (1947)..(1947): n is a, c, g, or t
  misc_feature (1949)..(1949): n is a, c, g, or t
  misc_feature (1952)..(1952): n is a, c, g, or t
  misc_feature (1957)..(1957): n is a, c, g, or t
  misc_feature (1968)..(1969): n is a, c, g, or t
  misc_feature (1972)..(1972): n is a, c, g, or t
  misc_feature (1984)..(1984): n is a, c, g, or t
  misc_feature (1987)..(1987): n is a, c, g, or t
  misc_feature (1992)..(1992): n is a, c, g, or t
  misc_feature (1997)..(1998): n is a, c, g, or t
  misc_feature (2005)..(2005): n is a, c, g, or t
  misc_feature (2009)..(2009): n is a, c, g, or t
  misc_feature (2016)..(2016): n is a, c, g, or t
  misc_feature (2018)..(2018): n is a, c, g, or t
  misc_feature (2020)..(2020): n is a, c, g, or t
atatgagctcaggcctggctgggctccaggagaatctttccacaaggcaagagataacacaaagtcaaggtgaagatcagggtagccctttaaaaggcctccttgtgccctagagttgccacagctcttctactccactgctgtctatcttgcctgccggcacccagccaccatgtgggagctcgtggctctcttgctgcttaccctagcttatttgttttggcccaagagaaggtgccctggtgccaagtaccccaagagcctcctgtccctgcccctggtgggcagcctgccattcctccccagacacggccatatgcataacaacttcttcaagctgcagaaaaaatatggccccatctattcggttcgtatgggcaccaagactacagtgattgtcggccaccaccagctggccaaggaggtgcttattaagaagggcaaggacttctctgggcggcctcaaatggcaactctagacatcgcgtccaacaaccgtaagggtatcgccttcgctgactctggcgcacactggcagctgcatcgaaggctggcgatggccacctttgccctgttcaaggatggcgatcagaagctggagaagatcatttgtcaggaaatcagtacattgtgtgatatgctggccacccacaacggacagtccatagacatctcctttcctgtcttcgtggcggtaaccaatgtcatctccttgatctgcttcaatacctcctacaagaatggggaccctgagttgaatgtcatacagaattacaatgaaggcatcatagacaacctgagcaaagacagcctggtggacctagtcccctggttgaagattttccccaacaaaaccctggaaaaattaaagagccatgttaaaatacgaaatgatctgctgaataaaatacttgaaaattacaaggagaaattccggagtgactctatcaccaacatgctggacacactgatgcaagccaagatgaactcagataatggcaatgctggcccagatcaagactcagagctgctttcagataaccacattctcaccaccataggggacatctttggggctggcgtggagaccaccacctctgtggttaaatggaccctggccttcctgctgcacaatcctcaggtgaagaagaagctctacgaggagattgaccagaatgtgggtttcagccgcacaccaactatcagtgaccgtaaccgtctcctcctgctggaggccaccatccgagaggtgcttcgcctcaggcccgtggcccctatgctcatcccccacaaggccaacgttgactccagcatcggtgagtttgctgtggacaagggcacagaagttatcatcaatctgtgggcgctgcatcacaatgagaaggagtggcaccagccggatcagttcatgcctgagcgtttcttgaatccagcggggacccagctcatctcaccgtcagtaagctatttgcccttcggagcaggacctcgctcctgtataggtgagatcctggcccgccaggagctcttcctcatcatggcctggctgctgcagaggttcgacctggaggtgccagatgatgggcagctgccctccctggaaggcatccccaaggtggtctttctgatcgactctttcaaagtgaagatcaaggtgcgccaggcctggagggaagcccaggctgagggtagcacctaaaggctgtaactcacagcccctgtccaccctatgtggccccacaacacagatttagagatacaaccccccacccttctccgccattcttccctactcccaacccactctgccttctttttcagcttgtggcaatgccagtgatgtgcataaacagtttttttttttccataatcaaaaaaaaaaacaagctatgcttgcggccccattcgagctcattggccaatcgcctatagtgagncnantacaantnatngccgncgtttaaacgnngantggaaaccctgngtncccantaatnncttgganaatnccctttncnantgggataaaaca

SEQ ID NO: 406503 - DNA, 1824 bp, Homo sapiens
atatgagctcaggcctggctgggctccaggagaatctttccacaaggcaagagataacacaaagtcaaggtgaagatcagggtagccctttaaaaggcctccttgtgccctagagttgccacagctcttctactccactgctgtctatcttgcctgccggcacccagccaccatgtgggagctcgtggctctcttgctgcttaccctagcttatttgttttggcccaagagaaggtgccctggtgccaagtaccccaagagcctcctgtccctgcccctggtgggcagcctgccattcctccccagacacggccatatgcataacaacttcttcaagctgcagaaaaaatatggccccatctattcggttcgtatgggcaccaagactacagtgattgtcggccaccaccagctggccaaggaggtgcttattaagaagggcaaggacttctctgggcggcctcaaatggcaactctagacatcgcgtccaacaaccgtaagggtatcgccttcgctgactctggcgcacactggcagctgcatcgaaggctggcgatggccacctttgccctgttcaaggatggcgatcagaagctggagaagatcatttgtcaggaaatcagtacattgtgtgatatgctggccacccacaacggacagtccatagacatctcctttcctgtcttcgtggcggtaaccaatgtcatctccttgatctgcttcaatacctcctacaagaatggggaccctgagttgaatgtcatacagaattacaatgaaggcatcatagacaacctgagcaaagacagcctggtggacctagtcccctggttgaagattttccccaacaaaaccctggaaaaattaaagagccatgttaaaatacgaaatgatctgctgaataaaatacttgaaaattacaaggagaaattccggagtgactctatcaccaacatgctggacacactgatgcaagccaagatgaactcagataatggcaatgctggcccagatcaagactcagagctgctttcagataaccacattctcaccaccataggggacatctttggggctggcgtggagaccaccacctctgtggttaaatggaccctggccttcctgctgcacaatcctcaggtgaagaagaagctctacgaggagattgaccagaatgtgggtttcagccgcacaccaactatcagtgaccgtaaccgtctcctcctgctggaggccaccatccgagaggtgcttcgcctcaggcccgtggcccctatgctcatcccccacaaggccaacgttgactccagcatcggtgagtttgctgtggacaagggcacagaagttatcatcaatctgtgggcgctgcatcacaatgagaaggagtggcaccagccggatcagttcatgcctgagcgtttcttgaatccagcggggacccagctcatctcaccgtcagtaagctatttgcccttcggagcaggacctcgctcctgtataggtgagatcctggcccgccaggagctcttcctcatcatggcctggctgctgcagaggttcgacctggaggtgccagatgatgggcagctgccctccctggaaggcatccccaaggtggtctttctgatcgactctttcaaagtgaagatcaaggtgcgccaggcctggagggaagcccaggctgagggtagcacctaaaggatttagagatacaaccccccacccttctccgccattcttccctactcccaacccactctgccttctttttcagcttgtggcaatgccagtgatgtgcataaacagtttttttttttccataa

SEQ ID NO: 406504 - DNA, 596 bp, Homo sapiens
cctgggctgtaggaattcggcactaggttgactccagcatcggtgagtttgctgtggacaagggcacagaagttatcatcaatctgtgggcgctgcatcacaatgagaaggagtggcaccagccggatcagttcatgcctgagcgtttcttgaatccagcggggacccagctcatctcaccgtcagtaagctatttgcccttcggagcaggacctcgctcctgtataggtgagatcctggcccgccaggagctcttcctcatcatggcctggctgctgcagaggttcgacctggaggtgccagatgatgggcagctgccctccctggaaggcatccccaaggtggtctttctgatcgactctttcaaagtgaagatcaaggtgcgccaggcctggagggaagcccaggctgagggtagcacctaaaggctgtaactcacagcccctgtccaccctatgtggccccacaacacagatttagagatacaaccccccacccttctccgccattcttccctactcccaacccactctgccttctttttcagcttgtggcaatgccagtgatgtgcataaacagtttttttttttccataa

SEQ ID NO: 406505 - DNA, 1783 bp, Homo sapiens
gaactctgggcgccggccccggaagtgcccgccgagctattttggttcaaggactcttccggtccctaaagcaagaaggaagaccgagaaaaggaagcggaggagaatcccggggcatacgcttgacacacacgcatacaaaaagagctttagtctcgaaagaggaattaccgaagtgtcgagagaggaattttaagaagtttacaactccgtcttcgccctaaacgcacgctgacccggaaagtaatctcctgaagctaggtcaaaggcgggggttctacggatgccggaaggagggtgcgcgcccatccttttagcaccgcgagaggcgccggtgtttcgagccgtggcaccggcatcggctgacactgctgcctccagctagttatttcgtcctcttccgttcttcacccctacaccttggaggtgaacttctcacctgagggctgtaaagactcgtttgaaaatggagagccaagaaccaacggaatcttctcagaatggcaaacagtatatcatttcagaggagttaatttcagaaggaaaatgggtcaagcttgaaaaaacaacgtacatggatcctactggtaaaactagaacttgggaatcagtgaaacgtacaaccaggaaagagcagactgcggatggtgtcgcggtcatccccgtgctgcagagaacacttcactatgagtgtatcgttctggtgaaacagttccgaccaccaatggggggctactgcatagagttccctgcaggtctcatagatgatggtgaaaccccagaagcagctgctctccgggagcttgaagaagaaactggctacaaaggggacattgccgaatgttctccagcggtctgtatggacccaggcttgtcaaactgtactatacacatcgtgacagtcaccattaacggagatgatgccgaaaacgcaaggccgaagccaaagccaggggatggagagtttgtggaagtcatttctttacccaagaatgacctgctgcagagacttgatgctctggtagctgaagaacatctcacagtggacgccagggtctattcctacgctctagcactgaaacatgcaaatgcaaagccatttgaagtgcccttcttgaaattttaagcccaaatatgacactggccatttttgtaaacgagaccaccaggccttcttcactaagactttgtattcaacttagtttaatgtagatttgccattagctttttcgtaaaataaaagcacagaacagaaaaacaaaaaaaaaaaagaaaaaaaaaaaaaaaaaaaaaaaaaaaaaaaaaaaaaaaaaaaaaaaaaaaaaaaaaaaaaaaaaaaaaaaggggggggggggaaaaaaagggggggccgaccaaataatcacgaccgcaccacaacatagtcttgggagaaaaagggggcgcgcccaaatataagggcgcgcgcgtataataataatacacagcaaccgagcggagcgcggcccgcgctattatcaaaaacaccgcgtgcgctagccagcggaaaaaaccgagcggaactccggcgggcacccatcgctaggagaaaagaacaccaccaaatgcgggggggggagggcaaaacaactgggcgggcaacacacctccccgagagataattttaacggccgacggcgggacaatacaaacaaccttgcagcgcgactaatggtggggtgcaaccacccgacgatatgatgcccctgcgcgagcagaaaaatgctcgccacaacagattacactagaaaaaaatataacagcg

SEQ ID NO: 406506 - DNA, 561 bp, Homo sapiens
gagaatcgcttaaacccaggaggcagaggttgcagtgagccgagatcacgccattgccctctagcttgggcaacagagcgagactgtctcaccaaaaaaaaaaaaaatcattatccctgatgttcttgtctcatgctaggaatgtaatcttgcctttatagtctttattctttaagatccttatagaccaaaaaaaacgttatcaccagcatctagcataggaagtgacatatagtagtacctgctgcgcaaacactgattgaataagatgttttgtccttccttaacggcatgatctaagttgttttctttgctttccacagctctggtagctgaagaacatctcacagtggacgccagggtctattcctacgctctagcactgaaacatgcaaatgcaaagccatttgaagtgcccttcttgaaattttaagcccaaatatgacactggccatttttgtaaacgagaccaccaggccttcttcactaagactttgtattcaacttagtttaatgtagatttgccattagctttttcgtaaaataaaagcacagaacaga

SEQ ID NO: 406507 - DNA, 3508 bp, Homo sapiens
gaactctgggcgccggccccggaagtgcccgccgagctattttggttcaaggactcttccggtccctaaagcaagaaggaagaccgagaaaaggaagcggaggagaatcccggggcatacgcttgacacacacgcatacaaaaagagctttagtctcgaaagaggaattaccgaagtgtcgagagaggaattttaagaagtttacaactccgtcttcgccctaaacgcacgctgacccggaaagtaatctcctgaagctaggtcaaaggcgggggttctacggatgccggaaggagggtgcgcgcccatccttttagcaccgcgagaggcgccggtgtttcgagccgtggcaccggcatcggctgacactgctgcctccagctagttatttcgtcctcttccgttcttcacccctacaccttggaggtgaacttctcacctgagggctgtaaagactcgtttgaaaatggagagccaagaaccaacggaatcttctcagaatggcaaacagtatatcatttcagaggagttaatttcagaaggaaaatgggtcaagcttgaaaaaacaacgtacatggatcctactggtaaaactagaacttgggaatcagtgaaacgtacaaccaggaaagagcagactgcggatggtgtcgcggtcatccccgtgctgcagagaacacttcactatgagtgtatcgttctggtgaaacagttccgaccaccaatggggggctactgcatagagttccctgcaggtctcatagatgatggtgaaaccccagaagcagctgctctccgggagcttgaagaagaaactggctacaaaggggacattgccgaatgttctccagcggtctgtatggacccaggcttgtcaaactgtactatacacatcgtgacagtcaccattaacggagatgatgccgaaaacgcaaggccgaagccaaagccaggggatggagagtttgtggaagtcatttctttacccaagaatgacctgctgcagagacttgatgctctggtagctgaagaacatctcacagtggacgccagggtctattcctacgctctagcactgaaacatgcaaatgcaaagccatttgaagtgcccttcttgaaattttaagcccaaatatgacactggccatttttgtaaacgagaccaccaggccttcttcactaagactttgtattcaacttagtttaatgtagatttgccattagctttttcgtaaaataaaagcacagaacagatgtggtggtggtatggaattgtaattacaggtaggttgtgaccttcctttaaatttgttataactccagctaaaattaacaaagaatataaatgcaagtatgtttactccaatttttttaaagctcaacagcagttaactacagctcagttacttttctagtccagtctggtagacaggggtatttgtatagagaaatagacctgagttctcaattaggtcatttccactctcaacccccaatataaaattctaagctgggtatgcaaataaccatgtactccgttagtgtttaaaacagcgttaaaaagaaaaaaaaggctttttggcctcttctaattgaatttttactatgcaaaatttatctagggtagttgaatccaactagggtagggttcgatagaatcctctactagttttcagttcatctatttactgaggctgaaccagcttttaagtaaggaaaacggttgactccattcactacaccaaggctaggagactaatgaaaattcaggtccatcccgcaagcatctgcacgtgcttgaggatctcttttcctattcttacctcaaagagtacttgaagtttctgaaaacaaatctgtaagactgacatgtttggggcagtaatatcttgatgttaaaccatgaacagaaccagcaagatcagccagtacctgaaacccaatacagagtagttcacagcaagaagtacagattgatctggttcccatgcctgaaaccctgtcatctagcagttctaccagtgttcctgggccattttcttagcttcttgagtgagtttagctctttttgtgttgacttttagggcctccagcagctccatgattttccaggactttccagtctggcccccacggaattctcaggatgattctcatccagccctaagtcatgtttctagcctggctccagcgggtaagccaggccctgagaaccatatgaaagggctctccagataaaatcagagtgctaatgccagaatgctgcagtagcctccgtttgtccacaggctcactgtctgagcccaggatatttttatgagtgaaactgtaagatctttacactggacttcctaaagataaaacaattatggaaatacagaactttacagatgaagctgtctagccctatacatgtgaaaattaagatccaactacttcctgtaatggtagccttcccctatgcctctaacccttttttaaatcctgatttcaatcacaggcattgtgattctccaaagctctaactcttccttaggtctgaaagccacatgctatcaatcattgaaatcaagagagaaggcatccgtagacgggcgcagcccagtcttttccacatagcccagttcctccccagccactccccatgggaatgacctctgcagctgacctaagcttatcctctccttcttcctaagagtgcaacttagaagtcagagccaaatcctagaatgtatccctaaatgccatttctattttttataaacatgaaaaggttgtgctttggaaattcagtctgtttgagaactggcagtctggctggcactgtttaaaaatgtttatttgccctgcatttaaaaactgaaggtttcctatgtattaaaagccatatttccaccttcttaagggaaaaaaaaatcggacgtcataacactgggtggatgtttttatggtaacagtggtctgaggcccttggcggatgctcaccgagccactgtcactatcctgcctgcctttatctgccttgccctgcgattatttggctttgtaagcataagctacgtaagacataccacacctaagaaactaaacagcaatgaaaacccatacttctgaaaagggtgtcttttaaaaattaagtttgatcttttgggaaataaagcacatagttttcaaaatgatttaccaagatctatgctctttcaaatggagactgggatattgttgttttgagaccactgttttcctgtttcctcccaaatgttagtcacatatatgattacccttaagttggtcactatctatctatctgtcaataatttaggattaaagtttgaagtgtaattacatttgacttttacaggcatctcagggtggacttcttatgaatacactgaacctatacaaatgatcttagaaaacgtttaatatcagatttctttattttttccaacacaactgaatcagttttcttaaataaaagtttattgtctactgttaaaaaaaaaaa

SEQ ID NO: 406508 - DNA, 1176 bp, Homo sapiens
gaactctgggcgccggccccggaagtgcccgccgagctattttggttcaaggactcttccggtccctaaagcaagaaggaagaccgagaaaaggaagcggaggagaatcccggggcatacgcttgacacacacgcatacaaaaagagctttagtctcgaaagaggaattaccgaagtgtcgagagaggaattttaagaagtttacaactccgtcttcgccctaaacgcacgctgacccggaaagtaatctcctgaagctaggtcaaaggcgggggttctacggatgccggaaggagggtgcgcgcccatccttttagcaccgcgagaggcgccggtgtttcgagccgtggcaccggcatcggctgacactgctgcctccagctagttatttcgtcctcttccgttcttcacccctacaccttggaggtgaacttctcacctgagggctgtaaagactcgtttgaaaatggagagccaagaaccaacggaatcttctcagaatggcaaacagtatatcatttcagaggagttaatttcagaaggaaaatgggtcaagcttgaaaaaacaacgtacatggatcctactggtaaaactagaacttgggaatcagtgaaacgtacaaccaggaaagagcagactgcggatggtgtcgcggtcatccccgtgctgcagagaacacttcactatgagtgtatcgttctggtgaaacagttccgaccaccaatggggggctactgcatagagttccctgcaggtctcatagatgatggtgaaaccccagaagcagctgctctccgggagcttgaagaagaaactggctacaaaggggacattgccgaatgttctccagcggtctgtatggacccaggcttgtcaaactgtactatacacatcgtgacagtcaccattaacggagatgatgccgaaaacgcaaggccgaagccaaagccaggggatggagagtttgtggaagtcatttctttacccaagaatgacctgctgcagagacttgatgctctggtagctgaagaacatctcacagtggacgccagggtctattcctacgctctagcactgaaacatgcaaatgcaaagccatttgaagtgcccttcttgaaattttaagcccaaatatgagacccgcgagggggagcctctagagcagattacagcgg

SEQ ID NO: 406509 - DNA, 2440 bp, Homo sapiens
gaactctgggcgccggccccggaagtgcccgccgagctattttggttcaaggactcttccggtccctaaagcaagaaggaagaccgagaaaaggaagcggaggagaatcccggggcatacgcttgacacacacgcatacaaaaagagctttagtctcgaaagaggaattaccgaagtgtcgagagaggaattttaagaagtttacaactccgtcttcgccctaaacgcacgctgacccggaaagtaatctcctgaagctaggtcaaaggcgggggttctacggatgccggaaggagggtgcgcgcccatccttttagcaccgcgagaggcgccggtgtttcgagccgtggcaccggcatcggctgacactgctgcctccagctagttatttcgtcctcttccgttcttcacccctacaccttggaggtgaacttctcacctgagggctgtaaagactcgtttgaaaatggagagccaagaaccaacggaatcttctcagaatggcaaacagtatatcatttcagaggagttaatttcagaaggaaaatgggtcaagcttgaaaaaacaacgtacatggatcctactggtaaaactagaacttgggaatcagtgaaacgtacaaccaggaaagagcagactgcggatggtgtcgcggtcatccccgtgctgcagagaacacttcactatgagtgtatcgttctggtgaaacagttccgaccaccaatggggggctactgcatagagttccctgcaggtctcatagatgatggtgaaaccccagaagcagctgctctccgggagcttgaagaagaaactggctacaaaggggacattgccgaatgttctccagcggtctgtatggacccaggcttgtcaaactgtactatacacatcgtgacagtcaccattaacggagatgatgccgaaaacgcaaggccgaagccaaagccaggggatggagagtttgtggaagtcatttctttacccaagaatgacctgctgcagagacttgatgggcctccagcagctccatgattttccaggactttccagtctggcccccacggaattctcaggatgattctcatccagccctaagtcatgtttctagcctggctccagcgggtaagccaggccctgagaaccatatgaaagggctctccagataaaatcagagtgctaatgccagaatgctgcagtagcctccgtttgtccacaggctcactgtctgagcccaggatatttttatgagtgaaactgtaagatctttacactggacttcctaaagataaaacaattatggaaatacagaactttacagatgaagctgtctagccctatacatgtgaaaattaagatccaactacttcctgtaatggtagccttcccctatgcctctaacccttttttaaatcctgatttcaatcacaggcattgtgattctccaaagctctaactcttccttaggtctgaaagccacatgctatcaatcattgaaatcaagagagaaggcatccgtagacgggcgcagcccagtcttttccacatagcccagttcctccccagccactccccatgggaatgacctctgcagctgacctaagcttatcctctccttcttcctaagagtgcaacttagaagtcagagccaaatcctagaatgtatccctaaatgccatttctattttttataaacatgaaaaggttgtgctttggaaattcagtctgtttgagaactggcagtctggctggcactgtttaaaaatgtttatttgccctgcatttaaaaactgaaggtttcctatgtattaaaagccatatttccaccttcttaagggaaaaaaaaatcggacgtcataacactgggtggatgtttttatggtaacagtggtctgaggcccttggcggatgctcaccgagccactgtcactatcctgcctgcctttatctgccttgccctgcgattatttggctttgtaagcataagctacgtaagacataccacacctaagaaactaaacagcaatgaaaacccatacttctgaaaagggtgtcttttaaaaattaagtttgatcttttgggaaataaagcacatagttttcaaaatgatttaccaagatctatgctctttcaaatggagactgggatattgttgttttgagaccactgttttcctgtttcctcccaaatgttagtcacatatatgattacccttaagttggtcactatctatctatctgtcaataatttaggattaaagtttgaagtgtaattacatttgacttttacaggcatctcagggtggacttcttatgaatacactgaacctatacaaatgatcttagaaaacgtttaatatcagatttctttattttttccaacacaactgaatcagttttcttaaataaaagtttattgtctactgttaaaaaaaaaaa

SEQ ID NO: 406510 - DNA, 3454 bp, Homo sapiens
gaactctgggcgccggccccggaagtgcccgccgagctattttggttcaaggactcttccggtccctaaagcaagaaggaagaccgagaaaaggaagcggaggagaatcccggggcatacgcttgacacacacgcatacaaaaagagctttagtctcgaaagaggaattaccgaagtgtcgagagaggaattttaagaagtttacaactccgtcttcgccctaaacgcacgctgacccggaaagtaatctcctgaagctaggtcaaaggcgggggttctacggatgccggaaggagggtgcgcgcccatccttttagcaccgcgagaggcgccggtgtttcgagccgtggcaccggcatcggctgacactgctgcctccagctagttatttcgtcctcttccgttcttcacccctacaccttggaggtgaacttctcacctgagggctgtaaagactcgtttgaaaatggagagccaagaaccaacggaatcttctcagaatggcaaacagtatatcatttcagaggagttaatttcagaaggaaaatgggtcaagcttgaaaaaacaacgtacatggatcctactggtaaaactagaacttgggaatcagtgaaacgtacaaccaggaaagagcagactgcggatggtgtcgcggtcatccccgtgctgcagagaacacttcactatgagtgtatcgttctggtgaaacagttccgaccaccaatggggggctactgcatagagttccctgcaggtctcatagatgatggtgaaaccccagaagcagctgctctccgggagcttgaagaagaaactggctacaaaggggacattgccgaatgttctccagcggtctgtatggacccaggcttgtcaaactgtactatacacatcgtgacagtcaccattaacggagatgatgccgctttacccaagaatgacctgctgcagagacttgatgctctggtagctgaagaacatctcacagtggacgccagggtctattcctacgctctagcactgaaacatgcaaatgcaaagccatttgaagtgcccttcttgaaattttaagcccaaatatgacactggccatttttgtaaacgagaccaccaggccttcttcactaagactttgtattcaacttagtttaatgtagatttgccattagctttttcgtaaaataaaagcacagaacagatgtggtggtggtatggaattgtaattacaggtaggttgtgaccttcctttaaatttgttataactccagctaaaattaacaaagaatataaatgcaagtatgtttactccaatttttttaaagctcaacagcagttaactacagctcagttacttttctagtccagtctggtagacaggggtatttgtatagagaaatagacctgagttctcaattaggtcatttccactctcaacccccaatataaaattctaagctgggtatgcaaataaccatgtactccgttagtgtttaaaacagcgttaaaaagaaaaaaaaggctttttggcctcttctaattgaatttttactatgcaaaatttatctagggtagttgaatccaactagggtagggttcgatagaatcctctactagttttcagttcatctatttactgaggctgaaccagcttttaagtaaggaaaacggttgactccattcactacaccaaggctaggagactaatgaaaattcaggtccatcccgcaagcatctgcacgtgcttgaggatctcttttcctattcttacctcaaagagtacttgaagtttctgaaaacaaatctgtaagactgacatgtttggggcagtaatatcttgatgttaaaccatgaacagaaccagcaagatcagccagtacctgaaacccaatacagagtagttcacagcaagaagtacagattgatctggttcccatgcctgaaaccctgtcatctagcagttctaccagtgttcctgggccattttcttagcttcttgagtgagtttagctctttttgtgttgacttttagggcctccagcagctccatgattttccaggactttccagtctggcccccacggaattctcaggatgattctcatccagccctaagtcatgtttctagcctggctccagcgggtaagccaggccctgagaaccatatgaaagggctctccagataaaatcagagtgctaatgccagaatgctgcagtagcctccgtttgtccacaggctcactgtctgagcccaggatatttttatgagtgaaactgtaagatctttacactggacttcctaaagataaaacaattatggaaatacagaactttacagatgaagctgtctagccctatacatgtgaaaattaagatccaactacttcctgtaatggtagccttcccctatgcctctaacccttttttaaatcctgatttcaatcacaggcattgtgattctccaaagctctaactcttccttaggtctgaaagccacatgctatcaatcattgaaatcaagagagaaggcatccgtagacgggcgcagcccagtcttttccacatagcccagttcctccccagccactccccatgggaatgacctctgcagctgacctaagcttatcctctccttcttcctaagagtgcaacttagaagtcagagccaaatcctagaatgtatccctaaatgccatttctattttttataaacatgaaaaggttgtgctttggaaattcagtctgtttgagaactggcagtctggctggcactgtttaaaaatgtttatttgccctgcatttaaaaactgaaggtttcctatgtattaaaagccatatttccaccttcttaagggaaaaaaaaatcggacgtcataacactgggtggatgtttttatggtaacagtggtctgaggcccttggcggatgctcaccgagccactgtcactatcctgcctgcctttatctgccttgccctgcgattatttggctttgtaagcataagctacgtaagacataccacacctaagaaactaaacagcaatgaaaacccatacttctgaaaagggtgtcttttaaaaattaagtttgatcttttgggaaataaagcacatagttttcaaaatgatttaccaagatctatgctctttcaaatggagactgggatattgttgttttgagaccactgttttcctgtttcctcccaaatgttagtcacatatatgattacccttaagttggtcactatctatctatctgtcaataatttaggattaaagtttgaagtgtaattacatttgacttttacaggcatctcagggtggacttcttatgaatacactgaacctatacaaatgatcttagaaaacgtttaatatcagatttctttattttttccaacacaactgaatcagttttcttaaataaaagtttattgtctactgttaaaaaaaaaaa

SEQ ID NO: 406511 - DNA, 1593 bp, Homo sapiens
gaactctgggcgccggccccggaagtgcccgccgagctattttggttcaaggactcttccggtccctaaagcaagaaggaagaccgagaaaaggaagcggaggagaatcccggggcatacgcttgacacacacgcatacaaaaagagctttagtctcgaaagaggaattaccgaagtgtcgagagaggaattttaagaagtttacaactccgtcttcgccctaaacgcacgctgacccggaaagtaatctcctgaagctaggtcaaaggcgggggttctacggatgccggaaggagggtgcgcgcccatccttttagcaccgcgagaggcgccggtgtttcgagccgtggcaccggcatcggctgacactgctgcctccagctagttatttcgtcctcttccgttcttcacccctacaggttttgccatgttacccaggctggtctcagactcttggtcccccaaagggctaggattccaggtgtgagccactgtgcctggtccaagtaacagttcttaaaagaaacaacagagaaaacacaggggaggaaatcatcagtgaagtcgttcaagaaaaaaattccctgtaaagaagcatagtaagaagtttccagattgaaaggacccacttgacttcccagtacaataacatcgacatgaaagtgactaactacaagcttccagaggaggaagacaggtcacatggcaaaaagatcaagaataagaatagctttggacttctcaacagcagcaccagccttggaggtgaacttctcacctgagggctgtaaagactcgtttgaaaatggagagccaagaaccaacggaatcttctcagaatggcaaacagtatatcatttcagaggagttaatttcagaaggaaaatgggtcaagcttgaaaaaacaacgtacatggatcctactggtaaaactagaacttgggaatcagtgaaacgtacaaccaggaaagagcagactgcggatggtgtcgcggtcatccccgtgctgcagagaacacttcactatgagtgtatcgttctggtgaaacagttccgaccaccaatggggggctactgcatagagttccctgcaggtctcatagatgatggtgaaaccccagaagcagctgctctccgggagcttgaagaagaaactggctacaaaggggacattgccgaatgttctccagcggtctgtatggacccaggcttgtcaaactgtactatacacatcgtgacagtcaccattaacggagatgatgccgaaaacgcaaggccgaagccaaagccaggggatggagagtttgtggaagtcatttctttacccaagaatgacctgctgcagagacttgatgctctggtagctgaagaacatctcacagtggacgccagggtctattcctacgctctagcactgaaacatgcaaatgcaaagccatttgaagtgcccttcttgaaattttaagcccaaatatgacactggccatttttgtaaacgagaccaccaggccttcttcactaagactttgtattcaacttagtttaatgtagatttgccattagctttttcgtaaaataaaagcacagaacaga

SEQ ID NO: 406512 - DNA, 910 bp, Homo sapiens
cggaagaggacgaaataactagctggaggcagcagtgtcagccgatgccggtgccacggctcgaaacaccggcgccttggaggtgaacttctcacctgagggctgtaaagactcgtttgaaaatggagagccaagaaccaacggaatcttctcagaatggcaaacagtatatcatttcagaggagttaatttcagaaggaaaatgggtcaagcttgaaaaaacaacgtacatggatcctactggtaaaactagaacttgggaatcagtgaaacgtacaaccaggaaagagcagactgcggatggtgtcgcggtcatccccgtgctgcagagaacacttcactatgagtgtatcgttctggtgaaacagttccgaccaccaatggggggctactgcatagagttccctgcaggtctcatagatgatggtgaaaccccagaagcagctgctctccgggagcttgaagaagaaactggctacaaaggggacattgccgaatgttctccagcggtctgtatggacccaggcttgtcaaactgtactatacacatcgtgacagtcaccattaacggagatgatgccgaaaacgcaaggccgaagccaaagccaggggatggagagtttgtggaagtcatttctttacccaagaatgacctgctgcagagacttgatgctctggtagctgaagaacatctcacagtggacgccagggtctattcctacgctctagcactgaaacatgcaaatgcaaagccatttgaagtgcccttcttgaaattttaagcccaaatatgacactggccatttttgtaaacgagaccaccaggccttcttcactaagactttgtattcaacttagtttaatgtagatttgccattagctttttcgtaaaataaaagcacagaacaga

SEQ ID NO: 406513 - DNA, 3564 bp, Homo sapiens
gaactctgggcgccggccccggaagtgcccgccgagctattttggttcaaggactcttccggtccctaaagcaagaaggaagaccgagaaaaggaagcggaggagaatcccggggcatacgcttgacacacacgcatacaaaaagagctttagtctcgaaagaggaattaccgaagtgtcgagagaggaattttaagaagtttacaactccgtcttcgccctaaacgcacgctgacccggaaagtaatctcctgaagctaggtcaaaggcgggggttctacggatgccggaaggagggtgcgcgcccatccttttagcaccgcgagaggcgccggtgtttcgagccgtggcaccggcatcggctgacactgctgcctccagctagttatttcgtcctcttccgttcttcacccctacaccttggaggtgaacttctcacctgagggctgtaaagactcgtttgaaaatggagagccaagaaccaacggaatcttctcagaatggcaaacagtatatcatttcagaggagttaatttcagaaggaaaatgggtcaagcttgaaaaaacaacgtacatggatcctactggtaaaactagaacttgggaatcagtgaaacgtacaaccaggaaagagcagactgcggatggtaggagtgcaaacctattccaaccctttagaaaggaagttagcacttgtgatcgggtgtcgcggtcatccccgtgctgcagagaacacttcactatgagtgtatcgttctggtgaaacagttccgaccaccaatggggggctactgcatagagttccctgcaggtctcatagatgatggtgaaaccccagaagcagctgctctccgggagcttgaagaagaaactggctacaaaggggacattgccgaatgttctccagcggtctgtatggacccaggcttgtcaaactgtactatacacatcgtgacagtcaccattaacggagatgatgccgaaaacgcaaggccgaagccaaagccaggggatggagagtttgtggaagtcatttctttacccaagaatgacctgctgcagagacttgatgctctggtagctgaagaacatctcacagtggacgccagggtctattcctacgctctagcactgaaacatgcaaatgcaaagccatttgaagtgcccttcttgaaattttaagcccaaatatgacactggccatttttgtaaacgagaccaccaggccttcttcactaagactttgtattcaacttagtttaatgtagatttgccattagctttttcgtaaaataaaagcacagaacagatgtggtggtggtatggaattgtaattacaggtaggttgtgaccttcctttaaatttgttataactccagctaaaattaacaaagaatataaatgcaagtatgtttactccaatttttttaaagctcaacagcagttaactacagctcagttacttttctagtccagtctggtagacaggggtatttgtatagagaaatagacctgagttctcaattaggtcatttccactctcaacccccaatataaaattctaagctgggtatgcaaataaccatgtactccgttagtgtttaaaacagcgttaaaaagaaaaaaaaggctttttggcctcttctaattgaatttttactatgcaaaatttatctagggtagttgaatccaactagggtagggttcgatagaatcctctactagttttcagttcatctatttactgaggctgaaccagcttttaagtaaggaaaacggttgactccattcactacaccaaggctaggagactaatgaaaattcaggtccatcccgcaagcatctgcacgtgcttgaggatctcttttcctattcttacctcaaagagtacttgaagtttctgaaaacaaatctgtaagactgacatgtttggggcagtaatatcttgatgttaaaccatgaacagaaccagcaagatcagccagtacctgaaacccaatacagagtagttcacagcaagaagtacagattgatctggttcccatgcctgaaaccctgtcatctagcagttctaccagtgttcctgggccattttcttagcttcttgagtgagtttagctctttttgtgttgacttttagggcctccagcagctccatgattttccaggactttccagtctggcccccacggaattctcaggatgattctcatccagccctaagtcatgtttctagcctggctccagcgggtaagccaggccctgagaaccatatgaaagggctctccagataaaatcagagtgctaatgccagaatgctgcagtagcctccgtttgtccacaggctcactgtctgagcccaggatatttttatgagtgaaactgtaagatctttacactggacttcctaaagataaaacaattatggaaatacagaactttacagatgaagctgtctagccctatacatgtgaaaattaagatccaactacttcctgtaatggtagccttcccctatgcctctaacccttttttaaatcctgatttcaatcacaggcattgtgattctccaaagctctaactcttccttaggtctgaaagccacatgctatcaatcattgaaatcaagagagaaggcatccgtagacgggcgcagcccagtcttttccacatagcccagttcctccccagccactccccatgggaatgacctctgcagctgacctaagcttatcctctccttcttcctaagagtgcaacttagaagtcagagccaaatcctagaatgtatccctaaatgccatttctattttttataaacatgaaaaggttgtgctttggaaattcagtctgtttgagaactggcagtctggctggcactgtttaaaaatgtttatttgccctgcatttaaaaactgaaggtttcctatgtattaaaagccatatttccaccttcttaagggaaaaaaaaatcggacgtcataacactgggtggatgtttttatggtaacagtggtctgaggcccttggcggatgctcaccgagccactgtcactatcctgcctgcctttatctgccttgccctgcgattatttggctttgtaagcataagctacgtaagacataccacacctaagaaactaaacagcaatgaaaacccatacttctgaaaagggtgtcttttaaaaattaagtttgatcttttgggaaataaagcacatagttttcaaaatgatttaccaagatctatgctctttcaaatggagactgggatattgttgttttgagaccactgttttcctgtttcctcccaaatgttagtcacatatatgattacccttaagttggtcactatctatctatctgtcaataatttaggattaaagtttgaagtgtaattacatttgacttttacaggcatctcagggtggacttcttatgaatacactgaacctatacaaatgatcttagaaaacgtttaatatcagatttctttattttttccaacacaactgaatcagttttcttaaataaaagtttattgtctactgttaaaaaaaaaaa

SEQ ID NO: 406514 - DNA, 1890 bp, Homo sapiens
gaactctgggcgccggccccggaagtgcccgccgagctattttggttcaaggactcttccggtccctaaagcaagaaggaagaccgagaaaaggaagcggaggagaatcccggggcatacgcttgacacacacgcatacaaaaagagctttagtctcgaaagaggaattaccgaagtgtcgagagaggaattttaagaagtttacaactccgtcttcgccctaaacgcacgctgacccggaaagtaatctcctgaagctaggtcaaaggcgggggttctacggatgccggaaggagggtgcgcgcccatccttttagcaccgcgagaggcgccggtgtttcgagccgtggcaccggcatcggctgacactgctgcctccagctagttatttcgtcctcttccgttcttcacccctacaccttggaggtgaacttctcacctgagggctgtaaagactcgtttgaaaatggagagccaagaaccaacggaatcttctcagaatggcaaacagtatatcatttcagaggagttaatttcagaaggaaaatgggtcaagcttgaaaaaacaacgtacatggatcctactggtaaaactagaacttgggaatcagtgaaacgtacaaccaggaaagagcagactgcggatggtgtcgcggtcatccccgtgctgcagagaacacttcactatgagtgtatcgttctggtgaaacagttccgaccaccaatggggggctactgcatagagttccctgcaggtctcatagatgatggtgaaaccccagaagcagctgctctccgggagcttgaagaagaaactggctacaaaggggacattgccgaatgttctccagcggtctgtatggacccaggcttgtcaaactgtactatacacatcgtgacagtcaccattaacggagatgatgccgaaaacgcaaggccgaagccaaagccaggggatggagagtttgtggaagtcatttctttacccaagaatgacctgctgcagagacttgatggtaagcattctccagaccgccacccagtttctccagttctccccgtccccatcccagcaaactgggtactaaatataactccatttctttatcttttttgtatcactaaagtcaaatgcctagcaacttgtaaaactgcaggtgaccactactaattttcctttctgggtggcacagagtttgaaaataagagcaaagcattctgggtcaagtgcaaacttttggtagaggctttttctcctacagaatggcccagatgacattcctgctgagtagccaaaacgattctacactttaaaccttcagtccatagcaatgcaaaggtgtgggtagataagctgttagcttttcctcaagtatgctagtatgagggatggtcctttgtggaggctgtatgttcaaggagaaattgatgatgctccttcaacaaatacttgaggtatttcctgtatactccgtgtgatatgcttttcacataataaaccaaaccagctgtgtggcccttagaaatcactggtcatgtagatgctttgtataattcttggccacccatcttttagagactttgtaaacagtaagcttatggggagaaaagtcctttgataaaaccacgagaggagatactgtatggagacatgaggagatactgtgtggagacgaggagatactgtatggagacataccatgggcccttcaaggagcacctctgtatgggctggcaaatccctttcactcatctagaaagaagcagacacttgtcatcatgggaatattttattgggtataagtgttttaggtaattgataactgatttttctactgtttttaagtgattacttcaaatgtgatttgaagcattgtttggcctgaagct

SEQ ID NO: 406515 - DNA, 1700 bp, Homo sapiens
gaactctgggcgccggccccggaagtgcccgccgagctattttggttcaaggactcttccggtccctaaagcaagaaggaagaccgagaaaaggaagcggaggagaatcccggggcatacgcttgacacacacgcatacaaaaagagctttagtctcgaaagaggaattaccgaagtgtcgagagaggaattttaagaagtttacaactccgtcttcgccctaaacgcacgctgacccggaaagtaatctcctgaagctaggtcaaaggcgggggttctacggatgccggaaggagggtgcgcgcccatccttttagcaccgcgagaggcgccggtgtttcgagccgtggcaccggcatcggctgacactgctgcctccagctagttatttcgtcctcttccgttcttcacccctacaccttggaggtgaacttctcacctgagggctgtaaagactcgtttgaaaatggagagccaagaaccaacggaatcttctcagaatggcaaacagtatatcatttcagaggagttaatttcagaaggaaaatgggtcaagcttgaaaaaacaacgtacatggatcctactggtaaaactagaacttgggaatcagtgaaacgtacaaccaggaaagagcagactgcggatggtgtcgcggtcatccccgtgctgcagagaacacttcactatgagtgtatcgttctggtgaaacagttccgaccaccaatggggggctactgcatagagttccctgcaggtctcatagatgatggtgaaaccccagaagcagctgctctccgggagcttgaagaagaaactggctacaaaggggacattgccgaatgttctccagcggtctgtatggacccaggcttgtcaaactgtactatacacatcgtgacagtcaccattaacggagatgatgccgaaaacgcaaggccgaagccaaagccaggggatggagagtttgtggaagtcatttctttacccaagaatgacctgctgcagagacttgatggtaagcattctccagaccgccacccagtttctccagttctccccgtccccatcccagcaaactgggtactaaatataactccatttctttatcttttttgtatcactaaagtcaaatgcctagcaacttgtaaaactgcaggtgaccactactaattttcctttctgggtggcacagagtttgaaaataagagcaaagcattctgggtcaagtgcaaacttttggtagaggctttttctcctacagaatggcccagatgacattcctgctgagtagccaaaacgattctacactttaaaccttcagtccatagcaatgcaaaggtgtgggtagataagctgttagcttttcctcaagtatgctagtatgagggatggtcctttgtggaggctgtatgttcaaggagaaattgatgatgctccttcaacaaatacttgaggtatttcctgtatactccgtgtgatatgcttttcacataataaaccaaaccagctgtgtggcccttagaaatcaaaaaaaaaaaaacaaaaaaaacaaaacaaaaaaaaaaaacacccgggggacaataacgggggggggcaaaaaaggggttcaataaaacggcccaggggcaccaaggggtgtccgaccccttttttttcaccaccagggggaaaacgcgggggccccaaaaggggggcggaa

SEQ ID NO: 406516 - DNA, 2790 bp, Homo sapiens
gggcaggtctcgtgggctacgtggttaagtcctgcaggtctcatagatgatggtgaaaccccagaagcagctgctctccgggagcttgaagaagaaactggctacaaaggggacattgccgaatgttctccagcggtctgtatggacccaggcttgtcaaactgtactatacacatcgtgacagtcaccattaacggagatgatgccgaaaacgcaaggccgaagccaaagccaggggatggagagtttgtggaagtcatttctttacccaagaatgacctgctgcagagacttgatgctctggtagctgaagaacatctcacagtggacgccagggtctattcctacgctctagcactgaaacatgcaaatgcaaagccatttgaagtgcccttcttgaaattttaagcccaaatatgacactggccatttttgtaaacgagaccaccaggccttcttcactaagactttgtattcaacttagtttaatgtagatttgccattagctttttcgtaaaataaaagcacagaacagatgtggtggtggtatggaattgtaattacaggtaggttgtgaccttcctttaaatttgttataactccagctaaaattaacaaagaatataaatgcaagtatgtttactccaatttttttaaagctcaacagcagttaactacagctcagttacttttctagtccagtctggtagacaggggtatttgtatagagaaatagacctgagttctcaattaggtcatttccactctcaacccccaatataaaattctaagctgggtatgcaaataaccatgtactccgttagtgtttaaaacagcgttaaaaagaaaaaaaaggctttttggcctcttctaattgaatttttactatgcaaaatttatctagggtagttgaatccaactagggtagggttcgatagaatcctctactagttttcagttcatctatttactgaggctgaaccagcttttaagtaaggaaaacggttgactccattcactacaccaaggctaggagactaatgaaaattcaggtccatcccgcaagcatctgcacgtgcttgaggatctcttttcctattcttacctcaaagagtacttgaagtttctgaaaacaaatctgtaagactgacatgtttggggcagtaatatcttgatgttaaaccatgaacagaaccagcaagatcagccagtacctgaaacccaatacagagtagttcacagcaagaagtacagattgatctggttcccatgcctgaaaccctgtcatctagcagttctaccagtgttcctgggccattttcttagcttcttgagtgagtttagctctttttgtgttgacttttagggcctccagcagctccatgattttccaggactttccagtctggcccccacggaattctcaggatgattctcatccagccctaagtcatgtttctagcctggctccagcgggtaagccaggccctgagaaccatatgaaagggctctccagataaaatcagagtgctaatgccagaatgctgcagtagcctccgtttgtccacaggctcactgtctgagcccaggatatttttatgagtgaaactgtaagatctttacactggacttcctaaagataaaacaattatggaaatacagaactttacagatgaagctgtctagccctatacatgtgaaaattaagatccaactacttcctgtaatggtagccttcccctatgcctctaacccttttttaaatcctgatttcaatcacaggcattgtgattctccaaagctctaactcttccttaggtctgaaagccacatgctatcaatcattgaaatcaagagagaaggcatccgtagacgggcgcagcccagtcttttccacatagcccagttcctccccagccactccccatgggaatgacctctgcagctgacctaagcttatcctctccttcttcctaagagtgcaacttagaagtcagagccaaatcctagaatgtatccctaaatgccatttctattttttataaacatgaaaaggttgtgctttggaaattcagtctgtttgagaactggcagtctggctggcactgtttaaaaatgtttatttgccctgcatttaaaaactgaaggtttcctatgtattaaaagccatatttccaccttcttaagggaaaaaaaaatcggacgtcataacactgggtggatgtttttatggtaacagtggtctgaggcccttggcggatgctcaccgagccactgtcactatcctgcctgcctttatctgccttgccctgcgattatttggctttgtaagcataagctacgtaagacataccacacctaagaaactaaacagcaatgaaaacccatacttctgaaaagggtgtcttttaaaaattaagtttgatcttttgggaaataaagcacatagttttcaaaatgatttaccaagatctatgctctttcaaatggagactgggatattgttgttttgagaccactgttttcctgtttcctcccaaatgttagtcacatatatgattacccttaagttggtcactatctatctatctgtcaataatttaggattaaagtttgaagtgtaattacatttgacttttacaggcatctcagggtggacttcttatgaatacactgaacctatacaaatgatcttagaaaacgtttaatatcagatttctttattttttccaacacaactgaatcagttttcttaaataaaagtttattgtctactgttaaaaaaaaaaa

SEQ ID NO: 406517 - DNA, 1394 bp, Homo sapiens
gaactctgggcgccggccccggaagtgcccgccgagctattttggttcaaggactcttccggtccctaaagcaagaaggaagaccgagaaaaggaagcggaggagaatcccggggcatacgcttgacacacacgcatacaaaaagagctttagtctcgaaagaggaattaccgaagtgtcgagagaggaattttaagaagtttacaactccgtcttcgccctaaacgcacgctgacccggaaagtaatctcctgaagctaggtcaaaggcgggggttctacggatgccggaaggagggtgcgcgcccatccttttagcaccgcgagaggcgccggtgtttcgagccgtggcaccggcatcggctgacactgctgcctccagctagttatttcgtcctcttccgttcttcacccctacaccttggaggtgaacttctcacctgagggctgtaaagactcgtttgaaaatggagagccaagaaccaacggaatcttctcagaatggcaaacagtatatcatttcagaggagttaatttcagaaggaaaatgggtcaagcttgaaaaaacaacgtacatggatcctactggtaaaactagaacttgggaatcagtgaaacgtacaaccaggaaagagcagactgcggatggtgtcgcggtcatccccgtgctgcagagaacacttcactatgagtgtatcgttctggtgaaacagttccgaccaccaatggggggctactgcatagagttccctgcaggtctcatagatgatggtgaaaccccagaagcagctgctctccgggagcttgaagaagaaactggctacaaaggggacattgccgaatgttctccagcggtctgtatggacccaggcttgtcaaactgtactatacacatcgtgacagtcaccattaacggagatgatgccgaaaacgcaaggccgaagccaaagccaggggatggccaggggatggaggtatgttctgcaactcctggtggccgagcgtgtatgacttagtgtagtggtgatggctgcagacattttgggttgttttggtaggctcttgacgttagctttgttttcacttgcactttgtctgtttagagtttgtggaagtcatttctttacccaagaatgacctgctgcagagacttgatgctctggtagctgaagaacatctcacagtggacgccagggtctattcctacgctctagcactgaaacatgcaaatgcaaagccatttgaagtgcccttcttgaaattttaagcccaaatatgacactggccatttttgtaaacgagaccaccaggccttcttcactaagactttgtattcaacttagtttaatgtagatttgccattagctttttcgtaaaataaaagcacagaacaga

SEQ ID NO: 406518 - DNA, 2973 bp, Homo sapiens
agtggttaaaaggtaagtttttatatgttctgtatattttacataatacgcagattcatatctataaaaatatacatactatcgaatatgctttaaattttgctacttaacattatgtggagaacaataacttcatactgctcgagtttgacaatgtatataaattaagttagcagaaacccaggcttctgtgaaattctcaaagcctttttgacgcctcttgtataaaagtcttccgatgttaccactccaggccttgctgaaatgttttccttctgtttatttccaggggatggaggtatgttctgcaactcctggtggccgagcgtgtatgacttagtgtagtggtgatggctgcagacattttgggttgttttggtaggctcttgacgttagctttgttttcacttgcactttgtctgtttagagtttgtggaagtcatttctttacccaagaatgacctgctgcagagacttgatgctctggtagctgaagaacatctcacagtggacgccagggtctattcctacgctctagcactgaaacatgcaaatgcaaagccatttgaagtgcccttcttgaaattttaagcccaaatatgacactggccatttttgtaaacgagaccaccaggccttcttcactaagactttgtattcaacttagtttaatgtagatttgccattagctttttcgtaaaataaaagcacagaacagatgtggtggtggtatggaattgtaattacaggtaggttgtgaccttcctttaaatttgttataactccagctaaaattaacaaagaatataaatgcaagtatgtttactccaatttttttaaagctcaacagcagttaactacagctcagttacttttctagtccagtctggtagacaggggtatttgtatagagaaatagacctgagttctcaattaggtcatttccactctcaacccccaatataaaattctaagctgggtatgcaaataaccatgtactccgttagtgtttaaaacagcgttaaaaagaaaaaaaaggctttttggcctcttctaattgaatttttactatgcaaaatttatctagggtagttgaatccaactagggtagggttcgatagaatcctctactagttttcagttcatctatttactgaggctgaaccagcttttaagtaaggaaaacggttgactccattcactacaccaaggctaggagactaatgaaaattcaggtccatcccgcaagcatctgcacgtgcttgaggatctcttttcctattcttacctcaaagagtacttgaagtttctgaaaacaaatctgtaagactgacatgtttggggcagtaatatcttgatgttaaaccatgaacagaaccagcaagatcagccagtacctgaaacccaatacagagtagttcacagcaagaagtacagattgatctggttcccatgcctgaaaccctgtcatctagcagttctaccagtgttcctgggccattttcttagcttcttgagtgagtttagctctttttgtgttgacttttagggcctccagcagctccatgattttccaggactttccagtctggcccccacggaattctcaggatgattctcatccagccctaagtcatgtttctagcctggctccagcgggtaagccaggccctgagaaccatatgaaagggctctccagataaaatcagagtgctaatgccagaatgctgcagtagcctccgtttgtccacaggctcactgtctgagcccaggatatttttatgagtgaaactgtaagatctttacactggacttcctaaagataaaacaattatggaaatacagaactttacagatgaagctgtctagccctatacatgtgaaaattaagatccaactacttcctgtaatggtagccttcccctatgcctctaacccttttttaaatcctgatttcaatcacaggcattgtgattctccaaagctctaactcttccttaggtctgaaagccacatgctatcaatcattgaaatcaagagagaaggcatccgtagacgggcgcagcccagtcttttccacatagcccagttcctccccagccactccccatgggaatgacctctgcagctgacctaagcttatcctctccttcttcctaagagtgcaacttagaagtcagagccaaatcctagaatgtatccctaaatgccatttctattttttataaacatgaaaaggttgtgctttggaaattcagtctgtttgagaactggcagtctggctggcactgtttaaaaatgtttatttgccctgcatttaaaaactgaaggtttcctatgtattaaaagccatatttccaccttcttaagggaaaaaaaaatcggacgtcataacactgggtggatgtttttatggtaacagtggtctgaggcccttggcggatgctcaccgagccactgtcactatcctgcctgcctttatctgccttgccctgcgattatttggctttgtaagcataagctacgtaagacataccacacctaagaaactaaacagcaatgaaaacccatacttctgaaaagggtgtcttttaaaaattaagtttgatcttttgggaaataaagcacatagttttcaaaatgatttaccaagatctatgctctttcaaatggagactgggatattgttgttttgagaccactgttttcctgtttcctcccaaatgttagtcacatatatgattacccttaagttggtcactatctatctatctgtcaataatttaggattaaagtttgaagtgtaattacatttgacttttacaggcatctcagggtggacttcttatgaatacactgaacctatacaaatgatcttagaaaacgtttaatatcagatttctttattttttccaacacaactgaatcagttttcttaaataaaagtttattgtctactgttaaaaaaaaaaa

SEQ ID NO: 406519 - DNA, 2030 bp, Homo sapiens
gaactctgggcgccggccccggaagtgcccgccgagctattttggttcaaggactcttccggtccctaaagcaagaaggaagaccgagaaaaggaagcggaggagaatcccggggcatacgcttgacacacacgcatacaaaaagagctttagtctcgaaagaggaattaccgaagtgtcgagagaggaattttaagaagtttacaactccgtcttcgccctaaacgcacgctgacccggaaagtaatctcctgaagctaggtcaaaggcgggggttctacggatgccggaaggagggtgcgcgcccatccttttagcaccgcgagaggcgccggtgtttcgagccgtggcaccggcatcggctgacactgctgcctccagctagttatttcgtcctcttccgttcttcacccctacaccttggaggtgaacttctcacctgagggctgtaaagactcgtttgaaaatggagagccaagaaccaacggaatcttctcagaatggcaaacagtatatcatttcagaggagttaatttcagaaggaaaatgggtcaagcttgaaaaaacaacgtacatggatcctactggtaaaactagaacttgggaatcagtgaaacgtacaaccaggaaagagcagactgcggatggtgtcgcggtcatccccgtgctgcagagaacacttcactatgagtgtatcgttctggtgaaacagttccgaccaccaatggggggctactgcatagagttccctgcaggtctcatagatgatggtgaaaccccagaagcagctgctctccgggagcttgaagaagaaactggctacaaaggggacattgccgaatgttctccagcggtctgtatggacccaggcttgtcaaactgtactatacacatcgtgacagtcaccattaacggagatgatgccgaaaacgcaaggccgaagccaaagccaggggatggccaggggatggaggtatgttctgcaactcctggtggccgagcgtgtatgacttagtgtagtggtgatggctgcagacattttgggttgttttggtaggctcttgacgttagctttgttttcacttgcactttgtctgtttagagtttgtggaagtcatttctttacccaagaatgacctgctgcagagacttgatggtaagcattctccagaccgccacccagtttctccagttctccccgtccccatcccagcaaactgggtactaaatataactccatttctttatcttttttgtatcactaaagtcaaatgcctagcaacttgtaaaactgcaggtgaccactactaattttcctttctgggtggcacagagtttgaaaataagagcaaagcattctgggtcaagtgcaaacttttggtagaggctttttctcctacagaatggcccagatgacattcctgctgagtagccaaaacgattctacactttaaaccttcagtccatagcaatgcaaaggtgtgggtagataagctgttagcttttcctcaagtatgctagtatgagggatggtcctttgtggaggctgtatgttcaaggagaaattgatgatgctccttcaacaaatacttgaggtatttcctgtatactccgtgtgatatgcttttcacataataaaccaaaccagctgtgtggcccttagaaatcactggtcatgtagatgctttgtataattcttggccacccatcttttagagactttgtaaacagtaagcttatggggagaaaagtcctttgataaaaccacgagaggagatactgtatggagacatgaggagatactgtgtggagacgaggagatactgtatggagacataccatgggcccttcaaggagcacctctgtatgggctggcaaatccctttcactcatctagaaagaagcagacacttgtcatcatgggaatattttattgggtataagtgttttaggtaattgataactgatttttctactgtttttaagtgattacttcaaatgtgatttgaagcattgtttggcctgaagct

SEQ ID NO: 406520 - DNA, 2815 bp, Homo sapiens
gagaatcgcttaaacccaggaggcagaggttgcagtgagccgagatcacgccattgccctctagcttgggcaacagagcgagactgtctcaccaaaaaaaaaaaaaatcattatccctgatgttcttgtctcatgctaggaatgtaatcttgcctttatagtctttattctttaagatccttatagaccaaaaaaaacgttatcaccagcatctagcataggaagtgacatatagtagtacctgctgcgcaaacactgattgaataagatgttttgtccttccttaacggcatgatctaagttgttttctttgctttccacagctctggtagctgaagaacatctcacagtggacgccagggtctattcctacgctctagcactgaaacatgcaaatgcaaagccatttgaagtgcccttcttgaaattttaagcccaaatatgacactggccatttttgtaaacgagaccaccaggccttcttcactaagactttgtattcaacttagtttaatgtagatttgccattagctttttcgtaaaataaaagcacagaacagatgtggtggtggtatggaattgtaattacaggtaggttgtgaccttcctttaaatttgttataactccagctaaaattaacaaagaatataaatgcaagtatgtttactccaatttttttaaagctcaacagcagttaactacagctcagttacttttctagtccagtctggtagacaggggtatttgtatagagaaatagacctgagttctcaattaggtcatttccactctcaacccccaatataaaattctaagctgggtatgcaaataaccatgtactccgttagtgtttaaaacagcgttaaaaagaaaaaaaaggctttttggcctcttctaattgaatttttactatgcaaaatttatctagggtagttgaatccaactagggtagggttcgatagaatcctctactagttttcagttcatctatttactgaggctgaaccagcttttaagtaaggaaaacggttgactccattcactacaccaaggctaggagactaatgaaaattcaggtccatcccgcaagcatctgcacgtgcttgaggatctcttttcctattcttacctcaaagagtacttgaagtttctgaaaacaaatctgtaagactgacatgtttggggcagtaatatcttgatgttaaaccatgaacagaaccagcaagatcagccagtacctgaaacccaatacagagtagttcacagcaagaagtacagattgatctggttcccatgcctgaaaccctgtcatctagcagttctaccagtgttcctgggccattttcttagcttcttgagtgagtttagctctttttgtgttgacttttagggcctccagcagctccatgattttccaggactttccagtctggcccccacggaattctcaggatgattctcatccagccctaagtcatgtttctagcctggctccagcgggtaagccaggccctgagaaccatatgaaagggctctccagataaaatcagagtgctaatgccagaatgctgcagtagcctccgtttgtccacaggctcactgtctgagcccaggatatttttatgagtgaaactgtaagatctttacactggacttcctaaagataaaacaattatggaaatacagaactttacagatgaagctgtctagccctatacatgtgaaaattaagatccaactacttcctgtaatggtagccttcccctatgcctctaacccttttttaaatcctgatttcaatcacaggcattgtgattctccaaagctctaactcttccttaggtctgaaagccacatgctatcaatcattgaaatcaagagagaaggcatccgtagacgggcgcagcccagtcttttccacatagcccagttcctccccagccactccccatgggaatgacctctgcagctgacctaagcttatcctctccttcttcctaagagtgcaacttagaagtcagagccaaatcctagaatgtatccctaaatgccatttctattttttataaacatgaaaaggttgtgctttggaaattcagtctgtttgagaactggcagtctggctggcactgtttaaaaatgtttatttgccctgcatttaaaaactgaaggtttcctatgtattaaaagccatatttccaccttcttaagggaaaaaaaaatcggacgtcataacactgggtggatgtttttatggtaacagtggtctgaggcccttggcggatgctcaccgagccactgtcactatcctgcctgcctttatctgccttgccctgcgattatttggctttgtaagcataagctacgtaagacataccacacctaagaaactaaacagcaatgaaaacccatacttctgaaaagggtgtcttttaaaaattaagtttgatcttttgggaaataaagcacatagttttcaaaatgatttaccaagatctatgctctttcaaatggagactgggatattgttgttttgagaccactgttttcctgtttcctcccaaatgttagtcacatatatgattacccttaagttggtcactatctatctatctgtcaataatttaggattaaagtttgaagtgtaattacatttgacttttacaggcatctcagggtggacttcttatgaatacactgaacctatacaaatgatcttagaaaacgtttaatatcagatttctttattttttccaacacaactgaatcagttttcttaaataaaagtttattgtctactgttaaaaaaaaaaa

SEQ ID NO: 406521 - DNA, 1143 bp, Homo sapiens
tctcttgatttcaatgattgatagcatgtggctttcagacctaaggaagagttagagctttggagaatcacaatgcctgtgattgaaatcaggatttaaaaaagggttagaggcataggggaaggctaccattacaggaagtagttggatcttaattttcacatgtatagggctagacagccacatgctatcaatcattgaaatcaagagagaaggcatccgtagacgggcgcagcccagtcttttccacatagcccagttcctccccagccactccccatgggaatgacctctgcagctgacctaagcttatcctctccttcttcctaagagtgcaacttagaagtcagagccaaatcctagaatgtatccctaaatgccatttctattttttataaacatgaaaaggttgtgctttggaaattcagtctgtttgagaactggcagtctggctggcactgtttaaaaatgtttatttgccctgcatttaaaaactgaaggtttcctatgtattaaaagccatatttccaccttcttaagggaaaaaaaaatcggacgtcataacactgggtggatgtttttatggtaacagtggtctgaggcccttggcggatgctcaccgagccactgtcactatcctgcctgcctttatctgccttgccctgcgattatttggctttgtaagcataagctacgtaagacataccacacctaagaaactaaacagcaatgaaaacccatacttctgaaaagggtgtcttttaaaaattaagtttgatcttttgggaaataaagcacatagttttcaaaatgatttaccaagatctatgctctttcaaatggagactgggatattgttgttttgagaccactgttttcctgtttcctcccaaatgttagtcacatatatgattacccttaagttggtcactatctatctatctgtcaataatttaggattaaagtttgaagtgtaattacatttgacttttacaggcatctcagggtggacttcttatgaatacactgaacctatacaaatgatcttagaaaacgtttaatatcagatttctttattttttccaacacaactgaatcagttttcttaaataaaagtttattgtctactgttaaaaaaaaaaa

SEQ ID NO: 406522 - DNA, 1256 bp, Homo sapiens
  misc_feature (835)..(835): n is a, c, g, or t
  misc_feature (837)..(839): n is a, c, g, or t
  misc_feature (842)..(842): n is a, c, g, or t
  misc_feature (848)..(849): n is a, c, g, or t
  misc_feature (892)..(892): n is a, c, g, or t
  misc_feature (895)..(895): n is a, c, g, or t
  misc_feature (906)..(906): n is a, c, g, or t
  misc_feature (913)..(913): n is a, c, g, or t
  misc_feature (917)..(917): n is a, c, g, or t
  misc_feature (924)..(924): n is a, c, g, or t
  misc_feature (938)..(938): n is a, c, g, or t
  misc_feature (944)..(945): n is a, c, g, or t
  misc_feature (950)..(951): n is a, c, g, or t
  misc_feature (954)..(954): n is a, c, g, or t
  misc_feature (962)..(962): n is a, c, g, or t
  misc_feature (974)..(976): n is a, c, g, or t
  misc_feature (978)..(980): n is a, c, g, or t
  misc_feature (991)..(991): n is a, c, g, or t
  misc_feature (995)..(996): n is a, c, g, or t
  misc_feature (998)..(999): n is a, c, g, or t
  misc_feature (1007)..(1009): n is a, c, g, or t
  misc_feature (1017)..(1017): n is a, c, g, or t
  misc_feature (1024)..(1024): n is a, c, g, or t
  misc_feature (1026)..(1027): n is a, c, g, or t
  misc_feature (1029)..(1029): n is a, c, g, or t
  misc_feature (1035)..(1037): n is a, c, g, or t
  misc_feature (1039)..(1039): n is a, c, g, or t
  misc_feature (1049)..(1049): n is a, c, g, or t
  misc_feature (1056)..(1056): n is a, c, g, or t
  misc_feature (1058)..(1058): n is a, c, g, or t
  misc_feature (1060)..(1061): n is a, c, g, or t
  misc_feature (1067)..(1069): n is a, c, g, or t
  misc_feature (1076)..(1077): n is a, c, g, or t
  misc_feature (1079)..(1080): n is a, c, g, or t
  misc_feature (1084)..(1085): n is a, c, g, or t
  misc_feature (1091)..(1092): n is a, c, g, or t
  misc_feature (1096)..(1096): n is a, c, g, or t
  misc_feature (1110)..(1110): n is a, c, g, or t
  misc_feature (1114)..(1115): n is a, c, g, or t
  misc_feature (1129)..(1130): n is a, c, g, or t
  misc_feature (1137)..(1137): n is a, c, g, or t
gaactctgggcgccggccccggaagtgcccgccgagctattttggttcaaggactcttccggtccctaaagcaagaaggaagaccgagaaaaggaagcggaggagaatcccggggcatacgcttgacacacacgcatacaaaaagagctttagtctcgaaagaggaattaccgaagtgtcgagagaggaattttaagaagtttacaactccgtcttcgccctaaacgcacgctgacccggaaagtaatctcctgaagctaggtcaaaggcgggggttctacggatgccggaaggagggtgcgcgcccatccttttagcaccgcgagaggcgccggtgtttcgagccgtggcaccggcatcggctgacactgctgcctccagctagttatttcgtcctcttccgttcttcacccctacaccttggaggtgaacttctcacctgagggctgtaaagactcgtttgaaaatggagagccaagaaccaacggaatcttctcagaatggcaaacagtatatcatttcagaggagttaatttcagaaggaaaatgggtcaagcttgaaaaaacaacgtacatggatcctactggtaaaactagaacttgggaatcagtgaaacgtacaaccaggaaagagcagactgcggatggtgtcgcggtcatccccgtgctgcagagaacacttcactatgagtgtatcgttctggtgaaacagttccgaccaccaatggggggctactgcatagagttccctgcaggtctcatagatgatggtgaaaccccagaagcagctgctctccgggagcttgaagaagaaactggctacaaaggggacatnannnaanaaaaannaaagataaaaaaaaaaaaaaaaaaaaaaaaaaaaaaaaaaaanaanataaaaaacanaaaaaangganatgaaanaaaaaaaaaaaaanaaaaannaaaannagngaaagganagtttgtggaannnannnccccccccccnaccnncnngccgcagnnnccggacgncctgggngnngnaggacnnncnccagtggacncccgggncncnncccccnnnccccccnngnncccnnccaatnncaanccctttggagtgcncttnntttttttttatgtnntattatntttcactggccatttttgtaaacgagaccaccaggccttcttcactaagactttgtattcaacttagtttaatgtagatttgccattagctttttcgtaaaataaaagcacagaacaga

SEQ ID NO: 406523 - DNA, 1329 bp, Homo sapiens
gaactctgggcgccggccccggaagtgcccgccgagctattttggttcaaggactcttccggtccctaaagcaagaaggaagaccgagaaaaggaagcggaggagaatcccggggcatacgcttgacacacacgcatacaaaaagagctttagtctcgaaagaggaattaccgaagtgtcgagagaggaattttaagaagtttacaactccgtcttcgccctaaacgcacgctgacccggaaagtaatctcctgaagctaggtcaaaggcgggggttctacggatgccggaaggagggtgcgcgcccatccttttagcaccgcgagaggcgccggtgtttcgagccgtggcaccggcatcggctgacactgctgcctccagctagttatttcgtcctcttccgttcttcacccctacaccttggaggtgaacttctcacctgagggctgtaaagactcgtttgaaaatggagagccaagaaccaacggaatcttctcagaatggcaaacagtatatcatttcagaggagttaatttcagaaggaaaatgggtcaagcttgaaaaaacaacgtacatggatcctactggtaaaactagtgtttgggatgggaccttcagtgcttttcccagcactgtcttcttcagtctttaggactaaccttaggaggcagcagagagagctatgccaaaagaacttgggaatcagtgaaacgtacaaccaggaaagagcagactgcggatggtgtcgcggtcatccccgtgctgcagagaacacttcactatgagtgtatcgttctggtgaaacagttccgaccaccaatggggggctactgcatagagttccctgcaggtctcatagatgatggtgaaaccccagaagcagctgctctccgggagcttgaagaagaaactggctacaaaggggacattgccgaatgttctccagcggtctgtatggacccaggcttgtcaaactgtactatacacatcgtgacagtcaccattaacggagatgatgccgaaaacgcaaggccgaagccaaagccaggggatggtatgtgtgtgtcggctgtgatgaaggtggtgtggttgcattacgtgtcttggaacttgctgctagtttgatttattaaaagaatgtagtctttcatggaaagaatcggtctttcaaatagacttcatcagtattcttgtctctcttcctaatcatgtattttagcatttttcttttgccacttcattcatctttacgctttctttgtaaaaaaatgttaaatgacatattgccctgtattctatatgaagtgtatccccacttagtaatatgag

SEQ ID NO: 406524 - DNA, 1254 bp, Homo sapiens
gaactctgggcgccggccccggaagtgcccgccgagctattttggttcaaggactcttccggtccctaaagcaagaaggaagaccgagaaaaggaagcggaggagaatcccggggcatacgcttgacacacacgcatacaaaaagagctttagtctcgaaagaggaattaccgaagtgtcgagagaggaattttaagaagtttacaactccgtcttcgccctaaacgcacgctgacccggaaagtaatctcctgaagctaggtcaaaggcgggggttctacggatgccggaaggagggtgcgcgcccatccttttagcaccgcgagaggcgccggtgtttcgagccgtggcaccggcatcggctgacactgctgcctccagctagttatttcgtcctcttccgttcttcacccctacaccttggaggtgaacttctcacctgagggctgtaaagactcgtttgaaaatggagagccaagaaccaacggaatcttctcagaatggcaaacagtatatcatttcagaggagttaatttcagaaggaaaatgggtcaagcttgaaaaaacaacgtacatggatcctactggtaaaactagaacttgggaatcagtgaaacgtacaaccaggaaagagcagactgcggatggtgtcgcggtcatccccgtgctgcagagaacacttcactatgagtgtatcgttctggtgaaacagttccgaccaccaatggggggctactgcatagagttccctgcaggtctcatagatgatggtgaaaccccagaagcagctgctctccgggagcttgaagaagaaactggctacaaaggggacattgccgaatgttctccagcggtctgtatggacccaggcttgtcaaactgtactatacacatcgtgacagtcaccattaacggagatgatgccgaaaacgcaaggccgaagccaaagccaggggatggagagtttgtggaagtcatttctttacccaagaatgacctgctgcagagacttgatgctctggtagctgaagaacatctcacagtggacgccagggtctattcctacgctctagcactgaaacatgcaaatgcaaagccatttgaagtgcccttcttgaaattttaagcccaaatatgacactggccatttttgtaaacgagaccaccaggccttcttcactaagactttgtattcaacttagtttaatgtagatttgccattagctttttcgtaaaataaaagcacagaacaga

SEQ ID NO: 406525 - DNA, 1010 bp, Homo sapiens
  misc_feature (950)..(950): n is a, c, g, or t
  misc_feature (953)..(953): n is a, c, g, or t
  misc_feature (957)..(957): n is a, c, g, or t
  misc_feature (969)..(969): n is a, c, g, or t
  misc_feature (973)..(973): n is a, c, g, or t
aattagctagtacgaggctgggtgttaatcggccgagggcggggtcgagccgtggcaccggcatcggctgacactgctgcctccagctagttatttcgtcctcttccgttcttcacccctacaccttggaggtgaacttctcacctgagggctgtaaagactcgtttgaaaatggagagccaagaaccaacggaatcttctcagaatggcaaacagtatatcatttcagaggagttaatttcagaaggaaaatgggtcaagcttgaaaaaacaacgtacatggatcctactggtaaaactagaacttgggaatcagtgaaacgtacaaccaggaaagagcagactgcggatggtgtcgcggtcatccccgtgctgcagagaacacttcactatgagtgtatcgttctggtgaaacagttccgaccaccaatggggggctactgcatagagttccctgcaggtctcatagatgatggtgaaaccccagaagcagctgctctccgggagcttgaagaagaaactggctacaaaggggacattgccgaatgttctccagcggtctgtatggacccaggcttgtcaaactgtactatacacatcgtgacagtcaccattaacggagatgatgccgaaaacgcaaggccgaagccaaagccaggggatggagagtttgtggaagtcatttctttacccaagaatgacctgctgcagagacttgatgctctggtagctgaagaacatctcacagtggacgccagggtctattcctacgctctagcactgaaacatgcaaatgcaaagccatttgaagtgcccttctgaatttaagccaatatgacactggcatttgttaacgagaccacaggctctcatagactgtcatagttagggaatgctagtttcggaataaagccgacaaaaaaaaaaacgggttttgggggggagggganggnggtngcccttgaaggntggnctgtgtgtgtgagtaaagaagacaaaactgaaatgaa

SEQ ID NO: 406526 - DNA, 3454 bp, Homo sapiens
gaactctgggcgccggccccggaagtgcccgccgagctattttggttcaaggactcttccggtccctaaagcaagaaggaagaccgagaaaaggaagcggaggagaatcccggggcatacgcttgacacacacgcatacaaaaagagctttagtctcgaaagaggaattaccgaagtgtcgagagaggaattttaagaagtttacaactccgtcttcgccctaaacgcacgctgacccggaaagtaatctcctgaagctaggtcaaaggcgggggttctacggatgccggaaggagggtgcgcgcccatccttttagcaccgcgagaggcgccggtgtttcgagccgtggcaccggcatcggctgacactgctgcctccagctagttatttcgtcctcttccgttcttcacccctacaccttggaggtgaacttctcacctgagggctgtaaagactcgtttgaaaatggagagccaagaaccaacggaatcttctcagaatggcaaacagtatatcatttcagaggagttaatttcagaaggaaaatgggtcaagcttgaaaaaacaacgtacatggatcctactggtaaaactagaacttgggaatcagtgaaacgtacaaccaggaaagagcagactgcggatggtgtcgcggtcatccccgtgctgcagagaacacttcactatgagtgtatcgttctggtgaaacagttccgaccaccaatggggggctactgcatagagttccctgcaggtctcatagatgatggtgaaaccccagaagcagctgctctccgggagcttgaagaagaaactggctacaaaggggacattgccgaatgttctccagcggtctgtatggacccaggcttgtcaaactgtactatacacatcgtgacagtcaccattaacggagatgatgccgaaaacgcaaggccgaagccaaagccaggggatggagagtttgtggaagtcatttctttacccaagaatgacctgctgcagagacttgatgctctggtagctgaagaacatctcacagtggacgccagggtctattcctacgctctagcactgaaacatgcaaatgcaaagccatttgaagtgcccttcttgaaattttaagcccaaatatgacactggccatttttgtaaacgagaccaccaggccttcttcactaagactttgtattcaacttagtttaatgtagatttgccattagctttttcgtaaaataaaagcacagaacagatgtggtggtggtatggaattgtaattacaggtaggttgtgaccttcctttaaatttgttataactccagctaaaattaacaaagaatataaatgcaagtatgtttactccaatttttttaaagctcaacagcagttaactacagctcagttacttttctagtccagtctggtagacaggggtatttgtatagagaaatagacctgagttctcaattaggtcatttccactctcaacccccaatataaaattctaagctgggtatgcaaataaccatgtactccgttagtgtttaaaacagcgttaaaaagaaaaaaaaggctttttggcctcttctaattgaatttttactatgcaaaatttatctagggtagttgaatccaactagggtagggttcgatagaatcctctactagttttcagttcatctatttactgaggctgaaccagcttttaagtaaggaaaacggttgactccattcactacaccaaggctaggagactaatgaaaattcaggtccatcccgcaagcatctgcacgtgcttgaggatctcttttcctattcttacctcaaagagtacttgaagtttctgaaaacaaatctgtaagactgacatgtttggggcagtaatatcttgatgttaaaccatgaacagaaccagcaagatcagccagtacctgaaacccaatacagagtagttcacagcaagaagtacagattgatctggttcccatgcctgaaaccctgtcatctagcagttctaccagtgttcctgggccattttcttagcttcttgagtgagtttagctctttttgtgttgacttttagggcctccagcagctccatgattttccaggactttccagtctggcccccacggaattctcaggatgattctcatccagccctaagtcatgtttctagcctggctccagcgggtaagccaggccctgagaaccatatgaaagggctctccagataaaatcagagtgctaatgccagaatgctgcagtagcctccgtttgtccacaggctcactgtctgagcccaggatatttttatgagtgaaactgtaagatctttacactggacttcctaaagataaaacaattatggaaatacagaactttacagatgaagctgtctagccctatacatgtgaaaattaagatccaactacttcctgtaatggtagccttcccctatgcctctaacccttttttaaatcctgatttcaatcacaggcattgtgattctccaaagctctaactcttccttaggtctgaaagccacatgctatcaatcattgaaatcaagagagaaggcatccgtagacgggcgcagcccagtcttttccacatagcccagttcctccccagccactccccatgggaatgacctctgcagctgacctaagcttatcctctccttcttcctaagagtgcaacttagaagtcagagccaaatcctagaatgtatccctaaatgccatttctattttttataaacatgaaaaggttgtgctttggaaattcagtctgtttgagaactggcagtctggctggcactgtttaaaaatgtttatttgccctgcatttaaaaactgaaggtttcctatgtattaaaagccatatttccaccttcttaagggaaaaaaaaatcggacgtcataacactgggtggatgtttttatggtaacagtggtctgaggcccttggcggatgctcaccgagccactgtcactatcctgcctgcctttatctgccttgccctgcgattatttggctttgtaagcataagctacgtaagacataccacacctaagaaactaaacagcaatgaaaacccatacttctgaaaagggtgtcttttaaaaattaagtttgatcttttgggaaataaagcacatagttttctttgagaccactgttttcctgtttcctcccaaatgttagtcacatatatgattacccttaagttggtcactatctatctatctgtcaataatttaggattaaagtttgaagtgtaattacatttgacttttacaggcatctcagggtggacttcttatgaatacactgaacctatacaaatgatcttagaaaacgtttaatatcagatttctttattttttccaacacaactgaatcagttttcttaaataaaagtttattgtctactgttaaaaaaaaaaa

SEQ ID NO: 406527 - DNA, 1305 bp, Homo sapiens
  misc_feature (1245)..(1245): n is a, c, g, or t
  misc_feature (1248)..(1248): n is a, c, g, or t
  misc_feature (1252)..(1252): n is a, c, g, or t
  misc_feature (1264)..(1264): n is a, c, g, or t
  misc_feature (1268)..(1268): n is a, c, g, or t
gaactctgggcgccggccccggaagtgcccgccgagctattttggttcaaggactcttccggtccctaaagcaagaaggaagaccgagaaaaggaagcggaggagaatcccggggcatacgcttgacacacacgcatacaaaaagagctttagtctcgaaagaggaattaccgaagtgtcgagagaggaattttaagaagtttacaactccgtcttcgccctaaacgcacgctgacccggaaagtaatctcctgaagctaggtcaaaggcgggggttctacggatgccggaaggagggtgcgcgcccatccttttagcaccgcgagaggcgccggtgtttcgagccgtggcaccggcatcggctgacactgctgcctccagctagttatttcgtcctcttccgttcttcacccctacaccttggaggtgaacttctcacctgagggctgtaaagactcgtttgaaaatggagagccaagaaccaacggaatcttctcagaatggcaaacagtatatcatttcagaggagttaatttcagaaggaaaatgggtcaagcttgaaaaaacaacgtacatggatcctactggtaaaactagaacttgggaatcagtgaaacgtacaaccaggaaagagcagactgcggatggtgtcgcggtcatccccgtgctgcagagaacacttcactatgagtgtatcgttctggtgaaacagttccgaccaccaatggggggctactgcatagagttccctgcaggtctcatagatgatggtgaaaccccagaagcagctgctctccgggagcttgaagaagaaactggctacaaaggggacattgccgaatgttctccagcggtctgtatggacccaggcttgtcaaactgtactatacacatcgtgacagtcaccattaacggagatgatgccgaaaacgcaaggccgaagccaaagccaggggatggagagtttgtggaagtcatttctttacccaagaatgacctgctgcagagacttgatgctctggtagctgaagaacatctcacagtggacgccagggtctattcctacgctctagcactgaaacatgcaaatgcaaagccatttgaagtgcccttctgaatttaagccaatatgacactggcatttgttaacgagaccacaggctctcatagactgtcatagttagggaatgctagtttcggaataaagccgacaaaaaaaaaaacgggttttgggggggagggganggnggtngcccttgaaggntggnctgtgtgtgtgagtaaagaagacaaaactgaaatgaa

SEQ ID NO: 406528 - DNA, 3603 bp, Homo sapiens
gaactctgggcgccggccccggaagtgcccgccgagctattttggttcaaggactcttccggtccctaaagcaagaaggaagaccgagaaaaggaagcggaggagaatcccggggcatacgcttgacacacacgcatacaaaaagagctttagtctcgaaagaggaattaccgaagtgtcgagagaggaattttaagaagtttacaactccgtcttcgccctaaacgcacgctgacccggaaagtaatctcctgaagctaggtcaaaggcgggggttctacggatgccggaaggagggtgcgcgcccatccttttagcaccgcgagaggcgccggtgtttcgagccgtggcaccggcatcggctgacactgctgcctccagctagttatttcgtcctcttccgttcttcacccctacaccttggaggtgaacttctcacctgagggctgtaaagactcgtttgaaaatggagagccaagaaccaacggaatcttctcagaatggcaaacagtatatcatttcagaggagttaatttcagaaggaaaatgggtcaagcttgaaaaaacaacgtacatggatcctactggtaaaactagtgtttgggatgggaccttcagtgcttttcccagcactgtcttcttcagtctttaggactaaccttaggaggcagcagagagagctatgccaaaagaacttgggaatcagtgaaacgtacaaccaggaaagagcagactgcggatggtgtcgcggtcatccccgtgctgcagagaacacttcactatgagtgtatcgttctggtgaaacagttccgaccaccaatggggggctactgcatagagttccctgcaggtctcatagatgatggtgaaaccccagaagcagctgctctccgggagcttgaagaagaaactggctacaaaggggacattgccgaatgttctccagcggtctgtatggacccaggcttgtcaaactgtactatacacatcgtgacagtcaccattaacggagatgatgccgaaaacgcaaggccgaagccaaagccaggggatggagagtttgtggaagtcatttctttacccaagaatgacctgctgcagagacttgatgctctggtagctgaagaacatctcacagtggacgccagggtctattcctacgctctagcactgaaacatgcaaatgcaaagccatttgaagtgcccttcttgaaattttaagcccaaatatgacactggccatttttgtaaacgagaccaccaggccttcttcactaagactttgtattcaacttagtttaatgtagatttgccattagctttttcgtaaaataaaagcacagaacagatgtggtggtggtatggaattgtaattacaggtaggttgtgaccttcctttaaatttgttataactccagctaaaattaacaaagaatataaatgcaagtatgtttactccaatttttttaaagctcaacagcagttaactacagctcagttacttttctagtccagtctggtagacaggggtatttgtatagagaaatagacctgagttctcaattaggtcatttccactctcaacccccaatataaaattctaagctgggtatgcaaataaccatgtactccgttagtgtttaaaacagcgttaaaaagaaaaaaaaggctttttggcctcttctaattgaatttttactatgcaaaatttatctagggtagttgaatccaactagggtagggttcgatagaatcctctactagttttcagttcatctatttactgaggctgaaccagcttttaagtaaggaaaacggttgactccattcactacaccaaggctaggagactaatgaaaattcaggtccatcccgcaagcatctgcacgtgcttgaggatctcttttcctattcttacctcaaagagtacttgaagtttctgaaaacaaatctgtaagactgacatgtttggggcagtaatatcttgatgttaaaccatgaacagaaccagcaagatcagccagtacctgaaacccaatacagagtagttcacagcaagaagtacagattgatctggttcccatgcctgaaaccctgtcatctagcagttctaccagtgttcctgggccattttcttagcttcttgagtgagtttagctctttttgtgttgacttttagggcctccagcagctccatgattttccaggactttccagtctggcccccacggaattctcaggatgattctcatccagccctaagtcatgtttctagcctggctccagcgggtaagccaggccctgagaaccatatgaaagggctctccagataaaatcagagtgctaatgccagaatgctgcagtagcctccgtttgtccacaggctcactgtctgagcccaggatatttttatgagtgaaactgtaagatctttacactggacttcctaaagataaaacaattatggaaatacagaactttacagatgaagctgtctagccctatacatgtgaaaattaagatccaactacttcctgtaatggtagccttcccctatgcctctaacccttttttaaatcctgatttcaatcacaggcattgtgattctccaaagctctaactcttccttaggtctgaaagccacatgctatcaatcattgaaatcaagagagaaggcatccgtagacgggcgcagcccagtcttttccacatagcccagttcctccccagccactccccatgggaatgacctctgcagctgacctaagcttatcctctccttcttcctaagagtgcaacttagaagtcagagccaaatcctagaatgtatccctaaatgccatttctattttttataaacatgaaaaggttgtgctttggaaattcagtctgtttgagaactggcagtctggctggcactgtttaaaaatgtttatttgccctgcatttaaaaactgaaggtttcctatgtattaaaagccatatttccaccttcttaagggaaaaaaaaatcggacgtcataacactgggtggatgtttttatggtaacagtggtctgaggcccttggcggatgctcaccgagccactgtcactatcctgcctgcctttatctgccttgccctgcgattatttggctttgtaagcataagctacgtaagacataccacacctaagaaactaaacagcaatgaaaacccatacttctgaaaagggtgtcttttaaaaattaagtttgatcttttgggaaataaagcacatagttttcaaaatgatttaccaagatctatgctctttcaaatggagactgggatattgttgttttgagaccactgttttcctgtttcctcccaaatgttagtcacatatatgattacccttaagttggtcactatctatctatctgtcaataatttaggattaaagtttgaagtgtaattacatttgacttttacaggcatctcagggtggacttcttatgaatacactgaacctatacaaatgatcttagaaaacgtttaatatcagatttctttattttttccaacacaactgaatcagttttcttaaataaaagtttattgtctactgttaaaaaaaaaaa

SEQ ID NO: 406529 - DNA, 3547 bp, Homo sapiens
gaactctgggcgccggccccggaagtgcccgccgagctattttggttcaaggactcttccggtccctaaagcaagaaggaagaccgagaaaaggaagcggaggagaatcccggggcatacgcttgacacacacgcatacaaaaagagctttagtctcgaaagaggaattaccgaagtgtcgagagaggaattttaagaagtttacaactccgtcttcgccctaaacgcacgctgacccggaaagtaatctcctgaagctaggtcaaaggcgggggttctacggatgccggaaggagggtgcgcgcccatccttttagcaccgcgagaggcgccggtgtttcgagccgtggcaccggcatcggctgacactgctgcctccagctagttatttcgtcctcttccgttcttcacccctacaccttggaggtgaacttctcacctgagggctgtaaagactcgtttgaaaatggagagccaagaaccaacggaatcttctcagaatggcaaacagtatatcatttcagaggagttaatttcagaaggaaaatgggtcaagcttgaaaaaacaacgtacatggatcctactggtaaaactagaagaaataaagagaaaacaacaacattgctaattttgagaacttgggaatcagtgaaacgtacaaccaggaaagagcagactgcggatggtgtcgcggtcatccccgtgctgcagagaacacttcactatgagtgtatcgttctggtgaaacagttccgaccaccaatggggggctactgcatagagttccctgcaggtctcatagatgatggtgaaaccccagaagcagctgctctccgggagcttgaagaagaaactggctacaaaggggacattgccgaatgttctccagcggtctgtatggacccaggcttgtcaaactgtactatacacatcgtgacagtcaccattaacggagatgatgccgaaaacgcaaggccgaagccaaagccaggggatggagagtttgtggaagtcatttctttacccaagaatgacctgctgcagagacttgatgctctggtagctgaagaacatctcacagtggacgccagggtctattcctacgctctagcactgaaacatgcaaatgcaaagccatttgaagtgcccttcttgaaattttaagcccaaatatgacactggccatttttgtaaacgagaccaccaggccttcttcactaagactttgtattcaacttagtttaatgtagatttgccattagctttttcgtaaaataaaagcacagaacagatgtggtggtggtatggaattgtaattacaggtaggttgtgaccttcctttaaatttgttataactccagctaaaattaacaaagaatataaatgcaagtatgtttactccaatttttttaaagctcaacagcagttaactacagctcagttacttttctagtccagtctggtagacaggggtatttgtatagagaaatagacctgagttctcaattaggtcatttccactctcaacccccaatataaaattctaagctgggtatgcaaataaccatgtactccgttagtgtttaaaacagcgttaaaaagaaaaaaaaggctttttggcctcttctaattgaatttttactatgcaaaatttatctagggtagttgaatccaactagggtagggttcgatagaatcctctactagttttcagttcatctatttactgaggctgaaccagcttttaagtaaggaaaacggttgactccattcactacaccaaggctaggagactaatgaaaattcaggtccatcccgcaagcatctgcacgtgcttgaggatctcttttcctattcttacctcaaagagtacttgaagtttctgaaaacaaatctgtaagactgacatgtttggggcagtaatatcttgatgttaaaccatgaacagaaccagcaagatcagccagtacctgaaacccaatacagagtagttcacagcaagaagtacagattgatctggttcccatgcctgaaaccctgtcatctagcagttctaccagtgttcctgggccattttcttagcttcttgagtgagtttagctctttttgtgttgacttttagggcctccagcagctccatgattttccaggactttccagtctggcccccacggaattctcaggatgattctcatccagccctaagtcatgtttctagcctggctccagcgggtaagccaggccctgagaaccatatgaaagggctctccagataaaatcagagtgctaatgccagaatgctgcagtagcctccgtttgtccacaggctcactgtctgagcccaggatatttttatgagtgaaactgtaagatctttacactggacttcctaaagataaaacaattatggaaatacagaactttacagatgaagctgtctagccctatacatgtgaaaattaagatccaactacttcctgtaatggtagccttcccctatgcctctaacccttttttaaatcctgatttcaatcacaggcattgtgattctccaaagctctaactcttccttaggtctgaaagccacatgctatcaatcattgaaatcaagagagaaggcatccgtagacgggcgcagcccagtcttttccacatagcccagttcctccccagccactccccatgggaatgacctctgcagctgacctaagcttatcctctccttcttcctaagagtgcaacttagaagtcagagccaaatcctagaatgtatccctaaatgccatttctattttttataaacatgaaaaggttgtgctttggaaattcagtctgtttgagaactggcagtctggctggcactgtttaaaaatgtttatttgccctgcatttaaaaactgaaggtttcctatgtattaaaagccatatttccaccttcttaagggaaaaaaaaatcggacgtcataacactgggtggatgtttttatggtaacagtggtctgaggcccttggcggatgctcaccgagccactgtcactatcctgcctgcctttatctgccttgccctgcgattatttggctttgtaagcataagctacgtaagacataccacacctaagaaactaaacagcaatgaaaacccatacttctgaaaagggtgtcttttaaaaattaagtttgatcttttgggaaataaagcacatagttttcaaaatgatttaccaagatctatgctctttcaaatggagactgggatattgttgttttgagaccactgttttcctgtttcctcccaaatgttagtcacatatatgattacccttaagttggtcactatctatctatctgtcaataatttaggattaaagtttgaagtgtaattacatttgacttttacaggcatctcagggtggacttcttatgaatacactgaacctatacaaatgatcttagaaaacgtttaatatcagatttctttattttttccaacacaactgaatcagttttcttaaataaaagtttattgtctactgttaaaaaaaaaaa

SEQ ID NO: 406530 - DNA, 1330 bp, Homo sapiens
gaactctgggcgccggccccggaagtgcccgccgagctattttggttcaaggactcttccggtccctaaagcaagaaggaagaccgagaaaaggaagcggaggagaatcccggggcatacgcttgacacacacgcatacaaaaagagctttagtctcgaaagaggaattaccgaagtgtcgagagaggaattttaagaagtttacaactccgtcttcgccctaaacgcacgctgacccggaaagtaatctcctgaagctaggtcaaaggcgggggttctacggatgccggaaggagggtgcgcgcccatccttttagcaccgcgagaggcgccggtgtttcgagccgtggcaccggcatcggctgacactgctgcctccagctagttatttcgtcctcttccgttcttcacccctacaccttggaggtgaacttctcacctgagggctgtaaagactcgtttgaaaatggagagccaagaaccaacggaatcttctcagaatggcaaacagtatatcatttcagaggagttaatttcagaaggaaaatgggtcaagcttgaaaaaacaacgtacatggatcctactggtaaaactagaacttgggaatcagtgaaacgtacaaccaggaaagagcagactgcggatggtgtcgcggtcatccccgtgctgcagagaacacttcactatgagtgtatcgttctggtgaaacagttccgaccaccaatggggggctactgcatagagttccctgcaggtctcatagatgatggtgaaaccccagaagcagctgctctccgggagcttgaagaagaaactggctacaaaggggacattgccgaatgttctccagcggtctgtatggacccaggcttgtcaaactgtactatacacatcgtgacagtcaccattaacggagatgatgccgaaaacgcaaggccgaagccaaagccaggggatggagagtttgtggaagtcatttctttacccaagaatgacctgctgcagagacttgatgagactttgtaaacagtaagcttatggggagaaaagtcctttgataaaaccacgagaggagatactgtatggagacatgaggagatactgtgtggagacgaggagatactgtatggagacataccatgggcccttcaaggagcacctctgtatgggctggcaaatccctttcactcatctagaaagaagcagacacttgtcatcatgggaatattttattgggtataagtgttttaggtaattgataactgatttttctactgtttttaagtgattacttcaaatgtgatttgaagcattgtttggcctgaagct

SEQ ID NO: 406531 - DNA, 1293 bp, Homo sapiens
gaactctgggcgccggccccggaagtgcccgccgagctattttggttcaaggactcttccggtccctaaagcaagaaggaagaccgagaaaaggaagcggaggagaatcccggggcatacgcttgacacacacgcatacaaaaagagctttagtctcgaaagaggaattaccgaagtgtcgagagaggaattttaagaagtttacaactccgtcttcgccctaaacgcacgctgacccggaaagtaatctcctgaagctaggtcaaaggcgggggttctacggatgccggaaggagggtgcgcgcccatccttttagcaccgcgagaggcgccggtgtttcgagccgtggcaccggcatcggctgacactgctgcctccagctagttatttcgtcctcttccgttcttcacccctacaccttggaggtgaacttctcacctgagggctgtaaagactcgtttgaaaatggagagccaagaaccaacggaatcttctcagaatggcaaacagtatatcatttcagaggagttaatttcagaaggaaaatgggtcaagcttgaaaaaacaacgtacatggatcctactggtaaaactagaagaaataaagagaaaacaacaacattgctaattttgagaacttgggaatcagtgaaacgtacaaccaggaaagagcagactgcggatggtgtcgcggtcatccccgtgctgcagagaacacttcactatgagtgtatcgttctggtgaaacagttccgaccaccaatggggggctactgcatagagttccctgcaggtctcatagatgatggtgaaaccccagaagcagctgctctccgggagcttgaagaagaaactggctacaaaggggacattgccgaatgttctccagcggtctgtatggacccaggcttgtcaaactgtactatacacatcgtgacagtcaccattaacggagatgatgccgaaaacgcaaggccgaagccaaagccaggggatggagagtttgtggaagtcatttctttacccaagaatgacctgctgcagagacttgatgctctggtagctgaagaacatctcacagtggacgccagggtctattcctacgctctagcactgaaacatgcaaatgcaaagccatttgaagtgcccttcttgaaattttaagcccaaatatgacactggccatttttgtaaacgagaccaccaggccttcttcactaagactttgtattcaacttagtttaatgtagatttgccattagctttttcgtaaaataaaagcacagaacaga

SEQ ID NO: 406532 - DNA, 1234 bp, Homo sapiens
gaactctgggcgccggccccggaagtgcccgccgagctattttggttcaaggactcttccggtccctaaagcaagaaggaagaccgagaaaaggaagcggaggagaatcccggggcatacgcttgacacacacgcatacaaaaagagctttagtctcgaaagaggaattaccgaagtgtcgagagaggaattttaagaagtttacaactccgtcttcgccctaaacgcacgctgacccggaaagtaatctcctgaagctaggtcaaaggcgggggttctacggatgccggaaggagggtgcgcgcccatccttttagcaccgcgagaggcgccggtgtttcgagccgtggcaccggcatcggctgacactgctgcctccagctagttatttcgtcctcttccgttcttcacccctacaccttggaggtgaacttctcacctgagggctgtaaagactcgtttgaaaatggagagccaagaaccaacggaatcttctcagaatggcaaacagtatatcatttcagaggagttaatttcagaaggaaaatgggtcaagcttgaaaaaacaacgtacatggatcctactggtaaaactagaacttgggaatcagtgaaacgtacaaccaggaaagagcagactgcggatggtgtcgcggtcatccccgtgctgcagagaacacttcactatgagtgtatcgttctggtgaaacagttccgaccaccaatggggggctactgcatagagttccctgcaggtctcatagatgatggtgaaaccccagaagcagctgctctccgggagcttgaagaagaaactggctacaaaggggacattgccgaatgttctccagcggtctgtatggacccaggcttgtcaaactgtactatacacatcgtgacagtcaccattaacggagatgatgccgaaaacgcaaggccgaagccaaagccaggggatggtatgtgtgtgtcggctgtgatgaaggtggtgtggttgcattacgtgtcttggaacttgctgctagtttgatttattaaaagaatgtagtctttcatggaaagaatcggtctttcaaatagacttcatcagtattcttgtctctcttcctaatcatgtattttagcatttttcttttgccacttcattcatctttacgctttctttgtaaaaaaatgttaaatgacatattgccctgtattctatatgaagtgtatccccacttagtaatatgag

SEQ ID NO: 406533 - DNA, 1353 bp, Homo sapiens
gaactctgggcgccggccccggaagtgcccgccgagctattttggttcaaggactcttccggtccctaaagcaagaaggaagaccgagaaaaggaagcggaggagaatcccggggcatacgcttgacacacacgcatacaaaaagagctttagtctcgaaagaggaattaccgaagtgtcgagagaggaattttaagaagtttacaactccgtcttcgccctaaacgcacgctgacccggaaagtaatctcctgaagctaggtcaaaggcgggggttctacggatgccggaaggagggtgcgcgcccatccttttagcaccgcgagaggcgccggtgtttcgagccgtggcaccggcatcggctgacactgctgcctccagctagttatttcgtcctcttccgttcttcacccctacaccttggagtaagtaaccggggcaagccagtcacagcacaaaacctctttggggaggagaagaagaaggggaaagggaccacatctgcatgccttggaggtgaacttctcacctgagggctgtaaagactcgtttgaaaatggagagccaagaaccaacggaatcttctcagaatggcaaacagtatatcatttcagaggagttaatttcagaaggaaaatgggtcaagcttgaaaaaacaacgtacatggatcctactggtaaaactagaacttgggaatcagtgaaacgtacaaccaggaaagagcagactgcggatggtgtcgcggtcatccccgtgctgcagagaacacttcactatgagtgtatcgttctggtgaaacagttccgaccaccaatggggggctactgcatagagttccctgcaggtctcatagatgatggtgaaaccccagaagcagctgctctccgggagcttgaagaagaaactggctacaaaggggacattgccgaatgttctccagcggtctgtatggacccaggcttgtcaaactgtactatacacatcgtgacagtcaccattaacggagatgatgccgaaaacgcaaggccgaagccaaagccaggggatggagagtttgtggaagtcatttctttacccaagaatgacctgctgcagagacttgatgctctggtagctgaagaacatctcacagtggacgccagggtctattcctacgctctagcactgaaacatgcaaatgcaaagccatttgaagtgcccttctgaatttagcccaatgacactggctttgaagagacccggctctcctaatggtcctgtaggggtgctcgttgaaaggcgaagaaaaaaacggtttggggagagaagggctctcctttggacgctttagtgctcctagagaccgcgaagcc

SEQ ID NO: 406534 - DNA, 710 bp, Homo sapiens
ttggagtaagtaaccggggcaagccagtcacagcacaaaacctctttggggaggagaagaagaaggggaaagggaccacatctgcatggtgcgtgcagccgcgcggtgtctcccaggctgcggctgggcacgcgtccaggcgcccaagagggaaactggggattggagggaaattgtggattggagaggaagagcctgggctactccgagtaaagaaagcggggaacaccacagctaagtgttagttccagtgtaaagattgcagcatctgcagaggagtagaatgcttggtagagggaataccgcctgtacgatcctggagggttcgactttgggaggtaaaaggcgagaggtaaatgtgagaaagcagaggaaagaggagtctccttggagcgctgaattcgtttagtctggcctcgcaaaagttgtcaacctggaaaaaacgcagatttttatcagtattcctgcgatgatcgaatcataagactggaagaattcgaatcgaacttgtactatcgttttttcctttgcttcactcctgtcacccagcaaagttcagttttgtttgtttcgttaaaagaatgagaagtaactagctgcttttatttatttatttgagacggagtctcactctgtgcccagattggagtgcagtggcgcaatcttggctcactgcaacctccgcctcctgggtttaagtgattctcctg

SEQ ID NO: 406535 - DNA, 1414 bp, Homo sapiens
aaaaactccctgctagagagactaggagatttggggctgcggccgtttcctccggagcacccacgggactgtgtgctggggtccctccaccggctgtgtcctttattcttctttctcacccaacgatttacctgaacggttataaagtgcacgttatttccctaagcactttgagtatattggcccactgcattctggacttcaaaatttctgatgcgaaatatgctgatacttttgttgaagaaatctgggctttgagcatctgtaagatatttgttggaaggttttgtctggtccttcttactgatgtgttgctcttcttcatggctcgtgaaaactattagagtcatccaagggtgggaagagagatcagcaacgttaactgggtgtcaagaaaacataccgagattgaagccatccacttctgcaggaacaccgaaaagaaagcttacaatctgaaggtgtccgttcttacactggtcagaccactgtccttggggcagctggggtctttgggaccctccaccgggctcgccggtccgtcggacttttggctgagatccgtgtcagactcctccgaatagtcgtctgttggcatcgagggctgaacccctgaggtgctgcatgaacttgagagcgcgctctcgcacgccaggcagtggtacgagccgccgccgccgccgccgccgccaccgccgccgccgccactgccaccgccgccgccgccggtggggacgtgaagcaccatctcttgcaggttcaccacagactggccgaagaagcagagggacttcaggtggctcctcgctgcctcctcgtcgctgaagccctgaacccaaaccaagaaaaacatctgctaagaaagaacctggagcaaagattagcagaggtgctaaagggaagaaggaggaaaagcaggaagctggaaaggaaggcacagaaaactgaatctgtagataacgagggagaatgaattgtcatgaaaaattggggttgattttatgtatctcttgggacaacttttaaaagctatttttaccaagtattttgtaaatgctaattttttaggactctactagttggcatacgaaaatatataaggatggacattttatcgtctcatagtcatgctttttggaaatttacatcatcctcaagtaaaataaatatcagttaaatattggaagctgtgtgtaagattgattcagcattccatgcacttgctttaaaatttagtcctgtgcatactgtggtgtttttactgtgcatatttgaatttttcatgcagtttttctagagcaataatcagtggtgcttttgtacctaggttttatgtgattttaatgaaacatggatagttgtggccacctgctgactatttgtggtttaaaataaaaggtttacttgtctgcag

SEQ ID NO: 406536 - DNA, 533 bp, Homo sapiens
aaaaactccctgctagagagactaggagatttggggctgcggccgtttcctccggagcacccacgggactgtgtgctggggtccctccaccggctgtgtcctttattcttctttctcacccaacgatttacctgaacggttataaagtgcacgttatttccctaagcactttgagtatattggcccactgcattctggacttcaaaatttctgatgcgaaatatgctgatacttttgttgaagaaatctggtccttcttactgatgtgttgctcttcttcatggctcgtgaaaactattagagtcatccaaggtcctgacatccactgccttcactcaaacccttctggccagttccatcctacagattctaagttcctgactcagaatcttactgttgtgaacctttacacccaggtttggagacagaaaggagcaccgccaagtgaggcagagcagtctcagaaacataggaaaatcttctagcagagatggaataatagagaccagatgtaccctcccagctgaaacaac

SEQ ID NO: 406537 - DNA, 783 bp, Homo sapiens
aaaaactccctgctagagagactaggagatttggggctgcggccgtttcctccggagcacccacgggactgtgtgctggggtccctccaccggctgtgtcctttattcttctttctcacccaacgatttacctgaacggttataaagtgcacgttatttccctaagcactttgagtatattggcccactgcattctggacttcaaaatttctgatgcgaaatatgctgatacttttgttgaagaaatctgggctttgagcatctgtaagatatttgttggaaggttttgtctggtccttcttactgatgtgttgctcttcttcatggctcgtgaaaactattagagtcatccaaggtaagcgcattgcacaggggtgacaaaaaaatgggtggggtggtgggggagaacataggtatatacccaagaggaatgaaaacatactttcacacataacttgtgcacaaaagttcatagcagcattagtcataatagctaaaaagtagaaatattcatcaactgatgagtagctaaatataatgtgttatgtctttataatggaacattatttggcaataaaaaggaatgaagtactgatacacaataccacagggatgaaccttgaaaacattatgtaagtggaagaagccagtcatgaaagaccacttattatatgattccacatataagaagggaagtgggggtgactactaaaggatatggggtttcttttggcgatgatgaaaatgttctcaattaattgtggtgatggttgcaaaactctg

SEQ ID NO: 406538 - DNA, 2058 bp, Homo sapiens
  misc_feature (1)..(1): n is a, c, g, or t
  misc_feature (4)..(5): n is a, c, g, or t
  misc_feature (7)..(7): n is a, c, g, or t
  misc_feature (9)..(9): n is a, c, g, or t
ngcnngngnggcgggtgcttctagggcgctcccagagccgcctccccctgttgctggcatcccgagcttcctcccttgccagccaggacgctgccgacttgtctttgcccgctgctccgcagacggggctgcaaagctgcaactaatggtgttggcctccctgcccacctgtggaagcaactgcgctgattgatgcgccacagacttttttcccctcgacctcgccggcgtcccctcccacagatccagcatcacccagtgaatgtacattagggtggtttcccccccagcttcgggctttgtttgggtttgattgtgtttggctcttcgctaagctgatttatgcagcagaagccccaccggctggagagaaacaaaagctcttttctttgtcccggagcaggctgcggagcccttgcagagccctctctccagtcgccgccggggcccttggccgtcgaaggaggtgcttctcgcggagaccgcgggacccgccgtgccgagccgggagggccgtaggggccctgagatgccgagcggtgcccgggcccgcttacctgcaccgcttgctccgagccgcggggtccgcctgctaggcctgcggaaaacgtcctagcgacactcggcccgcgggccccgaggtgcgcccgggaggcgcgagcccgcgtccggaaggcagccaggcggcgggcgcggggcgggctgttttgcattatgtgcggctcggccctggctttttttaccgctgcatttgtctgcctgcaaaacgaccggcgaggtcccgcctcgttcctctgggcagcctgggtgttttcacttgttcttggactgggccaaggtgaagacaatagatgtgcatcttcaaatgcagcatcctgtgccaggtgccttgcgctgggtccagaatgtggatggtgtgttcaagaggatttcatttcaggtggatcaagaagtgaacgttgtgatattgtttccaatttaataagcaaaggctgctcagttgattcaatagaatacccatctgtgcatgttataatacccactgaaaatgaaattaatacccaggtgacaccaggagaagtgtctatccagctgcgtccaggagccgaagctaattttatgctgaaagttcatcctctgaagaaatatcctgtggatctttattatcttgttgatgtctcagcatcaatgcacaataatatagaaaaattaaattccgttggaaacgatttatctagaaaaatggcatttttctcccgtgactttcgtcttggatttggctcatacgttgataaaacagtttcaccatacattagcatccaccccgaaaggattcataatcaatgcagtgactacaatttagactgcatgcctccccatggatacatccatgtgctgtctttgacagagaacatcactgagtttgagaaagcagttcatagacagaagatctctggaaacatagatacaccagaaggaggttttgacgccatgcttcaggcagctgtctgtgaaagtcatatcggatggcgaaaagaggctaaaagattgctgctggtgatgacagatcagacgtctcatctcgctcttgatagcaaattggcaggcatagtggtgcccaatgacggaaactgtcatctgaaaaacaacgtctatgtcaaatcgacaaccatggaacacccctcactaggccaactttcagagaaattaatagacaacaacattaatgtcatctttgcagttcaaggaaaacaatttcattggtataaggatcttctacccctcttgccaggcaccattgctggtgaaatagaatcaaaggctgcaaacctcaataatttggtagtggaagcctatcagaagctcatttcagaagtgaaagttcaggtggaaaaccaggtacaaggcatctattttaacattaccgccatctgtccagatgggtccagaaagccaggcatggaaggatgcagaaacgtgacgagcaatgatgaagtatgtgggtgtgcatttttcccttttaaaataaactaagttgtttggcgtactttcttacag

SEQ ID NO: 406539 - DNA, 516 bp, Homo sapiens
atgaagactacatgatgtttttcttctattgaactaggagccgaagctaattttatgctgaaagttcatcctctgaagaaatatcctgtggatctttattatcttgttgatgtctcagcatcaatgcacaataatatagaaaaattaaattccgttggaaacgatttatctagaaaaatggcatttttctcccgtgactttcgtcttggatttggctcatacgttgataaaacagtttcaccatacattagcatccaccccgaaaggattcataatcaatgcaggtatctagggtttgatgtggatatgctaaattaattttttgcttataaaatctcactttgtttttaatgtaaagaacttaccaaattttatatttttatcttataaaataagaataaaaatatttggtgaggtggggaggtttcttcatatctgaaaacttctgagatgaactgtagattgggctttttattttatatttctttaaatatttagtcagtttttatcaccaaa

SEQ ID NO: 406540 - DNA, 7712 bp, Homo sapiens
  misc_feature (1)..(1): n is a, c, g, or t
  misc_feature (4)..(5): n is a, c, g, or t
  misc_feature (7)..(7): n is a, c, g, or t
  misc_feature (9)..(9): n is a, c, g, or t
ngcnngngnggcgggtgcttctagggcgctcccagagccgcctccccctgttgctggcatcccgagcttcctcccttgccagccaggacgctgccgacttgtctttgcccgctgctccgcagacggggctgcaaagctgcaactaatggtgttggcctccctgcccacctgtggaagcaactgcgctgattgatgcgccacagacttttttcccctcgacctcgccggcgtcccctcccacagatccagcatcacccagtgaatgtacattagggtggtttcccccccagcttcgggctttgtttgggtttgattgtgtttggctcttcgctaagctgatttatgcagcagaagccccaccggctggagagaaacaaaagctcttttctttgtcccggagcaggctgcggagcccttgcagagccctctctccagtcgccgccggggcccttggccgtcgaaggaggtgcttctcgcggagaccgcgggacccgccgtgccgagccgggagggccgtaggggccctgagatgccgagcggtgcccgggcccgcttacctgcaccgcttgctccgagccgcggggtccgcctgctaggcctgcggaaaacgtcctagcgacactcggcccgcgggccccgaggtgcgcccgggaggcgcgagcccgcgtccggaaggcagccaggcggcgggcgcggggcgggctgttttgcattatgtgcggctcggccctggctttttttaccgctgcatttgtctgcctgcaaaacgaccggcgaggtcccgcctcgttcctctgggcagcctgggtgttttcacttgttcttggactgggccaaggtgaagacaatagatgtgcatcttcaaatgcagcatcctgtgccaggtgccttgcgctgggtccagaatgtggatggtgtgttcaagaggatttcatttcaggtggatcaagaagtgaacgttgtgatattgtttccaatttaataagcaaaggctgctcagttgattcaatagaatacccatctgtgcatgttataatacccactgaaaatgaaattaatacccaggtgacaccaggagaagtgtctatccagctgcgtccaggagccgaagctaattttatgctgaaagttcatcctctgaagaaatatcctgtggatctttattatcttgttgatgtctcagcatcaatgcacaataatatagaaaaattaaattccgttggaaacgatttatctagaaaaatggcatttttctcccgtgactttcgtcttggatttggctcatacgttgataaaacagtttcaccatacattagcatccaccccgaaaggattcataatcaatgcagtgactacaatttagactgcatgcctccccatggatacatccatgtgctgtctttgacagagaacatcactgagtttgagaaagcagttcatagacagaagatctctggaaacatagatacaccagaaggaggttttgacgccatgcttcaggcagctgtctgtgaaagtcatatcggatggcgaaaagaggctaaaagattgctgctggtgatgacagatcagacgtctcatctcgctcttgatagcaaattggcaggcatagtggtgcccaatgacggaaactgtcatctgaaaaacaacgtctatgtcaaatcgacaaccatggaacacccctcactaggccaactttcagagaaattaatagacaacaacattaatgtcatctttgcagttcaaggaaaacaatttcattggtataaggatcttctacccctcttgccaggcaccattgctggtgaaatagaatcaaaggctgcaaacctcaataatttggtagtggaagcctatcagaagctcatttcagaagtgaaagttcaggtggaaaaccaggtacaaggcatctattttaacattaccgccatctgtccagatgggtccagaaagccaggcatggaaggatgcagaaacgtgacgagcaatgatgaagttcttttcaatgtaacagttacaatgaaaaaatgtgatgtcacaggaggaaaaaactatgcaataatcaaacctattggttttaatgaaaccgctaaaattcatatacacagaaactgcagctgtcagtgtgaggacaacagaggacctaaaggaaagtgtgtagatgaaacttttctagattccaagtgtttccagtgtgatgagaataaatgtcattttgatgaagatcagttttcttctgagagttgcaagtcacacaaggatcagcctgtttgcagtggtcgaggagtttgtgtttgtgggaaatgttcatgtcacaaaattaagcttggaaaagtgtatggaaaatactgtgaaaaggatgacttttcttgtccatatcaccatggaaatctgtgtgctgggcatggagagtgtgaagcaggcagatgccaatgcttcagtggctgggaaggtgatcgatgccagtgcccttcagcagcagcccagcactgtgtcaattcaaagggccaagtgtgcagtggaagaggcacgtgtgtgtgtggaaggtgtgagtgcaccgatcccaggagcatcggccgcttctgtgaacactgccccacctgttatacagcctgcaaggaaaactggaattgtatgcaatgccttcaccctcacaatttgtctcaggctatacttgatcagtgcaaaacctcatgtgctctcatggaacaacagcattatgtcgaccaaacttcagaatgtttctccagcccaagctacttgagaatatttttcatcattttcatagttacattcttgattgggttgcttaaagtcctgatcattagacaggtgatactacaatggaatagtaataaaattaagtcctcatcagattacagagtgtcagcctcaaaaaaggataagttgattctgcaaagtgtttgcacaagagcagtcacctaccgacgtgagaagcctgaagaaataaaaatggatatcagcaaattaaatgctcatgaaactttcaggtgcaacttctaaaaaaagatttttaaacacttaatgggaaactggaattgttaataattgctcctaaagattataattttaaaagtcacaggaggagacaaattgctcacggtcatgccagttgctggttgtacactcgaacgaagactgacaagtatcctcatcatgatgtgactcacatagctgctgactttttcagagaaaaatgtgtcttactactgtttgagactagtgtcgttgtagcactttactgtaatatataacttatttagatcagcatagaatgtagatcctctgaagagcactgattacactttacaggtacctgttatccctacgcttcccagagagaacaatgctgtgagagagtttagcattgtgtcactacaagggtacagtaatccctgcactggacatgtgaggaaaaaaataatctggcaagtatattctaaggttgccaaacacttcaacagttggtggttgaatagacaagaacagctagatgaataaatgattcgtgtttcactctttcaagaggtgaacagatacaaccttaatcttaaaagattattgctttttaaagtgtgtagttttatgcatgtgtgtttatggtttgcttatttttgcaagatggatactaattccagcattctctcctctttgcctttatgttttgttttcttttttacaggataagtttatgtatgtcacagatgactggattaattaagtgctaagttactactgccataaaaaactaataatacaatgtcactttatcagaatactagttttaaaagctgaatgttaataggggacactgtaaagtatcatcaaaacctgaatagcttcattgtgcacaagtgtggagttttgtatcctcttacctggtaaactgaagggattgtttggccatttcatttatcttatcattaattcacaagatagttagaaattctgcctcaagcaaagtaccacattttgaatgttttcttagattttgattgcaagagttaaagtactagatactgcattttgatgaagactaaccccatctcatattctaccctaaagagaactgaaaaacctataataagttgttctggagccaataaacacagcagctctgttagatgtcctctacagccaagcaatttcaatgctaacttgaactgcatttccttcctcaaatgagagattgacataattcagtactgtgagtcacttgtataagaaacctttgatcactaaaaataatgtaaaaattgggtttagtagcctaatacacataacgttcttcttaaaaaggaaaatggatggatgcctgacaaccctccaaaagaaaaaagtgtaagatagccattaagatgatgacaatttttgaaatgaacattatgatatttatgaacaataaacaaatttccgtatggaatgaattatccaaaaagagtataacaaaatgaaatccttaaaaatccagagtttatattttttttataccctcacttgtttgcactaactttatagtggaccaaggctgttaccataggaagggacaaacttccttgtaggcaactcagtgttagacgatgattgtggttatgcttgcaaagtcttgtgcttatcttttttgtttttacttaaaaagctaatttttaaagattgtagggcttgtattttacttgaataattgatatcttcctgtgtaatgatttgtgagatgagaattaatatttgactagttagaattaattaaatggtaagggaacacagggtactcttaggttaaataatgtatgcaaatagagtctattttcaactaatatggccacaggagccttttgagattcattgatattaaacacaattaatgaaattttaaattgttaacagaattgagaacttgaacaacacttttagtactgcagcatttttgtgccctaaagtatgtaatgatttataaatgtgccatacatacactacaacataacatttgctttgttatgcattttatttctctggggacaccattgcactgcagtgcacacgtatttataaacatttgttatatttttggaaacttgctaatatttattaagtcatagacttttctggaggacttaaaaattcactaaaaatctgattatgtcttaaatgttcagtttatctttggtttattaaaataaaaaaaaaatctaagattaaacacagtagatatctctggaggcaattttccaaaactcaacattaaaatttgtggatgcatgagatgcaatccttcaaagaatgaatctgaaatatatttttaatatttacttaatatccactgaagatatctttatgcaagacaagagtcagccatcagacactgaaatatattatgatagattatgaagaattttctctgtagaattatattcttcctggaacctggtagagtagattagactcaaaggctttttcttccttttcttactcctgttttttccactcactcttcccaagagatttcctaaagcttcaagcttaataagcctaatagtgaaaaataactgaatttaatggtataatgaagttcttcatttccagacatctttaattgatcttaaagctcatttgagtctttgcccctgaacaaagacagacccattaaaatctaagaattctaaattttcacaactgtttgagcttcttttcattttgaaggatttggaatatatatgttttcataaaagtatcaagtgaaatatagttacatgggagctcaatcatgtgcagattgcattctgttatgttgactcaatatttaatttacaactatccttatttatattgacctcaagaactccattttatgcaatgcagaccactgagatatagctaacattctttcaaataattttccttttcttttataattcctctatagcaaatttttatgtataactgattatacatatccatatttatatttcattgattccaagacatcactttttcaatttaacatctctgaaattgtgacatttcttgcaactgttggcacttcagatgcagtgtttaaaattatgcttgaataaatattacactaatccaactttacctaaacgtttatgcatctaggcaaattttgttttcttataaagatttgagagcccatttatgacaaaatatgaaggcgaaatttaaggacaattgagtcacgcacaactcaacatggagcctaactgattatcagctcagatcccgcatatcttgagtttacaaaagctctttcaggtccccatttatactttacgtgagtgcgaatgatttcagcaaaccctaacttaactaacaagaatgggtaggtatgtctacgtttcattaacaaatttttattatttttattctattatatgagatccttttatattatcatctcacttttaaacaaaattaactggaaaaatattacatggaactgtcatagttaggttttgcagcatcttacatgtcttgtatcaatggcaggagaaaaatatgataaaaacaatcagtgctgtgaaaaacaactttcttctagagtcctcttactttttattcttctttatcatttgtgggtttttcccccttggctctgatcactttaacttcaagcttatgtaacgactgttataaaactgcatatttaaattatttgaattatatgaaataattgttcagctatctgggcagctgttaatgtaaacctgagagtaataacactactcttttatctacctggaatacttttctgcataaaatttatctttgtaagctaactctattaatcaggtttcttctagcctctgcaacctacttcagttagaattgtctaatactgctctattaatcaggtttctagcctctacaacctacttcagttaaaattgtctaatacagcaatatttaaaaaaaaacactgcaattgtcaaggatggaaaatgtgtgatttgtgtaaacaatttttaccaactttacattttcctacagataaatgtgaaattttgataagaagtctacgcaatgacaagtatggtacataaattttattaagaatattgagtataaagtactttaattctaaattataagaaaatatacatttgcacttattaatatagaaattcattttgtgtatatttaacatagcttttaaactattttacattagctacttcattatggtttcttgaacttctgaaaaaaattagaaatgtattaaacttatcagtaacataaaaacttattttgtttcacctaacgaatactgcgtttgtaaaaataaatttaatatagaatatatttttaaattaaatatttgaatataaaatagctctaagaaagaagcaaattatcactgaacatatttcttattatttctggctttgaattatacgtaacttaaattgtcttaaatgatacagaatattggagaatatgatactttcacataatatactatgaacctgttcatataactctgattgactactaacttctgttttatgtatttattaaagagctgacactgtagtttgtggtgagatgtttatttttctaacagagcttataacagttaggacaaggcatttaattaatgcatcattctgtttagtagtaggtgttaatcaatatgaaattctctgttttaaaataaaaatgtaaaaatctaagaa

SEQ ID NO: 406541 - DNA, 8732 bp, Homo sapiens
  misc_feature (1)..(1): n is a, c, g, or t
  misc_feature (4)..(5): n is a, c, g, or t
  misc_feature (7)..(7): n is a, c, g, or t
  misc_feature (9)..(9): n is a, c, g, or t
ngcnngngnggcgggtgcttctagggcgctcccagagccgcctccccctgttgctggcatcccgagcttcctcccttgccagccaggacgctgccgacttgtctttgcccgctgctccgcagacggggctgcaaagctgcaactaatggtgttggcctccctgcccacctgtggaagcaactgcgctgattgatgcgccacagacttttttcccctcgacctcgccggcgtcccctcccacagatccagcatcacccagtgaatgtacattagggtggtttcccccccagcttcgggctttgtttgggtttgattgtgtttggctcttcgctaagctgatttatgcagcagaagccccaccggctggagagaaacaaaagctcttttctttgtcccggagcaggctgcggagcccttgcagagccctctctccagtcgccgccggggcccttggccgtcgaaggaggtgcttctcgcggagaccgcgggacccgccgtgccgagccgggagggccgtaggggccctgagatgccgagcggtgcccgggcccgcttacctgcaccgcttgctccgagccgcggggtccgcctgctaggcctgcggaaaacgtcctagcgacactcggcccgcgggccccgaggtgcgcccgggaggcgcgagcccgcgtccggaaggcagccaggcggcgggcgcggggcgggctgttttgcattatgtgcggctcggccctggctttttttaccgctgcatttgtctgcctgcaaaacgaccggcgaggtcccgcctcgttcctctgggcagcctgggtgttttcacttgttcttggactgggccaaggtgaagacaatagatgtgcatcttcaaatgcagcatcctgtgccaggtgccttgcgctgggtccagaatgtggatggtgtgttcaagaggatttcatttcaggtggatcaagaagtgaacgttgtgatattgtttccaatttaataagcaaaggctgctcagttgattcaatagaatacccatctgtgcatgttataatacccactgaaaatgaaattaatacccaggtgacaccaggagaagtgtctatccagctgcgtccaggagccgaagctaattttatgctgaaagttcatcctctgaagaaatatcctgtggatctttattatcttgttgatgtctcagcatcaatgcacaataatatagaaaaattaaattccgttggaaacgatttatctagaaaaatggcatttttctcccgtgactttcgtcttggatttggctcatacgttgataaaacagtttcaccatacattagcatccaccccgaaaggattcataatcaatgcagtgactacaatttagactgcatgcctccccatggatacatccatgtgctgtctttgacagagaacatcactgagtttgagaaagcagttcatagacagaagatctctggaaacatagatacaccagaaggaggttttgacgccatgcttcaggcagctgtctgtgaaagtcatatcggatggcgaaaagaggctaaaagattgctgctggtgatgacagatcagacgtctcatctcgctcttgatagcaaattggcaggcatagtggtgcccaatgacggaaactgtcatctgaaaaacaacgtctatgtcaaatcgacaaccatggaacacccctcactaggccaactttcagagaaattaatagacaacaacattaatgtcatctttgcagttcaaggaaaacaatttcattggtataaggatcttctacccctcttgccaggcaccattgctggtgaaatagaatcaaaggctgcaaacctcaataatttggtagtggaagcctatcagaagctcatttcagaagtgaaagttcaggtggaaaaccaggtacaaggcatctattttaacattaccgccatctgtccagatgggtccagaaagccaggcatggaaggatgcagaaacgtgacgagcaatgatgaagttcttttcaatgtaacagttacaatgaaaaaatgtgatgtcacaggaggaaaaaactatgcaataatcaaacctattggttttaatgaaaccgctaaaattcatatacacagaaactgcagctgtcagtgtgaggacaacagaggacctaaaggaaagtgtgtagatgaaacttttctagattccaagtgtttccagtgtgatgagaataaatgtcattttgatgaagatcagttttcttctgagagttgcaagtcacacaaggatcagcctgtttgcagtggtcgaggagtttgtgtttgtgggaaatgttcatgtcacaaaattaagcttggaaaagtgtatggaaaatactgtgaaaaggatgacttttcttgtccatatcaccatggaaatctgtgtgctgggcatggagagtgtgaagcaggcagatgccaatgcttcagtggctgggaaggtgatcgatgccagtgcccttcagcagcagcccagcactgtgtcaattcaaagggccaagtgtgcagtggaagaggcacgtgtgtgtgtggaaggtgtgagtgcaccgatcccaggagcatcggccgcttctgtgaacactgccccacctgttatacagcctgcaaggaaaactggaattgtatgcaatgccttcaccctcacaatttgtctcaggctatacttgatcagtgcaaaacctcatgtgctctcatggaacaacagcattatgtcgaccaaacttcagaatgtttctccagcccaagctacttgagaatatttttcatcattttcatagttacattcttgattgggttgcttaaagtcctgatcattagacaggtgatactacaatggaatagtaataaaattaagtcctcatcagattacagagtgtcagcctcaaaaaaggataagttgattctgcaaagtgtttgcacaagagcagtcacctaccgacgtgagaagcctgaagaaataaaaatggatatcagcaaattaaatgctcatgaaactttcaggtgcaacttctaaaaaaagatttttaaacacttaatgggaaactggaattgttaataattgctcctaaagattataattttaaaagtcacaggaggagacaaattgctcacggtcatgccagttgctggttgtacactcgaacgaagactgacaagtatcctcatcatgatgtgactcacatagctgctgactttttcagagaaaaatgtgtcttactactgtttgagactagtgtcgttgtagcactttactgtaatatataacttatttagatcagcatagaatgtagatcctctgaagagcactgattacactttacaggtacctgttatccctacgcttcccagagagaacaatgctgtgagagagtttagcattgtgtcactacaagggtacagtaatccctgcactggacatgtgaggaaaaaaataatctggcaagtatattctaaggttgccaaacacttcaacagttggtggttgaatagacaagaacagctagatgaataaatgattcgtgtttcactctttcaagaggtgaacagatacaaccttaatcttaaaagattattgctttttaaagtgtgtagttttatgcatgtgtgtttatggtttgcttatttttgcaagatggatactaattccagcattctctcctctttgcctttatgttttgttttcttttttacaggataagtttatgtatgtcacagatgactggattaattaagtgctaagttactactgccataaaaaactaataatacaatgtcactttatcagaatactagttttaaaagctgaatgttaataggggacactgtaaagtatcatcaaaacctgaatagcttcattgtgcacaagtgtggagttttgtatcctcttacctggtaaactgaagggattgtttggccatttcatttatcttatcattaattcacaagatagttagaaattctgcctcaagcaaagtaccacattttgaatgttttcttagattttgattgcaagtagatatcagcattttttaaatgaaaagctatattatcttctcccttcaaggcagcctaaggatgttctttcccagaatcactccaacccttcttgccagaattcataaaagtacaaaattggagaatagatgatatcttagaaataagctttttttttttttttttttttttttgagacggagtttcactcttgtcacccaggctgaagtgcaatggcgcaattagggttcactgcaacctctgcctcccgggttcaagcagttctcctgcctcagcctcctgagtagctgggattacaggcatccaccaccgtgcccagctaatttttgtatttttagtagagacggggttttgccatgttggacaggttgatctcaaactcctgacctcaggtgatctaccctcctcggcctcccagagtgttgggattacaggcatgagccaccatgccaggctgctaattctcctttttagtgagttagggaactgagcctcagaaaacttaaacgatttctcagaaaacactcaagtgataaagtggccacattggaaaggagtttttatcttctcattgtcaggccagtgttcattgcacaatatcatgctacctcttgaatctttaaaatattcaattggcaaatgtttttcaatgtgatttactcatgtcttaagtgtatgaggaaagttcaaagcaaaatagaaaggaataattcaaactgaattgtccataatcagcttccagtctttcatgctaatcagcttcttaagagactgaagtatggcatacctacaggggaattccttcgcaccatagcctgtatgaacagtgttccctggagttctccagtgctcagcttgagaccttgatacacgggccatgagccctgtcttccccaatggaaatttatttacacttaccttatccctatggacttagtctgattttattggctaggagtctaacagtcctgtgtggatatacagttttgcccatgacaacaaaggaatctatccgaaatatctttttttttataataaacttccaagatttgctgtcttccagcacttgagttaaagtactagatactgcattttgatgaagactaaccccatctcatattctaccctaaagagaactgaaaaacctataataagttgttctggagccaataaacacagcagctctgttagatgtcctctacagccaagcaatttcaatgctaacttgaactgcatttccttcctcaaatgagagattgacataattcagtactgtgagtcacttgtataagaaacctttgatcactaaaaataatgtaaaaattgggtttagtagcctaatacacataacgttcttcttaaaaaggaaaatggatggatgcctgacaaccctccaaaagaaaaaagtgtaagatagccattaagatgatgacaatttttgaaatgaacattatgatatttatgaacaataaacaaatttccgtatggaatgaattatccaaaaagagtataacaaaatgaaatccttaaaaatccagagtttatattttttttataccctcacttgtttgcactaactttatagtggaccaaggctgttaccataggaagggacaaacttccttgtaggcaactcagtgttagacgatgattgtggttatgcttgcaaagtcttgtgcttatcttttttgtttttacttaaaaagctaatttttaaagattgtagggcttgtattttacttgaataattgatatcttcctgtgtaatgatttgtgagatgagaattaatatttgactagttagaattaattaaatggtaagggaacacagggtactcttaggttaaataatgtatgcaaatagagtctattttcaactaatatggccacaggagccttttgagattcattgatattaaacacaattaatgaaattttaaattgttaacagaattgagaacttgaacaacacttttagtactgcagcatttttgtgccctaaagtatgtaatgatttataaatgtgccatacatacactacaacataacatttgctttgttatgcattttatttctctggggacaccattgcactgcagtgcacacgtatttataaacatttgttatatttttggaaacttgctaatatttattaagtcatagacttttctggaggacttaatattaaaataaaaaaaaaatctaagattaaacacagtagatatctctggaggcaattttccaaaactcaacattaaaatttgtggatgcatgagatgcaatccttcaaagaatgaatctgaaatatatttttaatatttacttaatatccactgaagatatctttatgcaagacaagagtcagccatcagacactgaaatatattatgatagattatgaagaattttctctgtagaattatattcttcctggaacctggtagagtagattagactcaaaggctttttcttccttttcttactcctgttttttccactcactcttcccaagagatttcctaaagcttcaagcttaataagcctaatagtgaaaaataactgaatttaatggtataatgaagttcttcatttccagacatctttaattgatcttaaagctcatttgagtctttgcccctgaacaaagacagacccattaaaatctaagaattctaaattttcacaactgtttgagcttcttttcattttgaaggatttggaatatatatgttttcataaaagtatcaagtgaaatatagttacatgggagctcaatcatgtgcagattgcattctgttatgttgactcaatatttaatttacaactatccttatttatattgacctcaagaactccattttatgcaatgcagaccactgagatatagctaacattctttcaaataattttccttttcttttataattcctctatagcaaatttttatgtataactgattatacatatccatatttatatttcattgattccaagacatcactttttcaatttaacatctctgaaattgtgacatttcttgcaactgttggcacttcagatgcagtgtttaaaattatgcttgaataaatattacactaatccaactttacctaaacgtttatgcatctaggcaaattttgttttcttataaagatttgagagcccatttatgacaaaatatgaaggcgaaatttaaggacaattgagtcacgcacaactcaacatggagcctaactgattatcagctcagatcccgcatatcttgagtttacaaaagctctttcaggtccccatttatactttacgtgagtgcgaatgatttcagcaaaccctaacttaactaacaagaatgggtaggtatgtctacgtttcattaacaaatttttattatttttattctattatatgagatccttttatattatcatctcacttttaaacaaaattaactggaaaaatattacatggaactgtcatagttaggttttgcagcatcttacatgtcttgtatcaatggcaggagaaaaatatgataaaaacaatcagtgctgtgaaaaacaactttcttctagagtcctcttactttttattcttctttatcatttgtgggtttttcccccttggctctgatcactttaacttcaagcttatgtaacgactgttataaaactgcatatttaaattatttgaattatatgaaataattgttcagctatctgggcagctgttaatgtaaacctgagagtaataacactactcttttatctacctggaatacttttctgcataaaatttatctttgtaagctaactctattaatcaggtttcttctagcctctgcaacctacttcagttagaattgtctaatactgctctattaatcaggtttctagcctctacaacctacttcagttaaaattgtctaatacagcaatatttaaaaaaaaacactgcaattgtcaaggatggaaaatgtgtgatttgtgtaaacaatttttaccaactttacattttcctacagataaatgtgaaattttgataagaagtctacgcaatgacaagtatggtacataaattttattaagaatattgagtataaagtactttaattctaaattataagaaaatatacatttgcacttattaatatagaaattcattttgtgtatatttaacatagcttttaaactattttacattagctacttcattatggtttcttgaacttctgaaaaaaattagaaatgtattaaacttatcagtaacataaaaacttattttgtttcacctaacgaatactgcgtttgtaaaaataaatttaatatagaatatatttttaaattaaatatttgaatataaaatagctctaagaaagaagcaaattatcactgaacatatttcttattatttctggctttgaattatacgtaacttaaattgtcttaaatgatacagaatattggagaatatgatactttcacataatatactatgaacctgttcatataactctgattgactactaacttctgttttatgtatttattaaagagctgacactgtagtttgtggtgagatgtttatttttctaacagagcttataacagttaggacaaggcatttaattaatgcatcattctgtttagtagtaggtgttaatcaatatgaaattctctgttttaaaataaaaatgtaaaaatctaagaa

SEQ ID NO: 406542 - DNA, 8989 bp, Homo sapiens
  misc_feature (1)..(1): n is a, c, g, or t
  misc_feature (4)..(5): n is a, c, g, or t
  misc_feature (7)..(7): n is a, c, g, or t
  misc_feature (9)..(9): n is a, c, g, or t
ngcnngngnggcgggtgcttctagggcgctcccagagccgcctccccctgttgctggcatcccgagcttcctcccttgccagccaggacgctgccgacttgtctttgcccgctgctccgcagacggggctgcaaagctgcaactaatggtgttggcctccctgcccacctgtggaagcaactgcgctgattgatgcgccacagacttttttcccctcgacctcgccggcgtcccctcccacagatccagcatcacccagtgaatgtacattagggtggtttcccccccagcttcgggctttgtttgggtttgattgtgtttggctcttcgctaagctgatttatgcagcagaagccccaccggctggagagaaacaaaagctcttttctttgtcccggagcaggctgcggagcccttgcagagccctctctccagtcgccgccggggcccttggccgtcgaaggaggtgcttctcgcggagaccgcgggacccgccgtgccgagccgggagggccgtaggggccctgagatgccgagcggtgcccgggcccgcttacctgcaccgcttgctccgagccgcggggtccgcctgctaggcctgcggaaaacgtcctagcgacactcggcccgcgggccccgaggtgcgcccgggaggcgcgagcccgcgtccggaaggcagccaggcggcgggcgcggggcgggctgttttgcattatgtgcggctcggccctggctttttttaccgctgcatttgtctgcctgcaaaacgaccggcgaggtcccgcctcgttcctctgggcagcctgggtgttttcacttgttcttggactgggccaaggtgaagacaatagatgtgcatcttcaaatgcagcatcctgtgccaggtgccttgcgctgggtccagaatgtggatggtgtgttcaagaggatttcatttcaggtggatcaagaagtgaacgttgtgatattgtttccaatttaataagcaaaggctgctcagttgattcaatagaatacccatctgtgcatgttataatacccactgaaaatgaaattaatacccaggtgacaccaggagaagtgtctatccagctgcgtccaggagccgaagctaattttatgctgaaagttcatcctctgaagaaatatcctgtggatctttattatcttgttgatgtctcagcatcaatgcacaataatatagaaaaattaaattccgttggaaacgatttatctagaaaaatggcatttttctcccgtgactttcgtcttggatttggctcatacgttgataaaacagtttcaccatacattagcatccaccccgaaaggattcataatcaatgcagtgactacaatttagactgcatgcctccccatggatacatccatgtgctgtctttgacagagaacatcactgagtttgagaaagcagttcatagacagaagatctctggaaacatagatacaccagaaggaggttttgacgccatgcttcaggcagctgtctgtgaaagtcatatcggatggcgaaaagaggctaaaagattgctgctggtgatgacagatcagacgtctcatctcgctcttgatagcaaattggcaggcatagtggtgcccaatgacggaaactgtcatctgaaaaacaacgtctatgtcaaatcgacaaccatggaacacccctcactaggccaactttcagagaaattaatagacaacaacattaatgtcatctttgcagttcaaggaaaacaatttcattggtataaggatcttctacccctcttgccaggcaccattgctggtgaaatagaatcaaaggctgcaaacctcaataatttggtagtggaagcctatcagaagctcatttcagaagtgaaagttcaggtggaaaaccaggtacaaggcatctattttaacattaccgccatctgtccagatgggtccagaaagccaggcatggaaggatgcagaaacgtgacgagcaatgatgaagttcttttcaatgtaacagttacaatgaaaaaatgtgatgtcacaggaggaaaaaactatgcaataatcaaacctattggttttaatgaaaccgctaaaattcatatacacagaaactgcagctgtcagtgtgaggacaacagaggacctaaaggaaagtgtgtagatgaaacttttctagattccaagtgtttccagtgtgatgagaataaatgtcattttgatgaagatcagttttcttctgagagttgcaagtcacacaaggatcagcctgtttgcagtggtcgaggagtttgtgtttgtgggaaatgttcatgtcacaaaattaagcttggaaaagtgtatggaaaatactgtgaaaaggatgacttttcttgtccatatcaccatggaaatctgtgtgctgggcatggagagtgtgaagcaggcagatgccaatgcttcagtggctgggaaggtgatcgatgccagtgcccttcagcagcagcccagcactgtgtcaattcaaagggccaagtgtgcagtggaagaggcacgtgtgtgtgtggaaggtgtgagtgcaccgatcccaggagcatcggccgcttctgtgaacactgccccacctgttatacagcctgcaaggaaaactggaattgtatgcaatgccttcaccctcacaatttgtctcaggctatacttgatcagtgcaaaacctcatgtgctctcatggaacaacagcattatgtcgaccaaacttcagaatgtttctccagcccaagctacttgagaatatttttcatcattttcatagttacattcttgattgggttgcttaaagtcctgatcattagacaggtgatactacaatggaatagtaataaaattaagtcctcatcagattacagagtgtcagcctcaaaaaaggataagttgattctgcaaagtgtttgcacaagagcagtcacctaccgacgtgagaagcctgaagaaataaaaatggatatcagcaaattaaatgctcatgaaactttcaggtgcaacttctaaaaaaagatttttaaacacttaatgggaaactggaattgttaataattgctcctaaagattataattttaaaagtcacaggaggagacaaattgctcacggtcatgccagttgctggttgtacactcgaacgaagactgacaagtatcctcatcatgatgtgactcacatagctgctgactttttcagagaaaaatgtgtcttactactgtttgagactagtgtcgttgtagcactttactgtaatatataacttatttagatcagcatagaatgtagatcctctgaagagcactgattacactttacaggtacctgttatccctacgcttcccagagagaacaatgctgtgagagagtttagcattgtgtcactacaagggtacagtaatccctgcactggacatgtgaggaaaaaaataatctggcaagtatattctaaggttgccaaacacttcaacagttggtggttgaatagacaagaacagctagatgaataaatgattcgtgtttcactctttcaagaggtgaacagatacaaccttaatcttaaaagattattgctttttaaagtgtgtagttttatgcatgtgtgtttatggtttgcttatttttgcaagatggatactaattccagcattctctcctctttgcctttatgttttgttttcttttttacaggataagtttatgtatgtcacagatgactggattaattaagtgctaagttactactgccataaaaaactaataatacaatgtcactttatcagaatactagttttaaaagctgaatgttaataggggacactgtaaagtatcatcaaaacctgaatagcttcattgtgcacaagtgtggagttttgtatcctcttacctggtaaactgaagggattgtttggccatttcatttatcttatcattaattcacaagatagttagaaattctgcctcaagcaaagtaccacattttgaatgttttcttagattttgattgcaagtagatatcagcattttttaaatgaaaagctatattatcttctcccttcaaggcagcctaaggatgttctttcccagaatcactccaacccttcttgccagaattcataaaagtacaaaattggagaatagatgatatcttagaaataagctttttttttttttttttttttttttgagacggagtttcactcttgtcacccaggctgaagtgcaatggcgcaattagggttcactgcaacctctgcctcccgggttcaagcagttctcctgcctcagcctcctgagtagctgggattacaggcatccaccaccgtgcccagctaatttttgtatttttagtagagacggggttttgccatgttggacaggttgatctcaaactcctgacctcaggtgatctaccctcctcggcctcccagagtgttgggattacaggcatgagccaccatgccaggctgctaattctcctttttagtgagttagggaactgagcctcagaaaacttaaacgatttctcagaaaacactcaagtgataaagtggccacattggaaaggagtttttatcttctcattgtcaggccagtgttcattgcacaatatcatgctacctcttgaatctttaaaatattcaattggcaaatgtttttcaatgtgatttactcatgtcttaagtgtatgaggaaagttcaaagcaaaatagaaaggaataattcaaactgaattgtccataatcagcttccagtctttcatgctaatcagcttcttaagagactgaagtatggcatacctacaggggaattccttcgcaccatagcctgtatgaacagtgttccctggagttctccagtgctcagcttgagaccttgatacacgggccatgagccctgtcttccccaatggaaatttatttacacttaccttatccctatggacttagtctgattttattggctaggagtctaacagtcctgtgtggatatacagttttgcccatgacaacaaaggaatctatccgaaatatctttttttttataataaacttccaagatttgctgtcttccagcacttgagttaaagtactagatactgcattttgatgaagactaaccccatctcatattctaccctaaagagaactgaaaaacctataataagttgttctggagccaataaacacagcagctctgttagatgtcctctacagccaagcaatttcaatgctaacttgaactgcatttccttcctcaaatgagagattgacataattcagtactgtgagtcacttgtataagaaacctttgatcactaaaaataatgtaaaaattgggtttagtagcctaatacacataacgttcttcttaaaaaggaaaatggatggatgcctgacaaccctccaaaagaaaaaagtgtaagatagccattaagatgatgacaatttttgaaatgaacattatgatatttatgaacaataaacaaatttccgtatggaatgaattatccaaaaagagtataacaaaatgaaatccttaaaaatccagagtttatattttttttataccctcacttgtttgcactaactttatagtggaccaaggctgttaccataggaagggacaaacttccttgtaggcaactcagtgttagacgatgattgtggttatgcttgcaaagtcttgtgcttatcttttttgtttttacttaaaaagctaatttttaaagattgtagggcttgtattttacttgaataattgatatcttcctgtgtaatgatttgtgagatgagaattaatatttgactagttagaattaattaaatggtaagggaacacagggtactcttaggttaaataatgtatgcaaatagagtctattttcaactaatatggccacaggagccttttgagattcattgatattaaacacaattaatgaaattttaaattgttaacagaattgagaacttgaacaacacttttagtactgcagcatttttgtgccctaaagtatgtaatgatttataaatgtgccatacatacactacaacataacatttgctttgttatgcattttatttctctggggacaccattgcactgcagtgcacacgtatttataaacatttgttatatttttggaaacttgctaatatttattaagtcatagacttttctggaggacttaaaaattcactaaaaatctgattatgtcttaaatgttcagtttatctttggtttattaaaataaaaaaaaaatctaagattaaacacagtagatatctctggaggcaattttccaaaactcaacattaaaatttgtggatgcatgagatgcaatccttcaaagaatgaatctgaaatatatttttaatatttacttaatatccactgaagatatctttatgcaagacaagagtcagccatcagacactgaaatatattatgatagattatgaagaattttctctgtagaattatattcttcctggaacctggtagagtagattagactcaaaggctttttcttccttttcttactcctgttttttccactcactcttcccaagagatttcctaaagcttcaagcttaataagcctaatagtgaaaaataactgaatttaatggtataatgaagttcttcatttccagacatctttaattgatcttaaagctcatttgagtctttgcccctgaacaaagacagacccattaaaatctaagaattctaaattttcacaactgtttgagcttcttttcattttgaaggatttggaatatatatgttttcataaaagtatcaagtgaaatatagttacatgggagctcaatcatgtgcagattgcattctgttatgttgactcaatatttaatttacaactatccttatttatattgacctcaagaactccattttatgcaatgcagaccactgagatatagctaacattctttcaaataattttccttttcttttataattcctctatagcaaatttttatgtataactgattatacatatccatatttatatttcattgattccaagacatcactttttcaatttaacatctctgaaattgtgacatttcttgcaactgttggcacttcagatgcagtgtttaaaattatgcttgaataaatattacactaatccaactttacctaaacgtttatgcatctaggcaaattttgttttcttataaagatttgagagcccatttatgacaaaatatgaaggcgaaatttaaggacaattgagtcacgcacaactcaacatggagcctaactgattatcagctcagatcccgcatatcttgagtttacaaaagctctttcaggtccccatttatactttacgtgagtgcgaatgatttcagcaaaccctaacttaactaacaagaatgggtaggtatgtctacgtttcattaacaaatttttattatttttattctattatatgagatccttttatattatcatctcacttttaaacaaaattaactggaaaaatattacatggaactgtcatagttaggttttgcagcatcttacatgtcttgtatcaatggcaggagaaaaatatgataaaaacaatcagtgctgtgaaaaacaactttcttctagagtcctcttactttttattcttctttatcatttgtgggtttttcccccttggctctgatcactttaacttcaagcttatgtaacgactgttataaaactgcatatttaaattatttgaattatatgaaataattgttcagctatctgggcagctgttaatgtaaacctgagagtaataacactactcttttatctacctggaatacttttctgcataaaatttatctttgtaagctaactctattaatcaggtttcttctagcctctgcaacctacttcagttagaattgtctaatactgctctattaatcaggtttctagcctctacaacctacttcagttaaaattgtctaatacagcaatatttaaaaaaaaacactgcaattgtcaaggatggaaaatgtgtgatttgtgtaaacaatttttaccaactttacattttcctacagataaatgtgaaattttgataagaagtctacgcaatgacaagtatggtacataaattttattaagaatattgagtataaagtactttaattctaaattataagaaaatatacatttgcacttattaatatagaaattcattttgtgtatatttaacatagcttttaaactattttacattagctacttcattatggtttcttgaacttctgaaaaaaattagaaatgtattaaacttatcagtaacataaaaacttattttgtttcacctaacgaatactgcgtttgtaaaaataaatttaatatagaatatatttttaaattaaatatttgaatataaaatagctctaagaaagaagcaaattatcactgaacatatttcttattatttctggctttgaattatacgtaacttaaattgtcttaaatgatacagaatattggagaatatgatactttcacataatatactatgaacctgttcatataactctgattgactactaacttctgttttatgtatttattaaagagctgacactgtagtttgtggtgagatgtttatttttctaacagagcttataacagttaggacaaggcatttaattaatgcatcattctgtttagtagtaggtgttaatcaatatgaaattctctgttttaaaataaaaatgtaaaaatctaagaaaaaaaaaaactcgtgccgctcgtgccgaattcggcacgagggaaaacattctgcttttaggtagtttcaaaattcaggggagggagcctgaaatttttgccatgattggtttgttagaaagagcaggcatcagactacttctgataaaattgtttggaaggtcacgacctcgcagatcctccgcatattatctcaacagaggacag

SEQ ID NO: 406543 - DNA, 8217 bp, Homo sapiens
  misc_feature (1)..(1): n is a, c, g, or t
  misc_feature (4)..(5): n is a, c, g, or t
  misc_feature (7)..(7): n is a, c, g, or t
  misc_feature (9)..(9): n is a, c, g, or t
ngcnngngnggcgggtgcttctagggcgctcccagagccgcctccccctgttgctggcatcccgagcttcctcccttgccagccaggacgctgccgacttgtctttgcccgctgctccgcagacggggctgcaaagctgcaactaatggtgttggcctccctgcccacctgtggaagcaactgcgctgattgatgcgccacagacttttttcccctcgacctcgccggcgtcccctcccacagatccagcatcacccagtgaatgtacattagggtggtttcccccccagcttcgggctttgtttgggtttgattgtgtttggctcttcgctaagctgatttatgcagcagaagccccaccggctggagagaaacaaaagctcttttctttgtcccggagcaggctgcggagcccttgcagagccctctctccagtcgccgccggggcccttggccgtcgaaggaggtgcttctcgcggagaccgcgggacccgccgtgccgagccgggagggccgtaggggccctgagatgccgagcggtgcccgggcccgcttacctgcaccgcttgctccgagccgcggggtccgcctgctaggcctgcggaaaacgtcctagcgacactcggcccgcgggccccgaggtgcgcccgggaggcgcgagcccgcgtccggaaggcagccaggcggcgggcgcggggcgggctgttttgcattatgtgcggctcggccctggctttttttaccgctgcatttgtctgcctgcaaaacgaccggcgaggtcccgcctcgttcctctgggcagcctgggtgttttcacttgttcttggactgggccaaggtgaagacaatagatgtgcatcttcaaatgcagcatcctgtgccaggtgccttgcgctgggtccagaatgtggatggtgtgttcaagaggatttcatttcaggtggatcaagaagtgaacgttgtgatattgtttccaatttaataagcaaaggctgctcagttgattcaatagaatacccatctgtgcatgttataatacccactgaaaatgaaattaatacccaggtgacaccaggagaagtgtctatccagctgcgtccaggagccgaagctaattttatgctgaaagttcatcctctgaagaaatatcctgtggatctttattatcttgttgatgtctcagcatcaatgcacaataatatagaaaaattaaattccgttggaaacgatttatctagaaaaatggcatttttctcccgtgactttcgtcttggatttggctcatacgttgataaaacagtttcaccatacattagcatccaccccgaaaggattcataatcaatgcagtgactacaatttagactgcatgcctccccatggatacatccatgtgctgtctttgacagagaacatcactgagtttgagaaagcagttcatagacagaagatctctggaaacatagatacaccagaaggaggttttgacgccatgcttcaggcagctgtctgtgaaagtcatatcggatggcgaaaagaggctaaaagattgctgctggtgatgacagatcagacgtctcatctcgctcttgatagcaaattggcaggcatagtggtgcccaatgacggaaactgtcatctgaaaaacaacgtctatgtcaaatcgacaaccatggaacacccctcactaggccaactttcagagaaattaatagacaacaacattaatgtcatctttgcagttcaaggaaaacaatttcattggtataaggatcttctacccctcttgccaggcaccattgctggtgaaatagaatcaaaggctgcaaacctcaataatttggtagtggaagcctatcagaagctcatttcagaagtgaaagttcaggtggaaaaccaggtacaaggcatctattttaacattaccgccatctgtccagatgggtccagaaagccaggcatggaaggatgcagaaacgtgacgagcaatgatgaagttcttttcaatgtaacagttacaatgaaaaaatgtgatgtcacaggaggaaaaaactatgcaataatcaaacctattggttttaatgaaaccgctaaaattcatatacacagaaactgcagctgtcagtgtgaggacaacagaggacctaaaggaaagtgtgtagatgaaacttttctagattccaagtgtttccagtgtgatgagaataaatgtcattttgatgaagatcagttttcttctgagagttgcaagtcacacaaggatcagcctgtttgcagtggtcgaggagtttgtgtttgtgggaaatgttcatgtcacaaaattaagcttggaaaagtgtatggaaaatactgtgaaaaggatgacttttcttgtccatatcaccatggaaatctgtgtgctgggcatggagagtgtgaagcaggcagatgccaatgcttcagtggctgggaaggtgatcgatgccagtgcccttcagcagcagcccagcactgtgtcaattcaaagggccaagtgtgcagtggaagaggcacgtgtgtgtgtggaaggtgtgagtgcaccgatcccaggagcatcggccgcttctgtgaacactgccccacctgttatacagcctgcaaggaaaactggaattgtatgcaatgccttcaccctcacaatttgtctcaggctatacttgatcagtgcaaaacctcatgtgctctcatggaacaacagcattatgtcgaccaaacttcagaatgtttctccagcccaagctacttgagaatatttttcatcattttcatagttacattcttgattgggttgcttaaagtcctgatcattagacaggtgatactacaatggaatagtaataaaattaagtcctcatcagattacagagtgtcagcctcaaaaaaggataagttgattctgcaaagtgtttgcacaagagcagtcacctaccgacgtgagaagcctgaagaaataaaaatggatatcagcaaattaaatgctcatgaaactttcaggtgcaacttctaaaaaaagatttttaaacacttaatgggaaactggaattgttaataattgctcctaaagattataattttaaaagtcacaggaggagacaaattgctcacggtcatgccagttgctggttgtacactcgaacgaagactgacaagtatcctcatcatgatgtgactcacatagctgctgactttttcagagaaaaatgtgtcttactactgtttgagactagtgtcgttgtagcactttactgtaatatataacttatttagatcagcatagaatgtagatcctctgaagagcactgattacactttacaggtacctgttatccctacgcttcccagagagaacaatgctgtgagagagtttagcattgtgtcactacaagggtacagtaatccctgcactggacatgtgaggaaaaaaataatctggcaagtatattctaaggttgccaaacacttcaacagttggtggttgaatagacaagaacagctagatgaataaatgattcgtgtttcactctttcaagaggtgaacagatacaaccttaatcttaaaagattattgctttttaaagtgtgtagttttatgcatgtgtgtttatggtttgcttatttttgcaagatggatactaattccagcattctctcctctttgcctttatgttttgttttcttttttacaggataagtttatgtatgtcacagatgactggattaattaagtgctaagttactactgccataaaaaactaataatacaatgtcactttatcagaatactagttttaaaagctgaatgttaataggggacactgtaaagtatcatcaaaacctgaatagcttcattgtgcacaagtgtggagttttgtatcctcttacctggtaaactgaagggattgtttggccatttcatttatcttatcattaattcacaagatagttagaaattctgcctcaagcaaagtaccacattttgaatgttttcttagattttgattgcaagtagatatcagcattttttaaatgaaaagctatattatcttctcccttcaaggcagcctaaggatgttctttcccagaatcactccaacccttcttgccagaattcataaaagtacaaaattggagaatagatgatatcttagaaataagctttttttttttttttttttttttttgagacggagtttcactcttgtcacccaggctgaagtgcaatggcgcaattagggttcactgcaacctctgcctcccgggttcaagcagttctcctgcctcagcctcctgagtagctgggattacaggcatccaccaccgtgcccagctaatttttgtatttttagtagagacggggttttgccatgttggacaggttgatctcaaactcctgacctcaggtgatctaccctcctcggcctcccagagtgttgggattacaggcatgagccaccatgccaggctgctaattctcctttttagtgagttagggaactgagcctcagaaaacttaaacgatttctcagaaaacactcaagtgataaagtggccacattggaaaggagtttttatcttctcattgtcaggccagtgttcattgcacaatatcatgctacctcttgaatctttaaaatattcaattggcaaatgtttttcaatgtgatttactcatgtcttaagtgtatgaggaaagttcaaagcaaaatagaaaggaataattcaaactgaattgtccataatcagcttccagtctttcatgctaatcagcttcttaagagactgaagtatggcatacctacaggggaattccttcgcaccatagcctgtatgaacagtgttccctggagttctccagtgctcagcttgagaccttgatacacgggccatgagccctgtcttccccaatggaaatttatttacacttaccttatccctatggacttagtctgattttattggctaggagtctaacagtcctgtgtggatatacagttttgcccatgacaacaaaggaatctatccgaaatatctttttttttataataaacttccaagatttgctgtcttccagcacttgagttaaagtactagatactgcattttgatgaagactaaccccatctcatattctaccctaaagagaactgaaaaacctataataagttgttctggagccaataaacacagcagctctgttagatgtcctctacagccaagcaatttcaatgctaacttgaactgcatttccttcctcaaatgagagattgacataattcagtactgtgagtcacttgtataagaaacctttgatcactaaaaataatgtaaaaattgggtttagtagcctaatacacataacgttcttcttaaaaaggaaaatggatggatgcctgacaaccctccaaaagaaaaaagtgtaagatagccattaagatgatgacaatttttgaaatgaacattatgatatttatgaacaataaacaaatttccgtatggaatgaattatccaaaaagagtataacaaaatgaaatccttaaaaatccagagtttatattttttttataccctcacttgtttgcactaactttatagtggaccaaggctgttaccataggaagggacaaacttccttgtaggcaactcagtgttagacgatgattgtggttatgcttgcaaagtcttgtgcttatcttttttgtttttacttaaaaagctaatttttaaagattgtagggcttgtattttacttgaataattgatatcttcctgtgtaatgatttgtgagatgagaattaatatttgactagttagaattaattaaatggtaagggaacacagggtactcttaggttaaataatgtatgcaaatagagtctattttcaactaatatggccacaggagccttttgagattcattgatattaaacacaattaatgaaattttaaattgttaacagaattgagaacttgaacaacacttttagtactgcagcatttttgtgccctaaagtatgtaatgatttataaatgtgccatacatacactacaacataacatttgctttgttatgcattttatttctctggggacaccattgcactgcagtgcacacgtatttataaacatttgttatatttttggaaacttgctaatatttattaagtcatagacttttctggaggacttaaaaattcactaaaaatctgattatgtcttaaatgttcagtttatctttggtttattaaaataaaaaaaaaatctaagattaaacacagtagatatctctggaggcaattttccaaaactcaacattaaaatttgtggatgcatgagatgcaatccttcaaagaatgaatctgaaatatatttttaatatttacttaatatccactgaagatatctttatgcaagacaagagtcagccatcagacactgaaatatattatgatagattatgaagaattttctctgtagaattatattcttcctggaacctggtagagtagattagactcaaaggctttttcttccttttcttactcctgttttttccactcactcttcccaagagatttcctaaagcttcaagcttaataagcctaatagtgaaaaataactgaatttaatggtataatgaagttcttcatttccagacatctttaattgatcttaaagctcatttgagtctttgcccctgaacaaagacagacccattaaaatctaagaattctaaattttcacaactgtttgagcttcttttcattttgaaggatttggaatatatatgttttcataaaagtatcaagtgaaatatagttacatgggagctcaatcatgtgcagattgcattctgttatgttgactcaatatttaatttacaactatccttatttatattgacctcaagaactccattttatgcaatgcagaccactgagatatagctaacattctttcaaataattttccttttcttttataattcctctatagcaaatttttatgtataactgattatacatatccatatttatatttcattgattccaagacatcactttttcaatttaacatctctgaaattgtgacatttcttgcaactgttggcacttcagatgcagtgtttaaaattatgcttgaataaatattacactaatccaactttacctaaacgtttatgcatctaggcaaattttgttttcttataaagatttgagagcccatttatgacaaaatatgaaggcgaaatttaaggacaattgagtcacgcacaactcaacatggagcctaactgattatcagctcagatcccgcatatcttgagtttacaaaagctctttcaggtccccatttatactttacgtgagtgcgaatgatttcagcaaaccctaacttaactaacaagaatgggtaggtatgtctacgtttcattaacaaatttttattatttttattctattatatgagatccttttatattatcatctcacttttaaacaaaattaactggaaaaatattacatggaactgtcatagttaggttttgcagcatcttacatgtcttgtatcaatggcaggagaaaaatatgataaaaacaatcagtgctgtgaaaaacaactttcttctagagtcctcttactttttattcttctttatcatttgtgggtttttcccccttggctctgatcactttaacttcaagcttatgtaacgactgttataaaactgcatatttaaattatttgaattatatgaaataattgttcagctatctgggcagctgttaatgtaaacctgagagtaataacactactcttttatctacctggaatacttttctgcataaaatttatctttgtaagctaactctattaatcaggtttcttctagcctctgcaacctacttcagttagaattgtctaatactgctctattaatcaggtttctagcctctacaacctacttcagttaaaattgtctaatacagcaatattcttaataaaatttatgtaccatacttgtcattgcgtagacttcttatcaaaatttcacatttatctgtaggaaaatgtaaagttggtaaaaattgtttacacaaatcacacattttccatccttgacaattgcagtgttttttttttaaaaattgctgtattagacaattttaactcaagtaggttgtagaggggagagggta

SEQ ID NO: 406544 - DNA, 7548 bp, Homo sapiens
ggattacaggcatgagccaccgtgcctggcctctcctactttttaatctatattgttcttcctccagtggaacactagaaatctctagccaggaactagtgtggtcacatggctgtgggaaaatagaggatgtacaaataaaagttaaagctatttacgcagcagcgttgtacccacgcacatcgttctagcctgacttactgttcgtcaactcaaacgtaatgtttacttgaggtaaaaaccacagtacacatctgtgttattgtacaaagtctaattacatgtttatttttaaggaaaagaggctaaaagattgctgctggtgatgacagatcagacgtctcatctcgctcttgatagcaaattggcaggcatagtggtgcccaatgacggaaactgtcatctgaaaaacaacgtctatgtcaaatcgacaaccatggaacacccctcactaggccaactttcagagaaattaatagacaacaacattaatgtcatctttgcagttcaaggaaaacaatttcattggtataaggatcttctacccctcttgccaggcaccattgctggtgaaatagaatcaaaggctgcaaacctcaataatttggtagtggaagcctatcagaagctcatttcagaagtgaaagttcaggtggaaaaccaggtacaaggcatctattttaacattaccgccatctgtccagatgggtccagaaagccaggcatggaaggatgcagaaacgtgacgagcaatgatgaagttcttttcaatgtaacagttacaatgaaaaaatgtgatgtcacaggaggaaaaaactatgcaataatcaaacctattggttttaatgaaaccgctaaaattcatatacacagaaactgcagctgtcagtgtgaggacaacagaggacctaaaggaaagtgtgtagatgaaacttttctagattccaagtgtttccagtgtgatgagaataaatgtcattttgatgaagatcagttttcttctgagagttgcaagtcacacaaggatcagcctgtttgcagtggtcgaggagtttgtgtttgtgggaaatgttcatgtcacaaaattaagcttggaaaagtgtatggaaaatactgtgaaaaggatgacttttcttgtccatatcaccatggaaatctgtgtgctgggcatggagagtgtgaagcaggcagatgccaatgcttcagtggctgggaaggtgatcgatgccagtgcccttcagcagcagcccagcactgtgtcaattcaaagggccaagtgtgcagtggaagaggcacgtgtgtgtgtggaaggtgtgagtgcaccgatcccaggagcatcggccgcttctgtgaacactgccccacctgttatacagcctgcaaggaaaactggaattgtatgcaatgccttcaccctcacaatttgtctcaggctatacttgatcagtgcaaaacctcatgtgctctcatggaacaacagcattatgtcgaccaaacttcagaatgtttctccagcccaagctacttgagaatatttttcatcattttcatagttacattcttgattgggttgcttaaagtcctgatcattagacaggtgatactacaatggaatagtaataaaattaagtcctcatcagattacagagtgtcagcctcaaaaaaggataagttgattctgcaaagtgtttgcacaagagcagtcacctaccgacgtgagaagcctgaagaaataaaaatggatatcagcaaattaaatgctcatgaaactttcaggtgcaacttctaaaaaaagatttttaaacacttaatgggaaactggaattgttaataattgctcctaaagattataattttaaaagtcacaggaggagacaaattgctcacggtcatgccagttgctggttgtacactcgaacgaagactgacaagtatcctcatcatgatgtgactcacatagctgctgactttttcagagaaaaatgtgtcttactactgtttgagactagtgtcgttgtagcactttactgtaatatataacttatttagatcagcatagaatgtagatcctctgaagagcactgattacactttacaggtacctgttatccctacgcttcccagagagaacaatgctgtgagagagtttagcattgtgtcactacaagggtacagtaatccctgcactggacatgtgaggaaaaaaataatctggcaagtatattctaaggttgccaaacacttcaacagttggtggttgaatagacaagaacagctagatgaataaatgattcgtgtttcactctttcaagaggtgaacagatacaaccttaatcttaaaagattattgctttttaaagtgtgtagttttatgcatgtgtgtttatggtttgcttatttttgcaagatggatactaattccagcattctctcctctttgcctttatgttttgttttcttttttacaggataagtttatgtatgtcacagatgactggattaattaagtgctaagttactactgccataaaaaactaataatacaatgtcactttatcagaatactagttttaaaagctgaatgttaataggggacactgtaaagtatcatcaaaacctgaatagcttcattgtgcacaagtgtggagttttgtatcctcttacctggtaaactgaagggattgtttggccatttcatttatcttatcattaattcacaagatagttagaaattctgcctcaagcaaagtaccacattttgaatgttttcttagattttgattgcaagtagatatcagcattttttaaatgaaaagctatattatcttctcccttcaaggcagcctaaggatgttctttcccagaatcactccaacccttcttgccagaattcataaaagtacaaaattggagaatagatgatatcttagaaataagctttttttttttttttttttttttttgagacggagtttcactcttgtcacccaggctgaagtgcaatggcgcaattagggttcactgcaacctctgcctcccgggttcaagcagttctcctgcctcagcctcctgagtagctgggattacaggcatccaccaccgtgcccagctaatttttgtatttttagtagagacggggttttgccatgttggacaggttgatctcaaactcctgacctcaggtgatctaccctcctcggcctcccagagtgttgggattacaggcatgagccaccatgccaggctgctaattctcctttttagtgagttagggaactgagcctcagaaaacttaaacgatttctcagaaaacactcaagtgataaagtggccacattggaaaggagtttttatcttctcattgtcaggccagtgttcattgcacaatatcatgctacctcttgaatctttaaaatattcaattggcaaatgtttttcaatgtgatttactcatgtcttaagtgtatgaggaaagttcaaagcaaaatagaaaggaataattcaaactgaattgtccataatcagcttccagtctttcatgctaatcagcttcttaagagactgaagtatggcatacctacaggggaattccttcgcaccatagcctgtatgaacagtgttccctggagttctccagtgctcagcttgagaccttgatacacgggccatgagccctgtcttccccaatggaaatttatttacacttaccttatccctatggacttagtctgattttattggctaggagtctaacagtcctgtgtggatatacagttttgcccatgacaacaaaggaatctatccgaaatatctttttttttataataaacttccaagatttgctgtcttccagcacttgagttaaagtactagatactgcattttgatgaagactaaccccatctcatattctaccctaaagagaactgaaaaacctataataagttgttctggagccaataaacacagcagctctgttagatgtcctctacagccaagcaatttcaatgctaacttgaactgcatttccttcctcaaatgagagattgacataattcagtactgtgagtcacttgtataagaaacctttgatcactaaaaataatgtaaaaattgggtttagtagcctaatacacataacgttcttcttaaaaaggaaaatggatggatgcctgacaaccctccaaaagaaaaaagtgtaagatagccattaagatgatgacaatttttgaaatgaacattatgatatttatgaacaataaacaaatttccgtatggaatgaattatccaaaaagagtataacaaaatgaaatccttaaaaatccagagtttatattttttttataccctcacttgtttgcactaactttatagtggaccaaggctgttaccataggaagggacaaacttccttgtaggcaactcagtgttagacgatgattgtggttatgcttgcaaagtcttgtgcttatcttttttgtttttacttaaaaagctaatttttaaagattgtagggcttgtattttacttgaataattgatatcttcctgtgtaatgatttgtgagatgagaattaatatttgactagttagaattaattaaatggtaagggaacacagggtactcttaggttaaataatgtatgcaaatagagtctattttcaactaatatggccacaggagccttttgagattcattgatattaaacacaattaatgaaattttaaattgttaacagaattgagaacttgaacaacacttttagtactgcagcatttttgtgccctaaagtatgtaatgatttataaatgtgccatacatacactacaacataacatttgctttgttatgcattttatttctctggggacaccattgcactgcagtgcacacgtatttataaacatttgttatatttttggaaacttgctaatatttattaagtcatagacttttctggaggacttaaaaattcactaaaaatctgattatgtcttaaatgttcagtttatctttggtttattaaaataaaaaaaaaatctaagattaaacacagtagatatctctggaggcaattttccaaaactcaacattaaaatttgtggatgcatgagatgcaatccttcaaagaatgaatctgaaatatatttttaatatttacttaatatccactgaagatatctttatgcaagacaagagtcagccatcagacactgaaatatattatgatagattatgaagaattttctctgtagaattatattcttcctggaacctggtagagtagattagactcaaaggctttttcttccttttcttactcctgttttttccactcactcttcccaagagatttcctaaagcttcaagcttaataagcctaatagtgaaaaataactgaatttaatggtataatgaagttcttcatttccagacatctttaattgatcttaaagctcatttgagtctttgcccctgaacaaagacagacccattaaaatctaagaattctaaattttcacaactgtttgagcttcttttcattttgaaggatttggaatatatatgttttcataaaagtatcaagtgaaatatagttacatgggagctcaatcatgtgcagattgcattctgttatgttgactcaatatttaatttacaactatccttatttatattgacctcaagaactccattttatgcaatgcagaccactgagatatagctaacattctttcaaataattttccttttcttttataattcctctatagcaaatttttatgtataactgattatacatatccatatttatatttcattgattccaagacatcactttttcaatttaacatctctgaaattgtgacatttcttgcaactgttggcacttcagatgcagtgtttaaaattatgcttgaataaatattacactaatccaactttacctaaacgtttatgcatctaggcaaattttgttttcttataaagatttgagagcccatttatgacaaaatatgaaggcgaaatttaaggacaattgagtcacgcacaactcaacatggagcctaactgattatcagctcagatcccgcatatcttgagtttacaaaagctctttcaggtccccatttatactttacgtgagtgcgaatgatttcagcaaaccctaacttaactaacaagaatgggtaggtatgtctacgtttcattaacaaatttttattatttttattctattatatgagatccttttatattatcatctcacttttaaacaaaattaactggaaaaatattacatggaactgtcatagttaggttttgcagcatcttacatgtcttgtatcaatggcaggagaaaaatatgataaaaacaatcagtgctgtgaaaaacaactttcttctagagtcctcttactttttattcttctttatcatttgtgggtttttcccccttggctctgatcactttaacttcaagcttatgtaacgactgttataaaactgcatatttaaattatttgaattatatgaaataattgttcagctatctgggcagctgttaatgtaaacctgagagtaataacactactcttttatctacctggaatacttttctgcataaaatttatctttgtaagctaactctattaatcaggtttcttctagcctctgcaacctacttcagttagaattgtctaatactgctctattaatcaggtttctagcctctacaacctacttcagttaaaattgtctaatacagcaatatttaaaaaaaaacactgcaattgtcaaggatggaaaatgtgtgatttgtgtaaacaatttttaccaactttacattttcctacagataaatgtgaaattttgataagaagtctacgcaatgacaagtatggtacataaattttattaagaatattgagtataaagtactttaattctaaattataagaaaatatacatttgcacttattaatatagaaattcattttgtgtatatttaacatagcttttaaactattttacattagctacttcattatggtttcttgaacttctgaaaaaaattagaaatgtattaaacttatcagtaacataaaaacttattttgtttcacctaacgaatactgcgtttgtaaaaataaatttaatatagaatatatttttaaattaaatatttgaatataaaatagctctaagaaagaagcaaattatcactgaacatatttcttattatttctggctttgaattatacgtaacttaaattgtcttaaatgatacagaatattggagaatatgatactttcacataatatactatgaacctgttcatataactctgattgactactaacttctgttttatgtatttattaaagagctgacactgtagtttgtggtgagatgtttatttttctaacagagcttataacagttaggacaaggcatttaattaatgcatcattctgtttagtagtaggtgttaatcaatatgaaattctctgttttaaaataaaaatgtaaaaatctaagaa

SEQ ID NO: 406545 - DNA, 2010 bp, Homo sapiens
aatcatgtgcagattgcattctgttatgttgagctcccatgtaactatatttcacttgatacttttatgggagctcaatcatgtgcagattgcattctgttatgttgactcaatatttaatttacaactatccttatttatattgacctcaagaactccattttatgcaatgcagaccactgagatatagctaacattctttcaaataattttccttttcttttataattcctctatagcaaatttttatgtataactgattatacatatccatatttatatttcattgattccaagacatcactttttcaatttaacatctctgaaattgtgacatttcttgcaactgttggcacttcagatgcagtgtttaaaattatgcttgaataaatattacactaatccaactttacctaaacgtttatgcatctaggcaaattttgttttcttataaagatttgagagcccatttatgacaaaatatgaaggcgaaatttaaggacaattgagtcacgcacaactcaacatggagcctaactgattatcagctcagatcccgcatatcttgagtttacaaaagctctttcaggtccccatttatactttacgtgagtgcgaatgatttcagcaaaccctaacttaactaacaagaatgggtaggtatgtctacgtttcattaacaaatttttattatttttattctattatatgagatccttttatattatcatctcacttttaaacaaaattaactggaaaaatattacatggaactgtcatagttaggttttgcagcatcttacatgtcttgtatcaatggcaggagaaaaatatgataaaaacaatcagtgctgtgaaaaacaactttcttctagagtcctcttactttttattcttctttatcatttgtgggtttttcccccttggctctgatcactttaacttcaagcttatgtaacgactgttataaaactgcatatttaaattatttgaattatatgaaataattgttcagctatctgggcagctgttaatgtaaacctgagagtaataacactactcttttatctacctggaatacttttctgcataaaatttatctttgtaagctaactctattaatcaggtttcttctagcctctgcaacctacttcagttagaattgtctaatactgctctattaatcaggtttctagcctctacaacctacttcagttaaaattgtctaatacagcaatatttaaaaaaaaacactgcaattgtcaaggatggaaaatgtgtgatttgtgtaaacaatttttaccaactttacattttcctacagataaatgtgaaattttgataagaagtctacgcaatgacaagtatggtacataaattttattaagaatattgagtataaagtactttaattctaaattataagaaaatatacatttgcacttattaatatagaaattcattttgtgtatatttaacatagcttttaaactattttacattagctacttcattatggtttcttgaacttctgaaaaaaattagaaatgtattaaacttatcagtaacataaaaacttattttgtttcacctaacgaatactgcgtttgtaaaaataaatttaatatagaatatatttttaaattaaatatttgaatataaaatagctctaagaaagaagcaaattatcactgaacatatttcttattatttctggctttgaattatacgtaacttaaattgtcttaaatgatacagaatattggagaatatgatactttcacataatatactatgaacctgttcatataactctgattgactactaacttctgttttatgtatttattaaagagctgacactgtagtttgtggtgagatgtttatttttctaacagagcttataacagttaggacaaggcatttaattaatgcatcattctgtttagtagtaggtgttaatcaatatgaaattctctgttttaaaataaaaatgtaaaaatctaagaa

SEQ ID NO: 406546 - DNA, 1349 bp, Homo sapiens
tatgacagttccatgtaatatttttccagttaattttgtttaaaagtgagatgataatataaaaggatctcatataatagaataaaattaactggaaaaatattacatggaactgtcatagttaggttttgcagcatcttacatgtcttgtatcaatggcaggagaaaaatatgataaaaacaatcagtgctgtgaaaaacaactttcttctagagtcctcttactttttattcttctttatcatttgtgggtttttcccccttggctctgatcactttaacttcaagcttatgtaacgactgttataaaactgcatatttaaattatttgaattatatgaaataattgttcagctatctgggcagctgttaatgtaaacctgagagtaataacactactcttttatctacctggaatacttttctgcataaaatttatctttgtaagctaactctattaatcaggtttcttctagcctctgcaacctacttcagttagaattgtctaatactgctctattaatcaggtttctagcctctacaacctacttcagttaaaattgtctaatacagcaatatttaaaaaaaaacactgcaattgtcaaggatggaaaatgtgtgatttgtgtaaacaatttttaccaactttacattttcctacagataaatgtgaaattttgataagaagtctacgcaatgacaagtatggtacataaattttattaagaatattgagtataaagtactttaattctaaattataagaaaatatacatttgcacttattaatatagaaattcattttgtgtatatttaacatagcttttaaactattttacattagctacttcattatggtttcttgaacttctgaaaaaaattagaaatgtattaaacttatcagtaacataaaaacttattttgtttcacctaacgaatactgcgtttgtaaaaataaatttaatatagaatatatttttaaattaaatatttgaatataaaatagctctaagaaagaagcaaattatcactgaacatatttcttattatttctggctttgaattatacgtaacttaaattgtcttaaatgatacagaatattggagaatatgatactttcacataatatactatgaacctgttcatataactctgattgactactaacttctgttttatgtatttattaaagagctgacactgtagtttgtggtgagatgtttatttttctaacagagcttataacagttaggacaaggcatttaattaatgcatcattctgtttagtagtaggtgttaatcaatatgaaattctctgttttaaaataaaaatgtaaaaatctaagaa

SEQ ID NO: 406547 - DNA, 1868 bp, Homo sapiens
  misc_feature (1)..(1): n is a, c, g, or t
  misc_feature (4)..(5): n is a, c, g, or t
  misc_feature (7)..(7): n is a, c, g, or t
  misc_feature (9)..(9): n is a, c, g, or t
ngcnngngnggcgggtgcttctagggcgctcccagagccgcctccccctgttgctggcatcccgagcttcctcccttgccagccaggacgctgccgacttgtctttgcccgctgctccgcagacggggctgcaaagctgcaactaatggtgttggcctccctgcccacctgtggaagcaactgcgctgattgatgcgccacagacttttttcccctcgacctcgccggcgtcccctcccacagatccagcatcacccagtgaatgtacattagggtggtttcccccccagcttcgggctttgtttgggtttgattgtgtttggctcttcgctaagctgatttatgcagcagaagccccaccggctggagagaaacaaaagctcttttctttgtcccggagcaggctgcggagcccttgcagagccctctctccagtcgccgccggggcccttggccgtcgaaggaggtgcttctcgcggagaccgcgggacccgccgtgccgagccgggagggccgtaggggccctgagatgccgagcggtgcccgggcccgcttacctgcaccgcttgctccgagccgcggggtccgcctgctaggcctgcggaaaacgtcctagcgacactcggcccgcgggccccgaggtgcgcccgggaggcgcgagcccgcgtccggaaggcagccaggcggcgggcgcggggcgggctgttttgcattatgtgcggctcggccctggctttttttaccgctgcatttgtctgcctgcaaaacgaccggcgaggtcccgcctcgttcctctgggcagcctgggtgttttcacttgttcttggactgggccaaggtgaagacaatagatgtgcatcttcaaatgcagcatcctgtgccaggtgccttgcgctgggtccagaatgtggatggtgtgttcaagaggatttcatttcaggtggatcaagaagtgaacgttgtgatattgtttccaatttaataagcaaaggctgctcagttgattcaatagaatacccatctgtgcatgttataatacccactgaaaatgaaattaatacccaggtgacaccaggagaagtgtctatccagctgcgtccaggagccgaagctaattttatgctgaaagttcatcctctgaagaaatatcctgtggatctttattatcttgttgatgtctcagcatcaatgcacaataatatagaaaaattaaattccgttggaaacgatttatctagaaaaatggcatttttctcccgtgactttcgtcttggatttggctcatacgttgataaaacagtttcaccatacattagcatccaccccgaaaggattcataatcaatgcagtgactacaatttagactgcatgcctccccatggatacatccatgtgctgtctttgacagagaacatcactgagtttgagaaagcagttcatagacagaagatctctggaaacatagatacaccagaaggaggttttgacgccatgcttcaggcagctgtctgtgaaagtcatatcggatggcgaaaagaggctaaaagattgctgctggtgatgacagatcagacgtctcatctcgctcttgatagcaaattggcaggcatagtggtgcccaatgacggaaactgtcatctgaaaaacaacgtctatgtcaaatcgacaaccatggtaatgcagcagtaaccgcttagtagatatgactcttttggttaaagtacaattttaaattggcaactcaactatttttgtaccaggaaattacctacaaaagaaagatacagaacaaggataagccatgagagagaatttatggaacagtgcaatctataaatactgatcaataaaatatatgaataaaacag

SEQ ID NO: 406548 - DNA, 1581 bp, Homo sapiens
  misc_feature (1)..(1): n is a, c, g, or t
  misc_feature (4)..(5): n is a, c, g, or t
  misc_feature (7)..(7): n is a, c, g, or t
  misc_feature (9)..(9): n is a, c, g, or t
ngcnngngnggcgggtgcttctagggcgctcccagagccgcctccccctgttgctggcatcccgagcttcctcccttgccagccaggacgctgccgacttgtctttgcccgctgctccgcagacggggctgcaaagctgcaactaatggtgttggcctccctgcccacctgtggaagcaactgcgctgattgatgcgccacagacttttttcccctcgacctcgccggcgtcccctcccacagatccagcatcacccagtgaatgtacattagggtggtttcccccccagcttcgggctttgtttgggtttgattgtgtttggctcttcgctaagctgatttatgcagcagaagccccaccggctggagagaaacaaaagctcttttctttgtcccggagcaggctgcggagcccttgcagagccctctctccagtcgccgccggggcccttggccgtcgaaggaggtgcttctcgcggagaccgcgggacccgccgtgccgagccgggagggccgtaggggccctgagatgccgagcggtgcccgggcccgcttacctgcaccgcttgctccgagccgcggggtccgcctgctaggcctgcggaaaacgtcctagcgacactcggcccgcgggccccgaggtgcgcccgggaggcgcgagcccgcgtccggaaggcagccaggcggcgggcgcggggcgggctgttttgcattatgtgcggctcggccctggctttttttaccgctgcatttgtctgcctgcaaaacgaccggcgaggtcccgcctcgttcctctgggcagcctgggtgttttcacttgttcttggactgggccaaggtgaagacaatagatgtgcatcttcaaatgcagcatcctgtgccaggtgccttgcgctgggtccagaatgtggatggtgtgttcaagaggatttcatttcaggtggatcaagaagtgaacgttgtgatattgtttccaatttaataagcaaaggctgctcagttgattcaatagaatacccatctgtgcatgttataatacccactgaaaatgaaattaatacccaggtgacaccaggagaagtgtctatccagctgcgtccaggagccgaagctaattttatgctgaaagttcatcctctgaagaaatatcctgtggatctttattatcttgttgatgtctcagcatcaatgcacaataatatagaaaaattaaattccgttggaaacgatttatctagaaaaatggcatttttctcccgtgactttcgtcttggatttggctcatacgttgataaaacagtttcaccatacattagcatccaccccgaaaggattcataatcaatgcaggtatctagggtttgatgtggatatgctaaattaattttttgcttataaaatctcactttgtttttaatgtaaagaacttaccaaattttatatttttatcttataaaataagaataaaaatatttggtgaggtggggaggtttcttcatatctgaaaacttctgagatgaactgtagattgggctttttattttatatttctttaaatatttagtcagtttttatcaccaaa

SEQ ID NO: 406549 - DNA, 8783 bp, Homo sapiens
  misc_feature (1)..(1): n is a, c, g, or t
  misc_feature (4)..(5): n is a, c, g, or t
  misc_feature (7)..(7): n is a, c, g, or t
  misc_feature (9)..(9): n is a, c, g, or t
ngcnngngnggcgggtgcttctagggcgctcccagagccgcctccccctgttgctggcatcccgagcttcctcccttgccagccaggacgctgccgacttgtctttgcccgctgctccgcagacggggctgcaaagctgcaactaatggtgttggcctccctgcccacctgtggaagcaactgcgctgattgatgcgccacagacttttttcccctcgacctcgccggcgtcccctcccacagatccagcatcacccagtgaatgtacattagggtggtttcccccccagcttcgggctttgtttgggtttgattgtgtttggctcttcgctaagctgatttatgcagcagaagccccaccggctggagagaaacaaaagctcttttctttgtcccggagcaggctgcggagcccttgcagagccctctctccagtcgccgccggggcccttggccgtcgaaggaggtgcttctcgcggagaccgcgggacccgccgtgccgagccgggagggccgtaggggccctgagatgccgagcggtgcccgggcccgcttacctgcaccgcttgctccgagccgcggggtccgcctgctaggcctgcggaaaacgtcctagcgacactcggcccgcgggccccgaggtgcgcccgggaggcgcgagcccgcgtccggaaggcagccaggcggcgggcgcggggcgggctgttttgcattatgtgcggctcggccctggctttttttaccgctgcatttgtctgcctgcaaaacgaccggcgaggtcccgcctcgttcctctgggcagcctgggtgttttcacttgttcttggactgggccaaggtgaagacaatagatgtgcatcttcaaatgcagcatcctgtgccaggtgccttgcgctgggtccagaatgtggatggtgtgttcaagaggatttcatttcaggtggatcaagaagtgaacgttgtgatattgtttccaatttaataagcaaaggctgctcagttgattcaatagaatacccatctgtgcatgttataatacccactgaaaatgaaattaatacccaggtgacaccaggagaagtgtctatccagctgcgtccaggagccgaagctaattttatgctgaaagttcatcctctgaagaaatatcctgtggatctttattatcttgttgatgtctcagcatcaatgcacaataatatagaaaaattaaattccgttggaaacgatttatctagaaaaatggcatttttctcccgtgactttcgtcttggatttggctcatacgttgataaaacagtttcaccatacattagcatccaccccgaaaggattcataatcaatgcagtgactacaatttagactgcatgcctccccatggatacatccatgtgctgtctttgacagagaacatcactgagtttgagaaagcagttcatagacagaagatctctggaaacatagatacaccagaaggaggttttgacgccatgcttcaggcagctgtctgtgaaagtcatatcggatggcgaaaagaggctaaaagattgctgctggtgatgacagatcagacgtctcatctcgctcttgatagcaaattggcaggcatagtggtgcccaatgacggaaactgtcatctgaaaaacaacgtctatgtcaaatcgacaaccatggaacacccctcactaggccaactttcagagaaattaatagacaacaacattaatgtcatctttgcagttcaaggaaaacaatttcattggtataaggatcttctacccctcttgccaggcaccattgctggtgaaatagaatcaaaggctgcaaacctcaataatttggtagtggaagcctatcagaagctcatttcagaagtgaaagttcaggtggaaaaccaggtacaaggcatctattttaacattaccgccatctgtccagatgggtccagaaagccaggcatggaaggatgcagaaacgtgacgagcaatgatgaagttcttttcaatgtaacagttacaatgaaaaaatgtgatgtcacaggaggaaaaaactatgcaataatcaaacctattggttttaatgaaaccgctaaaattcatatacacagaaactgcagctgtcagtgtgaggacaacagaggacctaaaggaaagtgtgtagatgaaacttttctagattccaagtgtttccagtgtgatgagaataaatgtcattttgatgaagatcagttttcttctgagagttgcaagtcacacaaggatcagcctgtttgcagtggtcgaggagtttgtgtttgtgggaaatgttcatgtcacaaaattaagcttggaaaagtgtatggaaaatactgtgaaaaggatgacttttcttgtccatatcaccatggaaatctgtgtgctgggcatggagagtgtgaagcaggcagatgccaatgcttcagtggctgggaaggtgatcgatgccagtgcccttcagcagcagcccagcactgtgtcaattcaaagggccaagtgtgcagtggaagaggcacgtgtgtgtgtggaaggtgtgagtgcaccgatcccaggagcatcggccgcttctgtgaacactgccccacctgttatacagcctgcaaggaaaactggaattgtatgcaatgccttcaccctcacaatttgtctcaggctatacttgatcagtgcaaaacctcatgtgctctcatggaacaacagcattatgtcgaccaaacttcagaatgtttctccagcccaagctacttgagaatatttttcatcattttcatagttacattcttgattgggttgcttaaagtcctgatcattagacaggtgatactacaatggaatagtaataaaattaagtcctcatcagattacagagtgtcagcctcaaaaaaggataagttgattctgcaaagtgtttgcacaagagcagtcacctaccgacgtgagaagcctgaagaaataaaaatggatatcagcaaattaaatgctcatgaaactttcaggtgcaacttctaaaaaaagatttttaaacacttaatgggaaactggaattgttaataattgctcctaaagattataattttaaaagtcacaggaggagacaaattgctcacggtcatgccagttgctggttgtacactcgaacgaagactgacaagtatcctcatcatgatgtgactcacatagctgctgactttttcagagaaaaatgtgtcttactactgtttgagactagtgtcgttgtagcactttactgtaatatataacttatttagatcagcatagaatgtagatcctctgaagagcactgattacactttacaggtacctgttatccctacgcttcccagagagaacaatgctgtgagagagtttagcattgtgtcactacaagggtacagtaatccctgcactggacatgtgaggaaaaaaataatctggcaagtatattctaaggttgccaaacacttcaacagttggtggttgaatagacaagaacagctagatgaataaatgattcgtgtttcactctttcaagaggtgaacagatacaaccttaatcttaaaagattattgctttttaaagtgtgtagttttatgcatgtgtgtttatggtttgcttatttttgcaagatggatactaattccagcattctctcctctttgcctttatgttttgttttcttttttacaggataagtttatgtatgtcacagatgactggattaattaagtgctaagttactactgccataaaaaactaataatacaatgtcactttatcagaatactagttttaaaagctgaatgttaataggggacactgtaaagtatcatcaaaacctgaatagcttcattgtgcacaagtgtggagttttgtatcctcttacctggtaaactgaagggattgtttggccatttcatttatcttatcattaattcacaagatagttagaaattctgcctcaagcaaagtaccacattttgaatgttttcttagattttgattgcaagtagatatcagcattttttaaatgaaaagctatattatcttctcccttcaaggcagcctaaggatgttctttcccagaatcactccaacccttcttgccagaattcataaaagtacaaaattggagaatagatgatatcttagaaataagctttttttttttttttttttttttttgagacggagtttcactcttgtcacccaggctgaagtgcaatggcgcaattagggttcactgcaacctctgcctcccgggttcaagcagttctcctgcctcagcctcctgagtagctgggattacaggcatccaccaccgtgcccagctaatttttgtatttttagtagagacggggttttgccatgttggacaggttgatctcaaactcctgacctcaggtgatctaccctcctcggcctcccagagtgttgggattacaggcatgagccaccatgccaggctgctaattctcctttttagtgagttagggaactgagcctcagaaaacttaaacgatttctcagaaaacactcaagtgataaagtggccacattggaaaggagtttttatcttctcattgtcaggccagtgttcattgcacaatatcatgctacctcttgaatctttaaaatattcaattggcaaatgtttttcaatgtgatttactcatgtcttaagtgtatgaggaaagttcaaagcaaaatagaaaggaataattcaaactgaattgtccataatcagcttccagtctttcatgctaatcagcttcttaagagactgaagtatggcatacctacaggggaattccttcgcaccatagcctgtatgaacagtgttccctggagttctccagtgctcagcttgagaccttgatacacgggccatgagccctgtcttccccaatggaaatttatttacacttaccttatccctatggacttagtctgattttattggctaggagtctaacagtcctgtgtggatatacagttttgcccatgacaacaaaggaatctatccgaaatatctttttttttataataaacttccaagatttgctgtcttccagcacttgagttaaagtactagatactgcattttgatgaagactaaccccatctcatattctaccctaaagagaactgaaaaacctataataagttgttctggagccaataaacacagcagctctgttagatgtcctctacagccaagcaatttcaatgctaacttgaactgcatttccttcctcaaatgagagattgacataattcagtactgtgagtcacttgtataagaaacctttgatcactaaaaataatgtaaaaattgggtttagtagcctaatacacataacgttcttcttaaaaaggaaaatggatggatgcctgacaaccctccaaaagaaaaaagtgtaagatagccattaagatgatgacaatttttgaaatgaacattatgatatttatgaacaataaacaaatttccgtatggaatgaattatccaaaaagagtataacaaaatgaaatccttaaaaatccagagtttatattttttttataccctcacttgtttgcactaactttatagtggaccaaggctgttaccataggaagggacaaacttccttgtaggcaactcagtgttagacgatgattgtggttatgcttgcaaagtcttgtgcttatcttttttgtttttacttaaaaagctaatttttaaagattgtagggcttgtattttacttgaataattgatatcttcctgtgtaatgatttgtgagatgagaattaatatttgactagttagaattaattaaatggtaagggaacacagggtactcttaggttaaataatgtatgcaaatagagtctattttcaactaatatggccacaggagccttttgagattcattgatattaaacacaattaatgaaattttaaattgttaacagaattgagaacttgaacaacacttttagtactgcagcatttttgtgccctaaagtatgtaatgatttataaatgtgccatacatacactacaacataacatttgctttgttatgcattttatttctctggggacaccattgcactgcagtgcacacgtatttataaacatttgttatatttttggaaacttgctaatatttattaagtcatagacttttctggaggacttaaaaattcactaaaaatctgattatgtcttaaatgttcagtttatctttggtttattaaaataaaaaaaaaatctaagattaaacacagtagatatctctggaggcaattttccaaaactcaacattaaaatttgtggatgcatgagatgcaatccttcaaagaatgaatctgaaatatatttttaatatttacttaatatccactgaagatatctttatgcaagacaagagtcagccatcagacactgaaatatattatgatagattatgaagaattttctctgtagaattatattcttcctggaacctggtagagtagattagactcaaaggctttttcttccttttcttactcctgttttttccactcactcttcccaagagatttcctaaagcttcaagcttaataagcctaatagtgaaaaataactgaatttaatggtataatgaagttcttcatttccagacatctttaattgatcttaaagctcatttgagtctttgcccctgaacaaagacagacccattaaaatctaagaattctaaattttcacaactgtttgagcttcttttcattttgaaggatttggaatatatatgttttcataaaagtatcaagtgaaatatagttacatgggagctcaatcatgtgcagattgcattctgttatgttgactcaatatttaatttacaactatccttatttatattgacctcaagaactccattttatgcaatgcagaccactgagatatagctaacattctttcaaataattttccttttcttttataattcctctatagcaaatttttatgtataactgattatacatatccatatttatatttcattgattccaagacatcactttttcaatttaacatctctgaaattgtgacatttcttgcaactgttggcacttcagatgcagtgtttaaaattatgcttgaataaatattacactaatccaactttacctaaacgtttatgcatctaggcaaattttgttttcttataaagatttgagagcccatttatgacaaaatatgaaggcgaaatttaaggacaattgagtcacgcacaactcaacatggagcctaactgattatcagctcagatcccgcatatcttgagtttacaaaagctctttcaggtccccatttatactttacgtgagtgcgaatgatttcagcaaaccctaacttaactaacaagaatgggtaggtatgtctacgtttcattaacaaatttttattatttttattctattatatgagatccttttatattatcatctcacttttaaacaaaattaactggaaaaatattacatggaactgtcatagttaggttttgcagcatcttacatgtcttgtatcaatggcaggagaaaaatatgataaaaacaatcagtgctgtgaaaaacaactttcttctagagtcctcttactttttattcttctttatcatttgtgggtttttcccccttggctctgatcactttaacttcaagcttatgtaacgactgttataaaactgcatatttaaattatttgaattatatgaaataattgttcagctatctgggcagctgttaatgtaaacctgagagtaataacactactcttttatctacctggaatacttttctgcataaaatttatctttgtaagctaactctattaatcaggtttcttctagcctctgcaacctacttcagttagaattgtctaatactgctctattaatcaggtttctagcctctacaacctacttcagttaaaattgtctaatacagcaatatttaaaaaaaaacactgcaattgtcaaggatggaaaatgtgtgatttgtgtaaacaatttttaccaactttacattttcctacagataaatgtgaaattttgataagaagtctacgcaatgacaagtatggtacataaattttattaagaatattgagtataaagtactttaattctaaattataagaaaatatacatttgcacttattaatatagaaattcattttgtgtatatttaacatagcttttaaactattttacattagctacttcattatggtttcttgaacttctgaaaaaaattagaaatgtattaaacttatcagtaacataaaaacttattttgtttcacctaacgaatactgcgtttgtaaaaataaatttaatatagaatatatttttaaattaaatatttgaatataaaatagctctaagaaagaagcaaattatcactgaacatatttcttattatttctggctttgaattatacgtaacttaaattgtcttaaatgatacagaatattggagaatatgatactttcacataatatactatgaacctgttcatataactctgattgactactaacttctgttttatgtatttattaaagagctgacactgtagtttgtggtgagatgtttatttttctaacagagcttataacagttaggacaaggcatttaattaatgcatcattctgtttagtagtaggtgttaatcaatatgaaattctctgttttaaaataaaaatgtaaaaatctaagaa

SEQ ID NO: 406550 - DNA, 8804 bp, Homo sapiens
  misc_feature (1)..(1): n is a, c, g, or t
  misc_feature (4)..(5): n is a, c, g, or t
  misc_feature (7)..(7): n is a, c, g, or t
  misc_feature (9)..(9): n is a, c, g, or t
ngcnngngnggcgggtgcttctagggcgctcccagagccgcctccccctgttgctggcatcccgagcttcctcccttgccagccaggacgctgccgacttgtctttgcccgctgctccgcagacggggctgcaaagctgcaactaatggtgttggcctccctgcccacctgtggaagcaactgcgctgattgatgcgccacagacttttttcccctcgacctcgccggcgtcccctcccacagatccagcatcacccagtgaatgtacattagggtggtttcccccccagcttcgggctttgtttgggtttgattgtgtttggctcttcgctaagctgatttatgcagcagaagccccaccggctggagagaaacaaaagctcttttctttgtcccggagcaggctgcggagcccttgcagagccctctctccagtcgccgccggggcccttggccgtcgaaggaggtgcttctcgcggagaccgcgggacccgccgtgccgagccgggagggccgtaggggccctgagatgccgagcggtgcccgggcccgcttacctgcaccgcttgctccgagccgcggggtccgcctgctaggcctgcggaaaacgtcctagcgacactcggcccgcgggccccgaggtgcgcccgggaggcgcgagcccgcgtccggaaggcagccaggcggcgggcgcggggcgggctgttttgcattatgtgcggctcggccctggctttttttaccgctgcatttgtctgcctgcaaaacgaccggcgaggtcccgcctcgttcctctgggcagcctgggtgttttcacttgttcttggactgggccaaggtgaagacaatagatgtgcatcttcaaatgcagcatcctgtgccaggtgccttgcgctgggtccagaatgtggatggtgtgttcaagaggatttcatttcaggtggatcaagaagtgaacgttgtgatattgtttccaatttaataagcaaaggctgctcagttgattcaatagaatacccatctgtgcatgttataatacccactgaaaatgaaattaatacccaggtgacaccaggagaagtgtctatccagctgcgtccaggagccgaagctaattttatgctgaaagttcatcctctgaagaaatatcctgtggatctttattatcttgttgatgtctcagcatcaatgcacaataatatagaaaaattaaattccgttggaaacgatttatctagaaaaatggcatttttctcccgtgactttcgtcttggatttggctcatacgttgataaaacagtttcaccatacattagcatccaccccgaaaggattcataatcaatgcagtgactacaatttagactgcatgcctccccatggatacatccatgtgctgtctttgacagagaacatcactgagtttgagaaagcagttcatagacagaagatctctggaaacatagatacaccagaaggaggttttgacgccatgcttcaggcagctgtctgtgaaagtcatatcggatggcgaaaagaggctaaaagattgctgctggtgatgacagatcagacgtctcatctcgctcttgatagcaaattggcaggcatagtggtgcccaatgacggaaactgtcatctgaaaaacaacgtctatgtcaaatcgacaaccatggaacacccctcactaggccaactttcagagaaattaatagacaacaacattaatgtcatctttgcagttcaaggaaaacaatttcattggtataaggatcttctacccctcttgccaggcaccattgctggtgaaatagaatcaaaggctgcaaacctcaataatttggtagtggaagcctatcagaagctcatttcagaagtgaaagttcaggtggaaaaccaggtacaaggcatctattttaacattaccgccatctgtccagatgggtccagaaagccaggcatggaaggatgcagaaacgtgacgagcaatgatgaagttcttttcaatgtaacagttacaatgaaaaaatgtgatgtcacaggaggaaaaaactatgcaataatcaaacctattggttttaatgaaaccgctaaaattcatatacacagaaactgcagctgtcagtgtgaggacaacagaggacctaaaggaaagtgtgtagatgaaacttttctagattccaagtgtttccagtgtgatgagaataaatgtcattttgatgaagatcagttttcttctgagagttgcaagtcacacaaggatcagcctgtttgcagtggtcgaggagtttgtgtttgtgggaaatgttcatgtcacaaaattaagcttggaaaagtgtatggaaaatactgtgaaaaggatgacttttcttgtccatatcaccatggaaatctgtgtgctgggcatggagagtgtgaagcaggcagatgccaatgcttcagtggctgggaaggtgatcgatgccagtgcccttcagcagcagcccagcactgtgtcaattcaaagggccaagtgtgcagtggaagaggcacgtgtgtgtgtggaaggtgtgagtgcaccgatcccaggagcatcggccgcttctgtgaacactgccccacctgttatacagcctgcaaggaaaactggaattgtatgcaatgccttcaccctcacaatttgtctcaggctatacttgatcagtgcaaaacctcatgtgctctcatggaacaacagcattatgtcgaccaaacttcagaatgtttctccagcccaagctacttgagaatatttttcatcattttcatagttacattcttgattgggttgcttaaagtcctgatcattagacaggtgatactacaatggaatagtaataaaattaagtcctcatcagattacagagtgtcagcctcaaaaaaggataagttgattctgcaaagtgtttgcacaagagcagtcacctaccgacgtgagaagcctgaagaaataaaaatggatatcagcaaattaaatgctcatgaaactttcaggtgcaacttctaaaaaaagatttttaaacacttaatgggaaactggaattgttaataattgctcctaaagattataattttaaaagtcacaggaggagacaaattgctcacggtcatgccagttgctggttgtacactcgaacgaagactgacaagtatcctcatcatgatgtgactcacatagctgctgactttttcagagaaaaatgtgtcttactactgtttgagactagtgtcgttgtagcactttactgtaatatataacttatttagatcagcatagaatgtagatcctctgaagagcactgattacactttacaggtacctgttatccctacgcttcccagagagaacaatgctgtgagagagtttagcattgtgtcactacaagggtacagtaatccctgcactggacatgtgaggaaaaaaataatctggcaagtatattctaaggttgccaaacacttcaacagttggtggttgaatagacaagaacagctagatgaataaatgattcgtgtttcactctttcaagaggtgaacagatacaaccttaatcttaaaagattattgctttttaaagtgtgtagttttatgcatgtgtgtttatggtttgcttatttttgcaagatggatactaattccagcattctctcctctttgcctttatgttttgttttcttttttacaggataagtttatgtatgtcacagatgactggattaattaagtgctaagttactactgccataaaaaactaataatacaatgtcactttatcagaatactagttttaaaagctgaatgttaataggggacactgtaaagtatcatcaaaacctgaatagcttcattgtgcacaagtgtggagttttgtatcctcttacctggtaaactgaagggattgtttggccatttcatttatcttatcattaattcacaagatagttagaaattctgcctcaagcaaagtaccacattttgaatgttttcttagattttgattgcaagtagatatcagcattttttaaatgaaaagctatattatcttctcccttcaaggcagcctaaggatgttctttcccagaatcactccaacccttcttgccagaattcataaaagtacaaaattggagaatagatgatatcttagaaataagctttttttttttttttttttttttttgagacggagtttcactcttgtcacccaggctgaagtgcaatggcgcaattagggttcactgcaacctctgcctcccgggttcaagcagttctcctgcctcagcctcctgagtagctgggattacaggcatccaccaccgtgcccagctaatttttgtatttttagtagagacggggttttgccatgttggacaggttgatctcaaactcctgacctcaggtgatctaccctcctcggcctcccagagtgttgggattacaggcatgagccaccatgccaggctgctaattctcctttttagtgagttagggaactgagcctcagaaaacttaaacgatttctcagaaaacactcaagtgataaagtggccacattggaaaggagtttttatcttctcattgtcaggccagtgttcattgcacaatatcatgctacctcttgaatctttaaaatattcaattggcaaatgtttttcaatgtgatttactcatgtcttaagtgtatgaggaaagttcaaagcaaaatagaaaggaataattcaaactgaattgtccataatcagcttccagtctttcatgctaatcagcttcttaagagactgaagtatggcatacctacaggggaattccttcgcaccatagcctgtatgaacagtgttccctggagttctccagtgctcagcttgagaccttgatacacgggccatgagccctgtcttccccaatggaaatttatttacacttaccttatccctatggacttagtctgattttattggctaggagtctaacagtcctgtgtggatatacagttttgcccatgacaacaaaggaatctatccgaaatatctttttttttataataaacttccaagatttgctgtcttccagcacttgagttaaagtactagatactgcattttgatgaagactaaccccatctcatattctaccctaaagagaactgaaaaacctataataagttgttctggagccaataaacacagcagctctgttagatgtcctctacagccaagcaatttcaatgctaacttgaactgcatttccttcctcaaatgagagattgacataattcagtactgtgagtcacttgtataagaaacctttgatcactaaaaataatgtaaaaattgggtttagtagcctaatacacataacgttcttcttaaaaaggaaaatggatggatgcctgacaaccctccaaaagaaaaaagtgtaagatagccattaagatgatgacaatttttgaaatgaacattatgatatttatgaacaataaacaaatttccgtatggaatgaattatccaaaaagagtataacaaaatgaaatccttaaaaatccagagtttatattttttttataccctcacttgtttgcactaactttatagtggaccaaggctgttaccataggaagggacaaacttccttgtaggcaactcagtgttagacgatgattgtggttatgcttgcaaagtcttgtgcttatcttttttgtttttacttaaaaagctaatttttaaagattgtagggcttgtattttacttgaataattgatatcttcctgtgtaatgatttgtgagatgagaattaatatttgactagttagaattaattaaatggtaagggaacacagggtactcttaggttaaataatgtatgcaaatagagtctattttcaactaatatggccacaggagccttttgagattcattgatattaaacacaattaatgaaattttaaattgttaacagaattgagaacttgaacaacacttttagtactgcagcatttttgtgccctaaagtatgtaatgatttataaatgtgccatacatacactacaacataacatttgctttgttatgcattttatttctctggggacaccattgcactgcagtgcacacgtatttataaacatttgttatatttttggaaacttgctaatatttattaagtcatagacttttctggaggacttaaaaattcactaaaaatctgattatgtcttaaatgttcagtttatctttggtttattaaaataaaaaaaaaatctaagattaaacacagtagatatctctggaggcaattttccaaaactcaacattaaaatttgtggatgcatgagatgcaatccttcaaagaatgaatctgaaatatatttttaatatttacttaatatccactgaagatatctttatgcaagacaagagtcagccatcagacactgaaatatattatgatagattatgaagaattttctctgtagaattatattcttcctggaacctggtagagtagattagactcaaaggctttttcttccttttcttactcctgttttttccactcactcttcccaagagatttcctaaagcttcaagcttaataagcctaatagtgaaaaataactgaatttaatggtataatgaagttcttcatttccagacatctttaattgatcttaaagctcatttgagtctttgcccctgaacaaagacagacccattaaaatctaagaattctaaattttcacaactgtttgagcttcttttcattttgaaggatttggaatatatatgttttcataaaagtatcaagtgaaatatagttacatgggagctcaatcatgtgcagattgcattctgttatgttgactcaatatttaatttacaactatccttatttatattgacctcaagaactccattttatgcaatgcagaccactgagatatagctaacattctttcaaataattttccttttcttttataattcctctatagcaaatttttatgtataactgattatacatatccatatttatatttcattgattccaagacatcactttttcaatttaacatctctgaaattgtgacatttcttgcaactgttggcacttcagatgcagtgtttaaaattatgcttgaataaatattacactaatccaactttacctaaacgtttatgcatctaggcaaattttgttttcttataaagatttgagagcccatttatgacaaaatatgaaggcgaaatttaaggacaattgagtcacgcacaactcaacatggagcctaactgattatcagctcagatcccgcatatcttgagtttacaaaagctctttcaggtccccatttatactttacgtgagtgcgaatgatttcagcaaaccctaacttaactaacaagaatgggtaggtatgtctacgtttcattaacaaatttttattatttttattctattatatgagatccttttatattatcatctcacttttaaacaaaattaactggaaaaatattacatggaactgtcatagttaggttttgcagcatcttacatgtcttgtatcaatggcaggagaaaaatatgataaaaacaatcagtgctgtgaaaaacaactttcttctagagtcctcttactttttattcttctttatcatttgtgggtttttcccccttggctctgatcactttaacttcaagcttatgtaacgactgttataaaactgcatatttaaattatttgaattatatgaaataattgttcagctatctgggcagctgttaatgtaaacctgagagtaataacactactcttttatctacctggaatacttttctgcataaaatttatctttgtaagctaactctattaatcaggtttcttctagcctctgcaacctacttcagttagaattgtctaatactgctctattaatcaggtttctagcctctacaacctacttcagttaaaattgtctaatacagcaatatttaaaaaaaaacactgcaattgtcaaggatggaaaatgtgtgatttgtgtaaacaatttttaccaactttacattttcctacagataaatgtgaaattttgataagaagtctacgcaatgacaagtatggtacataaattttattaagaatattgagtataaagtactttaattctaaattataagaaaatatacatttgcacttattaatatagaaattcattttgtgtatatttaacatagcttttaaactattttacattagctacttcattatggtttcttgaacttctgaaaaaaattagaaatgtattaaacttatcagtaacataaaaacttattttgtttcacctaacgaatactgcgtttgtaaaaataaatttaatatagaatatatttttaaattaaatatttgaatataaaatagctctaagaaagaagcaaattatcactgaacatatttcttattatttctggctttgaattatacgtaacttaaattgtcttaaatgatacagaatattggagaatatgatactttcacataatatactatgaacctgttcatataactctgattgactactaacttctgttttatgtatttattaaagagctgacactgtagtttgtggtgagatgtttatttttctaacagagcttataacagttaggacaaggcatttaattaatgcatcattctgtttagtagtaggtgttaatcaatatgtgtctgcttatgccgaccccctgcccctcacaggctgcgtgcccggaggctgtcctcctct

SEQ ID NO: 406551 - DNA, 7564 bp, Homo sapiens
ggattacaggcatgagccaccgtgcctggcctctcctactttttaatctatattgttcttcctccagtggaacactagaaatctctagccaggaactagtgtggtcacatggctgtgggaaaatagaggatgtacaaataaaagttaaagctatttacgcagcagcgttgtacccacgcacatcgttctagcctgacttactgttcgtcaactcaaacgtaatgtttacttgaggtaaaaaccacagtacacatctgtgttattgtacaaagtctaattacatgtttatttttaagagtcatatcggatggcgaaaagaggctaaaagattgctgctggtgatgacagatcagacgtctcatctcgctcttgatagcaaattggcaggcatagtggtgcccaatgacggaaactgtcatctgaaaaacaacgtctatgtcaaatcgacaaccatggaacacccctcactaggccaactttcagagaaattaatagacaacaacattaatgtcatctttgcagttcaaggaaaacaatttcattggtataaggatcttctacccctcttgccaggcaccattgctggtgaaatagaatcaaaggctgcaaacctcaataatttggtagtggaagcctatcagaagctcatttcagaagtgaaagttcaggtggaaaaccaggtacaaggcatctattttaacattaccgccatctgtccagatgggtccagaaagccaggcatggaaggatgcagaaacgtgacgagcaatgatgaagttcttttcaatgtaacagttacaatgaaaaaatgtgatgtcacaggaggaaaaaactatgcaataatcaaacctattggttttaatgaaaccgctaaaattcatatacacagaaactgcagctgtcagtgtgaggacaacagaggacctaaaggaaagtgtgtagatgaaacttttctagattccaagtgtttccagtgtgatgagaataaatgtcattttgatgaagatcagttttcttctgagagttgcaagtcacacaaggatcagcctgtttgcagtggtcgaggagtttgtgtttgtgggaaatgttcatgtcacaaaattaagcttggaaaagtgtatggaaaatactgtgaaaaggatgacttttcttgtccatatcaccatggaaatctgtgtgctgggcatggagagtgtgaagcaggcagatgccaatgcttcagtggctgggaaggtgatcgatgccagtgcccttcagcagcagcccagcactgtgtcaattcaaagggccaagtgtgcagtggaagaggcacgtgtgtgtgtggaaggtgtgagtgcaccgatcccaggagcatcggccgcttctgtgaacactgccccacctgttatacagcctgcaaggaaaactggaattgtatgcaatgccttcaccctcacaatttgtctcaggctatacttgatcagtgcaaaacctcatgtgctctcatggaacaacagcattatgtcgaccaaacttcagaatgtttctccagcccaagctacttgagaatatttttcatcattttcatagttacattcttgattgggttgcttaaagtcctgatcattagacaggtgatactacaatggaatagtaataaaattaagtcctcatcagattacagagtgtcagcctcaaaaaaggataagttgattctgcaaagtgtttgcacaagagcagtcacctaccgacgtgagaagcctgaagaaataaaaatggatatcagcaaattaaatgctcatgaaactttcaggtgcaacttctaaaaaaagatttttaaacacttaatgggaaactggaattgttaataattgctcctaaagattataattttaaaagtcacaggaggagacaaattgctcacggtcatgccagttgctggttgtacactcgaacgaagactgacaagtatcctcatcatgatgtgactcacatagctgctgactttttcagagaaaaatgtgtcttactactgtttgagactagtgtcgttgtagcactttactgtaatatataacttatttagatcagcatagaatgtagatcctctgaagagcactgattacactttacaggtacctgttatccctacgcttcccagagagaacaatgctgtgagagagtttagcattgtgtcactacaagggtacagtaatccctgcactggacatgtgaggaaaaaaataatctggcaagtatattctaaggttgccaaacacttcaacagttggtggttgaatagacaagaacagctagatgaataaatgattcgtgtttcactctttcaagaggtgaacagatacaaccttaatcttaaaagattattgctttttaaagtgtgtagttttatgcatgtgtgtttatggtttgcttatttttgcaagatggatactaattccagcattctctcctctttgcctttatgttttgttttcttttttacaggataagtttatgtatgtcacagatgactggattaattaagtgctaagttactactgccataaaaaactaataatacaatgtcactttatcagaatactagttttaaaagctgaatgttaataggggacactgtaaagtatcatcaaaacctgaatagcttcattgtgcacaagtgtggagttttgtatcctcttacctggtaaactgaagggattgtttggccatttcatttatcttatcattaattcacaagatagttagaaattctgcctcaagcaaagtaccacattttgaatgttttcttagattttgattgcaagtagatatcagcattttttaaatgaaaagctatattatcttctcccttcaaggcagcctaaggatgttctttcccagaatcactccaacccttcttgccagaattcataaaagtacaaaattggagaatagatgatatcttagaaataagctttttttttttttttttttttttttgagacggagtttcactcttgtcacccaggctgaagtgcaatggcgcaattagggttcactgcaacctctgcctcccgggttcaagcagttctcctgcctcagcctcctgagtagctgggattacaggcatccaccaccgtgcccagctaatttttgtatttttagtagagacggggttttgccatgttggacaggttgatctcaaactcctgacctcaggtgatctaccctcctcggcctcccagagtgttgggattacaggcatgagccaccatgccaggctgctaattctcctttttagtgagttagggaactgagcctcagaaaacttaaacgatttctcagaaaacactcaagtgataaagtggccacattggaaaggagtttttatcttctcattgtcaggccagtgttcattgcacaatatcatgctacctcttgaatctttaaaatattcaattggcaaatgtttttcaatgtgatttactcatgtcttaagtgtatgaggaaagttcaaagcaaaatagaaaggaataattcaaactgaattgtccataatcagcttccagtctttcatgctaatcagcttcttaagagactgaagtatggcatacctacaggggaattccttcgcaccatagcctgtatgaacagtgttccctggagttctccagtgctcagcttgagaccttgatacacgggccatgagccctgtcttccccaatggaaatttatttacacttaccttatccctatggacttagtctgattttattggctaggagtctaacagtcctgtgtggatatacagttttgcccatgacaacaaaggaatctatccgaaatatctttttttttataataaacttccaagatttgctgtcttccagcacttgagttaaagtactagatactgcattttgatgaagactaaccccatctcatattctaccctaaagagaactgaaaaacctataataagttgttctggagccaataaacacagcagctctgttagatgtcctctacagccaagcaatttcaatgctaacttgaactgcatttccttcctcaaatgagagattgacataattcagtactgtgagtcacttgtataagaaacctttgatcactaaaaataatgtaaaaattgggtttagtagcctaatacacataacgttcttcttaaaaaggaaaatggatggatgcctgacaaccctccaaaagaaaaaagtgtaagatagccattaagatgatgacaatttttgaaatgaacattatgatatttatgaacaataaacaaatttccgtatggaatgaattatccaaaaagagtataacaaaatgaaatccttaaaaatccagagtttatattttttttataccctcacttgtttgcactaactttatagtggaccaaggctgttaccataggaagggacaaacttccttgtaggcaactcagtgttagacgatgattgtggttatgcttgcaaagtcttgtgcttatcttttttgtttttacttaaaaagctaatttttaaagattgtagggcttgtattttacttgaataattgatatcttcctgtgtaatgatttgtgagatgagaattaatatttgactagttagaattaattaaatggtaagggaacacagggtactcttaggttaaataatgtatgcaaatagagtctattttcaactaatatggccacaggagccttttgagattcattgatattaaacacaattaatgaaattttaaattgttaacagaattgagaacttgaacaacacttttagtactgcagcatttttgtgccctaaagtatgtaatgatttataaatgtgccatacatacactacaacataacatttgctttgttatgcattttatttctctggggacaccattgcactgcagtgcacacgtatttataaacatttgttatatttttggaaacttgctaatatttattaagtcatagacttttctggaggacttaaaaattcactaaaaatctgattatgtcttaaatgttcagtttatctttggtttattaaaataaaaaaaaaatctaagattaaacacagtagatatctctggaggcaattttccaaaactcaacattaaaatttgtggatgcatgagatgcaatccttcaaagaatgaatctgaaatatatttttaatatttacttaatatccactgaagatatctttatgcaagacaagagtcagccatcagacactgaaatatattatgatagattatgaagaattttctctgtagaattatattcttcctggaacctggtagagtagattagactcaaaggctttttcttccttttcttactcctgttttttccactcactcttcccaagagatttcctaaagcttcaagcttaataagcctaatagtgaaaaataactgaatttaatggtataatgaagttcttcatttccagacatctttaattgatcttaaagctcatttgagtctttgcccctgaacaaagacagacccattaaaatctaagaattctaaattttcacaactgtttgagcttcttttcattttgaaggatttggaatatatatgttttcataaaagtatcaagtgaaatatagttacatgggagctcaatcatgtgcagattgcattctgttatgttgactcaatatttaatttacaactatccttatttatattgacctcaagaactccattttatgcaatgcagaccactgagatatagctaacattctttcaaataattttccttttcttttataattcctctatagcaaatttttatgtataactgattatacatatccatatttatatttcattgattccaagacatcactttttcaatttaacatctctgaaattgtgacatttcttgcaactgttggcacttcagatgcagtgtttaaaattatgcttgaataaatattacactaatccaactttacctaaacgtttatgcatctaggcaaattttgttttcttataaagatttgagagcccatttatgacaaaatatgaaggcgaaatttaaggacaattgagtcacgcacaactcaacatggagcctaactgattatcagctcagatcccgcatatcttgagtttacaaaagctctttcaggtccccatttatactttacgtgagtgcgaatgatttcagcaaaccctaacttaactaacaagaatgggtaggtatgtctacgtttcattaacaaatttttattatttttattctattatatgagatccttttatattatcatctcacttttaaacaaaattaactggaaaaatattacatggaactgtcatagttaggttttgcagcatcttacatgtcttgtatcaatggcaggagaaaaatatgataaaaacaatcagtgctgtgaaaaacaactttcttctagagtcctcttactttttattcttctttatcatttgtgggtttttcccccttggctctgatcactttaacttcaagcttatgtaacgactgttataaaactgcatatttaaattatttgaattatatgaaataattgttcagctatctgggcagctgttaatgtaaacctgagagtaataacactactcttttatctacctggaatacttttctgcataaaatttatctttgtaagctaactctattaatcaggtttcttctagcctctgcaacctacttcagttagaattgtctaatactgctctattaatcaggtttctagcctctacaacctacttcagttaaaattgtctaatacagcaatatttaaaaaaaaacactgcaattgtcaaggatggaaaatgtgtgatttgtgtaaacaatttttaccaactttacattttcctacagataaatgtgaaattttgataagaagtctacgcaatgacaagtatggtacataaattttattaagaatattgagtataaagtactttaattctaaattataagaaaatatacatttgcacttattaatatagaaattcattttgtgtatatttaacatagcttttaaactattttacattagctacttcattatggtttcttgaacttctgaaaaaaattagaaatgtattaaacttatcagtaacataaaaacttattttgtttcacctaacgaatactgcgtttgtaaaaataaatttaatatagaatatatttttaaattaaatatttgaatataaaatagctctaagaaagaagcaaattatcactgaacatatttcttattatttctggctttgaattatacgtaacttaaattgtcttaaatgatacagaatattggagaatatgatactttcacataatatactatgaacctgttcatataactctgattgactactaacttctgttttatgtatttattaaagagctgacactgtagtttgtggtgagatgtttatttttctaacagagcttataacagttaggacaaggcatttaattaatgcatcattctgtttagtagtaggtgttaatcaatatgaaattctctgttttaaaataaaaatgtaaaaatctaagaa

SEQ ID NO: 406552 - DNA, 5153 bp, Homo sapiens
  misc_feature (1)..(1): n is a, c, g, or t
  misc_feature (4)..(5): n is a, c, g, or t
  misc_feature (7)..(7): n is a, c, g, or t
  misc_feature (9)..(9): n is a, c, g, or t
ngcnngngnggcgggtgcttctagggcgctcccagagccgcctccccctgttgctggcatcccgagcttcctcccttgccagccaggacgctgccgacttgtctttgcccgctgctccgcagacggggctgcaaagctgcaactaatggtgttggcctccctgcccacctgtggaagcaactgcgctgattgatgcgccacagacttttttcccctcgacctcgccggcgtcccctcccacagatccagcatcacccagtgaatgtacattagggtggtttcccccccagcttcgggctttgtttgggtttgattgtgtttggctcttcgctaagctgatttatgcagcagaagccccaccggctggagagaaacaaaagctcttttctttgtcccggagcaggctgcggagcccttgcagagccctctctccagtcgccgccggggcccttggccgtcgaaggaggtgcttctcgcggagaccgcgggacccgccgtgccgagccgggagggccgtaggggccctgagatgccgagcggtgcccgggcccgcttacctgcaccgcttgctccgagccgcggggtccgcctgctaggcctgcggaaaacgtcctagcgacactcggcccgcgggccccgaggtgcgcccgggaggcgcgagcccgcgtccggaaggcagccaggcggcgggcgcggggcgggctgttttgcattatgtgcggctcggccctggctttttttaccgctgcatttgtctgcctgcaaaacgaccggcgaggtcccgcctcgttcctctgggcagcctgggtgttttcacttgttcttggactgggccaaggtgaagacaatagatgtgcatcttcaaatgcagcatcctgtgccaggtgccttgcgctgggtccagaatgtggatggtgtgttcaagaggatttcatttcaggtggatcaagaagtgaacgttgtgatattgtttccaatttaataagcaaaggctgctcagttgattcaatagaatacccatctgtgcatgttataatacccactgaaaatgaaattaatacccaggtgacaccaggagaagtgtctatccagctgcgtccaggagccgaagctaattttatgctgaaagttcatcctctgaagaaatatcctgtggatctttattatcttgttgatgtctcagcatcaatgcacaataatatagaaaaattaaattccgttggaaacgatttatctagaaaaatggcatttttctcccgtgactttcgtcttggatttggctcatacgttgataaaacagtttcaccatacattagcatccaccccgaaaggattcataatcaatgcagtgactacaatttagactgcatgcctccccatggatacatccatgtgctgtctttgacagagaacatcactgagtttgagaaagcagttcatagacagaagatctctggaaacatagatacaccagaaggaggttttgacgccatgcttcaggcagctgtctgtgaaagtcatatcggatggcgaaaagaggctaaaagattgctgctggtgatgacagatcagacgtctcatctcgctcttgatagcaaattggcaggcatagtggtgcccaatgacggaaactgtcatctgaaaaacaacgtctatgtcaaatcgacaaccatggaacacccctcactaggccaactttcagagaaattaatagacaacaacattaatgtcatctttgcagttcaaggaaaacaatttcattggtataaggatcttctacccctcttgccaggcaccattgctggtgaaatagaatcaaaggctgcaaacctcaataatttggtagtggaagcctatcagaagctcatttcagaagtgaaagttcaggtggaaaaccaggtacaaggcatctattttaacattaccgccatctgtccagatgggtccagaaagccaggcatggaaggatgcagaaacgtgacgagcaatgatgaagttcttttcaatgtaacagttacaatgaaaaaatgtgatgtcacaggaggaaaaaactatgcaataatcaaacctattggttttaatgaaaccgctaaaattcatatacacagaaactgcagctgtcagtgtgaggacaacagaggacctaaaggaaagtgtgtagatgaaacttttctagattccaagtgtttccagtgtgatgagaataaatgtcattttgatgaagatcagttttcttctgagagttgcaagtcacacaaggatcagcctgtttgcagtggtcgaggagtttgtgtttgtgggaaatgttcatgtcacaaaattaagcttggaaaagtgtatggaaaatactgtgaaaaggatgacttttcttgtccatatcaccatggaaatctgtgtgctgggcatggagagtgtgaagcaggcagatgccaatgcttcagtggctgggaaggtgatcgatgccagtgcccttcagcagcagcccagcactgtgtcaattcaaagggccaagtgtgcagtggaagaggcacgtgtgtgtgtggaaggtgtgagtgcaccgatcccaggagcatcggccgcttctgtgaacactgccccacctgttatacagcctgcaaggaaaactggaattgtatgcaatgccttcaccctcacaatttgtctcaggctatacttgatcagtgcaaaacctcatgtgctctcatggaacaacagcattatgtcgaccaaacttcagaatgtttctccagcccaagctacttgagaatatttttcatcattttcatagttacattcttgattgggttgcttaaagtcctgatcattagacaggtgatactacaatggaatagtaataaaattaagtcctcatcagattacagagtgtcagcctcaaaaaaggataagttgattctgcaaagtgtttgcacaagagcagtcacctaccgacgtgagaagcctgaagaaataaaaatggatatcagcaaattaaatgctcatgaaactttcaggtgcaacttctaaaaaaagatttttaaacacttaatgggaaactggaattgttaataattgctcctaaagattataattttaaaagtcacaggaggagacaaattgctcacggtcatgccagttgctggttgtacactcgaacgaagactgacaagtatcctcatcatgatgtgactcacatagctgctgactttttcagagaaaaatgtgtcttactactgtttgagactagtgtcgttgtagcactttactgtaatatataacttatttagatcagcatagaatgtagatcctctgaagagcactgattacactttacaggtacctgttatccctacgcttcccagagagaacaatgctgtgagagagtttagcattgtgtcactacaagggtacagtaatccctgcactggacatgtgaggaaaaaaataatctggcaagtatattctaaggttgccaaacacttcaacagttggtggttgaatagacaagaacagctagatgaataaatgattcgtgtttcactctttcaagaggtgaacagatacaaccttaatcttaaaagattattgctttttaaagtgtgtagttttatgcatgtgtgtttatggtttgcttatttttgcaagatggatactaattccagcattctctcctctttgcctttatgttttgttttcttttttacaggataagtttatgtatgtcacagatgactggattaattaagtgctaagttactactgccataaaaaactaataatacaatgtcactttatcagaatactagttttaaaagctgaatgttaataggggacactgtaaagtatcatcaaaacctgaatagcttcattgtgcacaagtgtggagttttgtatcctcttacctggtaaactgaagggattgtttggccatttcatttatcttatcattaattcacaagatagttagaaattctgcctcaagcaaagtaccacattttgaatgttttcttagattttgattgcaagtagatatcagcattttttaaatgaaaagctatattatcttctcccttcaaggcagcctaaggatgttctttcccagaatcactccaacccttcttgccagaattcataaaagtacaaaattggagaatagatgatatcttagaaataagctttttttttttttttttttttttttgagacggagtttcactcttgtcacccaggctgaagtgcaatggcgcaattagggttcactgcaacctctgcctcccgggttcaagcagttctcctgcctcagcctcctgagtagctgggattacaggcatccaccaccgtgcccagctaatttttgtatttttagtagagacggggttttgccatgttggacaggttgatctcaaactcctgacctcaggtgatctaccctcctcggcctcccagagtgttgggattacaggcatgagccaccatgccaggctgctaattctcctttttagtgagttagggaactgagcctcagaaaacttaaacgatttctcagaaaacactcaagtgataaagtggccacattggaaaggagtttttatcttctcattgtcaggccagtgttcattgcacaatatcatgctacctcttgaatctttaaaatattcaattggcaaatgtttttcaatgtgatttactcatgtcttaagtgtatgaggaaagttcaaagcaaaatagaaaggaataattcaaactgaattgtccataatcagcttccagtctttcatgctaatcagcttcttaagagactgaagtatggcatacctacaggggaattccttcgcaccatagcctgtatgaacagtgttccctggagttctccagtgctcagcttgagaccttgatacacgggccatgagccctgtcttccccaatggaaatttatttacacttaccttatccctatggacttagtctgattttattggctaggagtctaacagtcctgtgtggatatacagttttgcccatgacaacaaaggaatctatccgaaatatctttttttttataataaacttccaagatttgctgtcttccagcactttgggaggccgaggtggagtgatcatcagcctgggcaacacggcaagaccctatctctatt

SEQ ID NO: 406553 - DNA, 3761 bp, Homo sapiens
  misc_feature (1822)..(1822): n is a, c, g, or t
cccaggctgcaacggaggcagagccaacgcctcgcgggcttccacgtacgcactccaacgcgtgttcccggagaagaacgcatccgggtcacgggagccggtgtctcaggctccgccccttcaccccccgaaaggctaatccccacttccgaccctctcaggccttttccgcttctcttttacctccccaggtccgcccgtctgcgcccctcacaggaagccggagggtcgctctgatcccgaatctcccacaggcgtgaacctgctctgctgtgtatctttgcggggtggcctgcgctgaggcctgccgcgcgcggtgagtccgcgcagacctgaccctgcgtctcgcagctcggttgaggccgccgccgccttctcgggatgccgcggccggggtccgcgcagcgctgggcggccgtcgcgggccgttgggggtgcaggctgctcgcactgctgctactggtgcctggacccggcggcgcctctgagatcaccttcgagcttcctgacaacgccaagcagtgcttctacgaggacatcgctcagggcaccaagtgcaccctggagttccaggtgattactggtggtcactatgatgtagattgtcgattagaagatcctgatggtaaagtgttatacaaagagatgaagaaacagtatgatagttttaccttcacagcctccaaaaatgggacatacaaattttgcttcagcaatgaattttctactttcacacataaaactgtatattttgattttcaagttggagaagacccacctttgtttcctagtgagaaccgagtcagtgctcttacccagatggaatctgcctgtgtttcaattcacgaagctctgaagtctgtcatcgattatcagactcatttccgtttaagagaagctcaaggccgaagccgagcagaggatctaaatacaagagtggcctattggtcagtaggagaagccctcattcttctggtggttagcatagggcaggtatttcttttgaaaagctttttctcagataaaagaaccaccacaactcgtgttggatcataactacgttttgagaattgatgcaccattgccactgtaatattgctgtcctctaattaattttaggtactgaagaacttaatattggcaacatttttaaatccttactcatacacttgttgggagggatgtacaatgcatattcccaaactgtggaaaggacacctttttttatttgtaaaggtggaaaaactttggaactcattttgggctattcatgttaaatattcaacaccaatgatctactctgttcgcagttgtttatatctactcttcgcacactaaactttggtattttgattccttttaaccatttaagactacttttcttataggtagttgatattttaaaaactttagatttaatgtctacatgtgttagggaggaagaaaattgccttttaattgttaataagaaaaccaaatgtgatgaactgtagcccaagccctattctgcactgttcagttttatggaggaaaaataaatctaccataggaatgttagttaatattgatatatcatggtaaaattgatttctcactagcttagaaaatgtcagacttttgtttttggggtttataatttaaaccagctatgctattttttcataaaggcatttgtagtacacagaaaacagtagtttcagtagtgtaaaagagtttatacaggccttaaatatcagactttgtaacaggtagaaatattacagaataatttaagacactacaatgggggcaaatgaaataggaaaatttttagtgagttacncgtactcattacattttcagtgcttttacaaggaaaaaaggtgatatgtttaattttaaaattttaattggctagctcttgcccttatatgactttaatgtctgtgagtcattcccagcttaaattaacaattgttagtattagtctcacacataagtgccatacattttatcctcatggatgtgatgcactgaaaagttagttgctctccttttttcttttttttgtcgtgcatattttatttctgtagtttctggttagctaccctaaagtgatttaaaaatttagaatgctttgtgtttcctatttggtaatcttcattgacttttctttagttaatgagtattaaatagtgcatattctgtagactatagggtttacattgtgttgcatcttataacttgtatagattgagctgattgaaataagattttgttccaagtattatctgatagaatacaagatgattcaaaattatatagatatttaaagcttttctgctgtttttttttttttttaattgcaactgcttttctgccgtgcctctcttccctacccaaaagtgatgagttctgaacaagacaagactgtcatattgtagagactttggtatgtgataccatagaatactgattggatagccatcctagtcacttaccaatactgactagaagttaactcttaattctaagctatcttaaaatgcatatatatacttcttgcatggaagagcaaaacaaattcaagttgtcatgcctgataatttcagatgccaccgtatagcaaagggtgaacatgttttcaaccctttaactttttacggtgtttgaagaccagctactccttaatatttatcaatggattaagaagtttaagattttgcagatttatcaatttgggtttttgtactgaagttgtcttgcggctttgcaagtgtccctttatatttaaatttgaaagttgtaagcactgatgttaatgtgattgatcagcatgggcatatgtaaaatgtccttttctggttgcctctctatgctattgtgttcagatacttacaccataattaaacagtaagttatagacttgctgagtttggcatagatagtgcactcatttaatctgtgcctctcaaaacttcagaatattagcatattaccacaaataatttttggtgaaactattgagatattaaaatttttgaaatcactactgttacctgttatagaaaatagtgttggcttagtctagtctctgtgtaactggttacattttgatggttgtctatactcaactggatatgtgtatgtaaattagaaaatacatacctatccagacataaatgctaagtaacatttttttcttcctccaactacataatttgtagctcatcatttttccttaatcctttcctaacttgttgcagcagtttgaatttcccagatatttatgtttgaacataatggctcagaatacatatttgaacatcatagttgtatatatttttaaagtagaataaataatggaaagcaacttgatatacaagtttatactaaaatttcaactgtgtgaagatacattttaaggcattactttgctaataatctacacattcttttttctattaaataaacaaatggtttgtggttcacagctttcatccaagcttggtgataatcaattttgaaaatacagtggactgaaaagcaaatttattctttcgaagatttcatttaaatctctgtactatgcatttttgtttcagtttgtaaatgtgtaacatttatagttaaataggacaaagcaggccctatgactattgttttcaaaaaattaatatataaataattcagaggggtttttcatttacttttgaaaagaaatttctttaacaggattgcacctatcaatttcttgtagaataaaaaaaaatctttcaaca

SEQ ID NO: 406554 - DNA, 3666 bp, Homo sapiens
  misc_feature (1727)..(1727): n is a, c, g, or t
ccgcgcaacagaagttactaggtgcgtgctcggtgtttaatttcgtacgagttccgaccctctcaggccttttccgcttctcttttacctccccaggtccgcccgtctgcgcccctcacaggaagccggagggtcgctctgatcccgaatctcccacaggcgtgaacctgctctgctgtgtatctttgcggggtggcctgcgctgaggcctgccgcgcgcggtgagtccgcgcagacctgaccctgcgtctcgcagctcggttgaggccgccgccgccttctcgggatgccgcggccggggtccgcgcagcgctgggcggccgtcgcgggccgttgggggtgcaggctgctcgcactgctgctactggtgcctggacccggcggcgcctctgagatcaccttcgagcttcctgacaacgccaagcagtgcttctacgaggacatcgctcagggcaccaagtgcaccctggagttccaggtgattactggtggtcactatgatgtagattgtcgattagaagatcctgatggtaaagtgttatacaaagagatgaagaaacagtatgatagttttaccttcacagcctccaaaaatgggacatacaaattttgcttcagcaatgaattttctactttcacacataaaactgtatattttgattttcaagttggagaagacccacctttgtttcctagtgagaaccgagtcagtgctcttacccagatggaatctgcctgtgtttcaattcacgaagctctgaagtctgtcatcgattatcagactcatttccgtttaagagaagctcaaggccgaagccgagcagaggatctaaatacaagagtggcctattggtcagtaggagaagccctcattcttctggtggttagcatagggcaggtatttcttttgaaaagctttttctcagataaaagaaccaccacaactcgtgttggatcataactacgttttgagaattgatgcaccattgccactgtaatattgctgtcctctaattaattttaggtactgaagaacttaatattggcaacatttttaaatccttactcatacacttgttgggagggatgtacaatgcatattcccaaactgtggaaaggacacctttttttatttgtaaaggtggaaaaactttggaactcattttgggctattcatgttaaatattcaacaccaatgatctactctgttcgcagttgtttatatctactcttcgcacactaaactttggtattttgattccttttaaccatttaagactacttttcttataggtagttgatattttaaaaactttagatttaatgtctacatgtgttagggaggaagaaaattgccttttaattgttaataagaaaaccaaatgtgatgaactgtagcccaagccctattctgcactgttcagttttatggaggaaaaataaatctaccataggaatgttagttaatattgatatatcatggtaaaattgatttctcactagcttagaaaatgtcagacttttgtttttggggtttataatttaaaccagctatgctattttttcataaaggcatttgtagtacacagaaaacagtagtttcagtagtgtaaaagagtttatacaggccttaaatatcagactttgtaacaggtagaaatattacagaataatttaagacactacaatgggggcaaatgaaataggaaaatttttagtgagttacncgtactcattacattttcagtgcttttacaaggaaaaaaggtgatatgtttaattttaaaattttaattggctagctcttgcccttatatgactttaatgtctgtgagtcattcccagcttaaattaacaattgttagtattagtctcacacataagtgccatacattttatcctcatggatgtgatgcactgaaaagttagttgctctccttttttcttttttttgtcgtgcatattttatttctgtagtttctggttagctaccctaaagtgatttaaaaatttagaatgctttgtgtttcctatttggtaatcttcattgacttttctttagttaatgagtattaaatagtgcatattctgtagactatagggtttacattgtgttgcatcttataacttgtatagattgagctgattgaaataagattttgttccaagtattatctgatagaatacaagatgattcaaaattatatagatatttaaagcttttctgctgtttttttttttttttaattgcaactgcttttctgccgtgcctctcttccctacccaaaagtgatgagttctgaacaagacaagactgtcatattgtagagactttggtatgtgataccatagaatactgattggatagccatcctagtcacttaccaatactgactagaagttaactcttaattctaagctatcttaaaatgcatatatatacttcttgcatggaagagcaaaacaaattcaagttgtcatgcctgataatttcagatgccaccgtatagcaaagggtgaacatgttttcaaccctttaactttttacggtgtttgaagaccagctactccttaatatttatcaatggattaagaagtttaagattttgcagatttatcaatttgggtttttgtactgaagttgtcttgcggctttgcaagtgtccctttatatttaaatttgaaagttgtaagcactgatgttaatgtgattgatcagcatgggcatatgtaaaatgtccttttctggttgcctctctatgctattgtgttcagatacttacaccataattaaacagtaagttatagacttgctgagtttggcatagatagtgcactcatttaatctgtgcctctcaaaacttcagaatattagcatattaccacaaataatttttggtgaaactattgagatattaaaatttttgaaatcactactgttacctgttatagaaaatagtgttggcttagtctagtctctgtgtaactggttacattttgatggttgtctatactcaactggatatgtgtatgtaaattagaaaatacatacctatccagacataaatgctaagtaacatttttttcttcctccaactacataatttgtagctcatcatttttccttaatcctttcctaacttgttgcagcagtttgaatttcccagatatttatgtttgaacataatggctcagaatacatatttgaacatcatagttgtatatatttttaaagtagaataaataatggaaagcaacttgatatacaagtttatactaaaatttcaactgtgtgaagatacattttaaggcattactttgctaataatctacacattcttttttctattaaataaacaaatggtttgtggttcacagctttcatccaagcttggtgataatcaattttgaaaatacagtggactgaaaagcaaatttattctttcgaagatttcatttaaatctctgtactatgcatttttgtttcagtttgtaaatgtgtaacatttatagttaaataggacaaagcaggccctatgactattgttttcaaaaaattaatatataaataattcagaggggtttttcatttacttttgaaaagaaatttctttaacaggattgcacctatcaatttcttgtagaataaaaaaaaatctttcaaca

SEQ ID NO: 406555 - DNA, 3707 bp, Homo sapiens
  misc_feature (1768)..(1768): n is a, c, g, or t
cccaggctgcaacggaggcagagccaacgcctcgcgggcttccacgtacgcactccaacgcgtgttcccggagaagaacgcatccgggtcacgggagccggtgtctcaggctccgccccttcaccccccgaaaggctaatccccacttccgaccctctcaggccttttccgcttctcttttacctccccaggtccgcccgtctgcgcccctcacaggaagccggagggtcgctctgatcccgaatctcccacaggcgtgaacctgctctgctgtgtatctttgcggggtggcctgcgctgaggcctgccgcgcgcggtgagtccgcgcagacctgaccctgcgtctcgcagctcggttgaggccgccgccgccttctcgggatgccgcggccggggtccgcgcagcgctgggcggccgtcgcgggccgttgggggtgcaggctgctcgcactgctgctactggtgcctggacccggcggcgcctctgagatcaccttcgagcttcctgacaacgccaagcagtgcttctacgaggacatcgctcagggcaccaagtgcaccctggagttccaggtgattactggtggtcactatgatgtagattgtcgattagaagatcctgatggtaaagtgttatacaaagagatgaagaaacagtatgatagttttaccttcacagcctccaaaaatgggacatacaaattttgcttcagcaatgaattttctactttcacacataaaactgtatattttgattttcaagttggagaagacccacctttgtttcctagtgagaaccgagtcagtgctcttacccagatggaatctgcctgtgtttcaattcacgaagctctgaagtctgtcatcgattatcagactcatttccgtttaagagaagctcaaggccgaagccgagcagaggatctaaatacaagagtggcctattggtcagtaggagaagccctcattcttctggtggttagcatagggcaggtatttcttttgaaaagctttttctcagataccattgccactgtaatattgctgtcctctaattaattttaggtactgaagaacttaatattggcaacatttttaaatccttactcatacacttgttgggagggatgtacaatgcatattcccaaactgtggaaaggacacctttttttatttgtaaaggtggaaaaactttggaactcattttgggctattcatgttaaatattcaacaccaatgatctactctgttcgcagttgtttatatctactcttcgcacactaaactttggtattttgattccttttaaccatttaagactacttttcttataggtagttgatattttaaaaactttagatttaatgtctacatgtgttagggaggaagaaaattgccttttaattgttaataagaaaaccaaatgtgatgaactgtagcccaagccctattctgcactgttcagttttatggaggaaaaataaatctaccataggaatgttagttaatattgatatatcatggtaaaattgatttctcactagcttagaaaatgtcagacttttgtttttggggtttataatttaaaccagctatgctattttttcataaaggcatttgtagtacacagaaaacagtagtttcagtagtgtaaaagagtttatacaggccttaaatatcagactttgtaacaggtagaaatattacagaataatttaagacactacaatgggggcaaatgaaataggaaaatttttagtgagttacncgtactcattacattttcagtgcttttacaaggaaaaaaggtgatatgtttaattttaaaattttaattggctagctcttgcccttatatgactttaatgtctgtgagtcattcccagcttaaattaacaattgttagtattagtctcacacataagtgccatacattttatcctcatggatgtgatgcactgaaaagttagttgctctccttttttcttttttttgtcgtgcatattttatttctgtagtttctggttagctaccctaaagtgatttaaaaatttagaatgctttgtgtttcctatttggtaatcttcattgacttttctttagttaatgagtattaaatagtgcatattctgtagactatagggtttacattgtgttgcatcttataacttgtatagattgagctgattgaaataagattttgttccaagtattatctgatagaatacaagatgattcaaaattatatagatatttaaagcttttctgctgtttttttttttttttaattgcaactgcttttctgccgtgcctctcttccctacccaaaagtgatgagttctgaacaagacaagactgtcatattgtagagactttggtatgtgataccatagaatactgattggatagccatcctagtcacttaccaatactgactagaagttaactcttaattctaagctatcttaaaatgcatatatatacttcttgcatggaagagcaaaacaaattcaagttgtcatgcctgataatttcagatgccaccgtatagcaaagggtgaacatgttttcaaccctttaactttttacggtgtttgaagaccagctactccttaatatttatcaatggattaagaagtttaagattttgcagatttatcaatttgggtttttgtactgaagttgtcttgcggctttgcaagtgtccctttatatttaaatttgaaagttgtaagcactgatgttaatgtgattgatcagcatgggcatatgtaaaatgtccttttctggttgcctctctatgctattgtgttcagatacttacaccataattaaacagtaagttatagacttgctgagtttggcatagatagtgcactcatttaatctgtgcctctcaaaacttcagaatattagcatattaccacaaataatttttggtgaaactattgagatattaaaatttttgaaatcactactgttacctgttatagaaaatagtgttggcttagtctagtctctgtgtaactggttacattttgatggttgtctatactcaactggatatgtgtatgtaaattagaaaatacatacctatccagacataaatgctaagtaacatttttttcttcctccaactacataatttgtagctcatcatttttccttaatcctttcctaacttgttgcagcagtttgaatttcccagatatttatgtttgaacataatggctcagaatacatatttgaacatcatagttgtatatatttttaaagtagaataaataatggaaagcaacttgatatacaagtttatactaaaatttcaactgtgtgaagatacattttaaggcattactttgctaataatctacacattcttttttctattaaataaacaaatggtttgtggttcacagctttcatccaagcttggtgataatcaattttgaaaatacagtggactgaaaagcaaatttattctttcgaagatttcatttaaatctctgtactatgcatttttgtttcagtttgtaaatgtgtaacatttatagttaaataggacaaagcaggccctatgactattgttttcaaaaaattaatatataaataattcagaggggtttttcatttacttttgaaaagaaatttctttaacaggattgcacctatcaatttcttgtagaataaaaaaaaatctttcaaca

SEQ ID NO: 406556 - DNA, 3924 bp, Homo sapiens
  misc_feature (1985)..(1985): n is a, c, g, or t
cccaggctgcaacggaggcagagccaacgcctcgcgggcttccacgtacgcactccaacgcgtgttcccggagaagaacgcatccgggtcacgggagccggtgtctcaggctccgccccttcaccccccgaaaggctaatccccacttccgaccctctcaggccttttccgcttctcttttacctccccaggtccgcccgtctgcgcccctcacaggaagccggagggtcgctctgatcccgaatctcccacaggcgtgaacctgctctgctgtgtatcttttgctgtgttgtgtgcctgctgcatgatgtgcctgcctgctgctgctgtgctgatgtcctgctgcatgcacctgcaccctgctgtctacgcatgctctgtgttgatgtgcctgcctgcctgcgcttctctgtgtgattgcctgctgggcctggtgtgtcctgctgcatgctgcttgtgtgctgtgacctgtactgctgtgtgccttgttgtgtgtgtgttgcatgtgcttgcatctgcacattgactatgctacttgtgatgccttgtgaccctgtgctggctgcctacttgagatcactcttctggatggcattccttgacaaactagccaatgcatgttgctatctacagagtgaccatactggctcatgtggtcaaccaaagatgcagccctaggacgttcccatgtgtgacttaccttgtgttgtgtcactattgactgtacgactttgtactgagtatatgaacgatccttgagtgtgtacacatgtgttactacaaatgatgagtgcatgacaccatgtattgataagtataacctatacaacatgccttcacagcctccaaaaatgggacatacaaattttgcttcagcaatgaattttctactttcacacataaaactgtatattttgattttcaagttggagaagacccacctttgtttcctagtgagaaccgagtcagtgctcttacccagatggaatctgcctgtgtttcaattcacgaagctctgaagtctgtcatcgattatcagactcatttccgtttaagagaagctcaaggccgaagccgagcagaggatctaaatacaagagtggcctattggtcagtaggagaagccctcattcttctggtggttagcatagggcaggtatttcttttgaaaagctttttctcagataaaagaaccaccacaactcgtgttggatcataactacgttttgagaattgatgcaccattgccactgtaatattgctgtcctctaattaattttaggtactgaagaacttaatattggcaacatttttaaatccttactcatacacttgttgggagggatgtacaatgcatattcccaaactgtggaaaggacacctttttttatttgtaaaggtggaaaaactttggaactcattttgggctattcatgttaaatattcaacaccaatgatctactctgttcgcagttgtttatatctactcttcgcacactaaactttggtattttgattccttttaaccatttaagactacttttcttataggtagttgatattttaaaaactttagatttaatgtctacatgtgttagggaggaagaaaattgccttttaattgttaataagaaaaccaaatgtgatgaactgtagcccaagccctattctgcactgttcagttttatggaggaaaaataaatctaccataggaatgttagttaatattgatatatcatggtaaaattgatttctcactagcttagaaaatgtcagacttttgtttttggggtttataatttaaaccagctatgctattttttcataaaggcatttgtagtacacagaaaacagtagtttcagtagtgtaaaagagtttatacaggccttaaatatcagactttgtaacaggtagaaatattacagaataatttaagacactacaatgggggcaaatgaaataggaaaatttttagtgagttacncgtactcattacattttcagtgcttttacaaggaaaaaaggtgatatgtttaattttaaaattttaattggctagctcttgcccttatatgactttaatgtctgtgagtcattcccagcttaaattaacaattgttagtattagtctcacacataagtgccatacattttatcctcatggatgtgatgcactgaaaagttagttgctctccttttttcttttttttgtcgtgcatattttatttctgtagtttctggttagctaccctaaagtgatttaaaaatttagaatgctttgtgtttcctatttggtaatcttcattgacttttctttagttaatgagtattaaatagtgcatattctgtagactatagggtttacattgtgttgcatcttataacttgtatagattgagctgattgaaataagattttgttccaagtattatctgatagaatacaagatgattcaaaattatatagatatttaaagcttttctgctgtttttttttttttttaattgcaactgcttttctgccgtgcctctcttccctacccaaaagtgatgagttctgaacaagacaagactgtcatattgtagagactttggtatgtgataccatagaatactgattggatagccatcctagtcacttaccaatactgactagaagttaactcttaattctaagctatcttaaaatgcatatatatacttcttgcatggaagagcaaaacaaattcaagttgtcatgcctgataatttcagatgccaccgtatagcaaagggtgaacatgttttcaaccctttaactttttacggtgtttgaagaccagctactccttaatatttatcaatggattaagaagtttaagattttgcagatttatcaatttgggtttttgtactgaagttgtcttgcggctttgcaagtgtccctttatatttaaatttgaaagttgtaagcactgatgttaatgtgattgatcagcatgggcatatgtaaaatgtccttttctggttgcctctctatgctattgtgttcagatacttacaccataattaaacagtaagttatagacttgctgagtttggcatagatagtgcactcatttaatctgtgcctctcaaaacttcagaatattagcatattaccacaaataatttttggtgaaactattgagatattaaaatttttgaaatcactactgttacctgttatagaaaatagtgttggcttagtctagtctctgtgtaactggttacattttgatggttgtctatactcaactggatatgtgtatgtaaattagaaaatacatacctatccagacataaatgctaagtaacatttttttcttcctccaactacataatttgtagctcatcatttttccttaatcctttcctaacttgttgcagcagtttgaatttcccagatatttatgtttgaacataatggctcagaatacatatttgaacatcatagttgtatatatttttaaagtagaataaataatggaaagcaacttgatatacaagtttatactaaaatttcaactgtgtgaagatacattttaaggcattactttgctaataatctacacattcttttttctattaaataaacaaatggtttgtggttcacagctttcatccaagcttggtgataatcaattttgaaaatacagtggactgaaaagcaaatttattctttcgaagatttcatttaaatctctgtactatgcatttttgtttcagtttgtaaatgtgtaacatttatagttaaataggacaaagcaggccctatgactattgttttcaaaaaattaatatataaataattcagaggggtttttcatttacttttgaaaagaaatttctttaacaggattgcacctatcaatttcttgtagaataaaaaaaaatctttcaaca

SEQ ID NO: 406557 - DNA, 2155 bp, Homo sapiens
cccaggctgcaacggaggcagagccaacgcctcgcgggcttccacgtacgcactccaacgcgtgttcccggagaagaacgcatccgggtcacgggagccggtgtctcaggctccgccccttcaccccccgaaaggctaatccccacttccgaccctctcaggccttttccgcttctcttttacctccccaggtccgcccgtctgcgcccctcacaggaagccggagggtcgctctgatcccgaatctcccacaggcgtgaacctgctctgctgtgtatctttgcggggtggcctgcgctgaggcctgccgcgcgcggtgagtccgcgcagacctgaccctgcgtctcgcagctcggttgaggccgccgccgccttctcgggatgccgcggccggggtccgcgcagcgctgggcggccgtcgcgggccgttgggggtgcaggctgctcgcactgctgctactggtgcctggacccggcggcgcctctgagatcaccttcgagcttcctgacaacgccaagcagtgcttctacgaggacatcgctcagggcaccaagtgcaccctggagttccaggtgattactggtggtcactatgatgtagattgtcgattagaagatcctgatggtaaagtgttatacaaagagatgaagaaacagtatgatagttttacaatacaagatgattcaaaattatatagatatttaaagcttttctgctgtttttttttttttttaattgcaactgcttttctgccgtgcctctcttccctacccaaaagtgatgagttctgaacaagacaagactgtcatattgtagagactttggtatgtgataccatagaatactgattggatagccatcctagtcacttaccaatactgactagaagttaactcttaattctaagctatcttaaaatgcatatatatacttcttgcatggaagagcaaaacaaattcaagttgtcatgcctgataatttcagatgccaccgtatagcaaagggtgaacatgttttcaaccctttaactttttacggtgtttgaagaccagctactccttaatatttatcaatggattaagaagtttaagattttgcagatttatcaatttgggtttttgtactgaagttgtcttgcggctttgcaagtgtccctttatatttaaatttgaaagttgtaagcactgatgttaatgtgattgatcagcatgggcatatgtaaaatgtccttttctggttgcctctctatgctattgtgttcagatacttacaccataattaaacagtaagttatagacttgctgagtttggcatagatagtgcactcatttaatctgtgcctctcaaaacttcagaatattagcatattaccacaaataatttttggtgaaactattgagatattaaaatttttgaaatcactactgttacctgttatagaaaatagtgttggcttagtctagtctctgtgtaactggttacattttgatggttgtctatactcaactggatatgtgtatgtaaattagaaaatacatacctatccagacataaatgctaagtaacatttttttcttcctccaactacataatttgtagctcatcatttttccttaatcctttcctaacttgttgcagcagtttgaatttcccagatatttatgtttgaacataatggctcagaatacatatttgaacatcatagttgtatatatttttaaagtagaataaataatggaaagcaacttgatatacaagtttatactaaaatttcaactgtgtgaagatacattttaaggcattactttgctaataatctacacattcttttttctattaaataaacaaatggtttgtggttcacagctttcatccaagcttggtgataatcaattttgaaaatacagtggactgaaaagcaaatttattctttcgaagatttcatttaaatctctgtactatgcatttttgtttcagtttgtaaatgtgtaacatttatagttaaataggacaaagcaggccctatgactattgttttcaaaaaattaatatataaataattcagaggggtttttcatttacttttgaaaagaaatttctttaacaggattgcacctatcaatttcttgtagaataaaaaaaaatctttcaaca

SEQ ID NO: 406558 - DNA, 1880 bp, Homo sapiens
gcactgagccgccgccgcttccggaagcgcagacccgctggtgccacgtttatccccttacatcctcctaggacccggtcggtagtcgtcgccccagcccgccgggggcaagcgcccaggtccgcggccctcgagacgggaccgagagcatcatgggcagcactgtcccgcgctccgcctccgtgctgcttctgctgctgctcctgcgccgggccgagcagccctgcggggccgagatcaccttcgagcttcctgacaacgccaagcagtgcttctacgaggacatcgctcagggcaccaagtgcaccctggagttccaggtgattactggtggtcactatgatgtagattgtcgattagaagatcctgatggtaaagtgttatacaaagagatgaagaaacagtatgatagttttaccttcacagcctccaaaaatgggacatacaaattttgcttcagcaatgaattttctactttcacacataaaactgtatattttgattttcaagttggagaagacccacctttgtttcctagtgagaaccgagtcagtgctcttacccagatggaatctgcctgtgtttcaattcacgaagctctgaagtctgtcatcgattatcagactcatttccgtttaagagaagctcaaggccgaagccgagcagaggatctaaatacaagagtggcctattggtcagtaggagaagccctcattcttctggtggttagcatagggcaggtatttcttttgaaaagctttttctcagataaaagaaccaccacaactcgtgttggatcataactacgttttgagaattgatgcaccattgccactgtaatattgctgtcctctaattaattttaggtactgaagaacttaatattggcaacatttttaaatccttactcatacacttgttgggagggatgtacaatgcatattcccaaactgtggaaaggacacctttttttatttgtaaaggtggaaaaactttggaactcattttgggctattcatgttaaatattcaacaccaatgatctactctgttcgcagttgtttatatctactcttcgcacactaaactttggtattttgattccttttaaccatttaagactacttttcttataggtagttgatattttaaaaactttagatttaatgtctacatgtgttagggaggaagaaaattgccttttaattgttaataagaaaaccaaatgtgatgaactgtagcccaagccctattctgcactgttcagttttatggaggaaaaataaatctaccataggaatgttagttaatattgataatcaattttgaaaatacagtggactgaaaagcaaatttattctttcgaagatttcatttaaatctctgtactatgcatttttgtttcagtttgtaaatgtgtaacatttatagttaaataggacaaagcaggccctatgactattgttttcaaaaaattaatatataaataattcagaggggtttttcatttacttttgaaaagaaatttctttaacaggattgcacctatcaatttcttgtagaataaaaaaaaatctttcaacaaactgactttacttgtttctgtcaggatttaaatctttctaaagctccttataaacttaaagcctagagtacagttctgtaatgagagtgattatttatttggtattttattaaaatatctgagggactgtccaagaaagaaggtgaaagagaaataccacgtctgtactgcctaatttgtaaccttctctttgcattccttactgaaagtttgtgtaggtgaaaagcagttaaatcatcagttgctctaaagaggtcttaatttttaagtaaattacctttagtttgtatattacc

SEQ ID NO: 406559 - DNA, 1237 bp, Homo sapiens
cccaggctgcaacggaggcagagccaacgcctcgcgggcttccacgtacgcactccaacgcgtgttcccggagaagaacgcatccgggtcacgggagccggtgtctcaggctccgccccttcaccccccgaaaggctaatccccacttccgaccctctcaggccttttccgcttctcttttacctccccaggtccgcccgtctgcgcccctcacaggaagccggagggtcgctctgatcccgaatctcccacaggcgtgaacctgctctgctgtgtatctttgcggggtggcctgcgctgaggcctgccgcgcgcggtgagtccgcgcagacctgaccctgcgtctcgcagctcggttgaggccgccgccgccttctcgggatgccgcggccggggtccgcgcagcgctgggcggccgtcgcgggccgttgggggtgcaggctgctcgcactgctgctactggtgcctggacccggcggcgcctctgagatcaccttcgagcttcctgacaacgccaagcagtgcttctacgaggacatcgctcagggcaccaagtgcaccctggagttccaggtgattactggtggtcactatgatgtagattgtcgattagaagatcctgatggtaaagtgttatacaaagagatgaagaaacagtatgatagttttaccttcacagcctccaaaaatgggacatacaaattttgcttcagcaatgaattttctactttcacacataaaactgtatattttgattttcaagttggagaagacccacctttgtttcctagtgagaaccgagtcagtgctcttacccaggtaaataaaaaaatcagcaatataatgttggtatatttaaaaggaggaaaaaagcataatttaatatcatgcactaactgatgagcatggaattttgagactgacagtctttaaaatctatcttaattcttacatgtaggcatttcacagagaacttcagacttttgtagtgaaaaataatgttgaaagattttatgaacttttaattgtaaagagaaagaagcattaaaataaggaggaagatcactaaggtagaaacatcagtggtaaaagaaggttgggaaggctgagcagtgttccaatcttctgaagcattttctttaatccctgaaggaatgttgctgtcatactcaggaggctggtgtaggttacacgctgtatccagtttcgttcactgaatgttctaacagtgtatgaa

SEQ ID NO: 406560 - DNA, 4058 bp, Homo sapiens
  misc_feature (1822)..(1822): n is a, c, g, or t
cccaggctgcaacggaggcagagccaacgcctcgcgggcttccacgtacgcactccaacgcgtgttcccggagaagaacgcatccgggtcacgggagccggtgtctcaggctccgccccttcaccccccgaaaggctaatccccacttccgaccctctcaggccttttccgcttctcttttacctccccaggtccgcccgtctgcgcccctcacaggaagccggagggtcgctctgatcccgaatctcccacaggcgtgaacctgctctgctgtgtatctttgcggggtggcctgcgctgaggcctgccgcgcgcggtgagtccgcgcagacctgaccctgcgtctcgcagctcggttgaggccgccgccgccttctcgggatgccgcggccggggtccgcgcagcgctgggcggccgtcgcgggccgttgggggtgcaggctgctcgcactgctgctactggtgcctggacccggcggcgcctctgagatcaccttcgagcttcctgacaacgccaagcagtgcttctacgaggacatcgctcagggcaccaagtgcaccctggagttccaggtgattactggtggtcactatgatgtagattgtcgattagaagatcctgatggtaaagtgttatacaaagagatgaagaaacagtatgatagttttaccttcacagcctccaaaaatgggacatacaaattttgcttcagcaatgaattttctactttcacacataaaactgtatattttgattttcaagttggagaagacccacctttgtttcctagtgagaaccgagtcagtgctcttacccagatggaatctgcctgtgtttcaattcacgaagctctgaagtctgtcatcgattatcagactcatttccgtttaagagaagctcaaggccgaagccgagcagaggatctaaatacaagagtggcctattggtcagtaggagaagccctcattcttctggtggttagcatagggcaggtatttcttttgaaaagctttttctcagataaaagaaccaccacaactcgtgttggatcataactacgttttgagaattgatgcaccattgccactgtaatattgctgtcctctaattaattttaggtactgaagaacttaatattggcaacatttttaaatccttactcatacacttgttgggagggatgtacaatgcatattcccaaactgtggaaaggacacctttttttatttgtaaaggtggaaaaactttggaactcattttgggctattcatgttaaatattcaacaccaatgatctactctgttcgcagttgtttatatctactcttcgcacactaaactttggtattttgattccttttaaccatttaagactacttttcttataggtagttgatattttaaaaactttagatttaatgtctacatgtgttagggaggaagaaaattgccttttaattgttaataagaaaaccaaatgtgatgaactgtagcccaagccctattctgcactgttcagttttatggaggaaaaataaatctaccataggaatgttagttaatattgatatatcatggtaaaattgatttctcactagcttagaaaatgtcagacttttgtttttggggtttataatttaaaccagctatgctattttttcataaaggcatttgtagtacacagaaaacagtagtttcagtagtgtaaaagagtttatacaggccttaaatatcagactttgtaacaggtagaaatattacagaataatttaagacactacaatgggggcaaatgaaataggaaaatttttagtgagttacncgtactcattacattttcagtgcttttacaaggaaaaaaggtgatatgtttaattttaaaattttaattggctagctcttgcccttatatgactttaatgtctgtgagtcattcccagcttaaattaacaattgttagtattagtctcacacataagtgccatacattttatcctcatggatgtgatgcactgaaaagttagttgctctccttttttcttttttttgtcgtgcatattttatttctgtagtttctggttagctaccctaaagtgatttaaaaatttagaatgctttgtgtttcctatttggtaatcttcattgacttttctttagttaatgagtattaaatagtgcatattctgtagactatagggtttacattgtgttgcatcttataacttgtatagattgagctgattgaaataagattttgttccaagtattatctgatagaatacaagatgattcaaaattatatagatatttaaagcttttctgctgtttttttttttttttaattgcaactgcttttctgccgtgcctctcttccctacccaaaagtgatgagttctgaacaagacaagactgtcatattgtagagactttggtatgtgataccatagaatactgattggatagccatcctagtcacttaccaatactgactagaagttaactcttaattctaagctatcttaaaatgcatatatatacttcttgcatggaagagcaaaacaaattcaagttgtcatgcctgataatttcagatgccaccgtatagcaaagggtgaacatgttttcaaccctttaactttttacggtgtttgaagaccagctactccttaatatttatcaatggattaagaagtttaagattttgcagatttatcaatttgggtttttgtactgaagttgtcttgcggctttgcaagtgtccctttatatttaaatttgaaagttgtaagcactgatgttaatgtgattgatcagcatgggcatatgtaaaatgtccttttctggttgcctctctatgctattgtgttcagatacttacaccataattaaacagtaagttatagacttgctgagtttggcatagatagtgcactcatttaatctgtgcctctcaaaacttcagaatattagcatattaccacaaataatttttggtgaaactattgagatattaaaatttttgaaatcactactgttacctgttatagaaaatagtgttggcttagtctagtctctgtgtaactggttacattttgatggttgtctatactcaactggatatgtgtatgtaaattagaaaatacatacctatccagacataaatgctaagtaacatttttttcttcctccaactacataatttgtagctcatcatttttccttaatcctttcctaacttgttgcagcagtttgaatttcccagatatttatgtttgaacataatggctcagaatacatatttgaacatcatagttgtatatatttttaaagtagaataaataatggaaagcaacttgatatacaagtttatactaaaatttcaactgtgtgaagatacattttaaggcattactttgctaataatctacacattcttttttctattaaataaacaaatggtttgtggttcacagctttcatccaagcttggtgataatcaattttgaaaatacagtggactgaaaagcaaatttattctttcgaagatttcatttaaatctctgtactatgcatttttgtttcagtttgtaaatgtgtaacatttatagttaaataggacaaagcaggccctatgactattgttttcaaaaaattaatatataaataattcagaggggtttttcatttacttttgaaaagaaatttctttaacaggattgcacctatcaatttcttgtagaataaaaaaaaatctttcaacaaactgactttacttgtttctgtcaggatttaaatctttctaaagctccttataaacttaaagcctagagtacagttctgtaatgagagtgattatttatttggtattttattaaaatatctgagggactgtccaagaaagaaggtgaaagagaaataccacgtctgtactgcctaatttgtaaccttctctttgcattccttactgaaagtttgtgtaggtgaaaagcagttaaatcatcagttgctctaaagaggtcttaatttttaagtaaattacctttagtttgtatattacc

SEQ ID NO: 406561 - DNA, 3638 bp, Homo sapiens
  misc_feature (1699)..(1699): n is a, c, g, or t
ccgcgcaacagaagttactaggtgcgtgctcggtgtttaatttcgtacgagttccgaccctctcaggccttttccgcttctcttttacctccccaggtccgcccgtctgcgcccctcacaggaagccggagggtcgctctgatcccgaatctcccacaggcgtgaacctgctctgctgtgtatctttgcggggtggcctgcgctgaggcctgccgcgcgcggtgagtccgcgcagacctgaccctgcgtctcgcagctcggttgaggccgccgccgccttctcgggatgccgcggccgggggccgttgggggtgcaggctgctcgcactgctgctactggtgcctggacccggcggcgcctctgagatcaccttcgagcttcctgacaacgccaagcagtgcttctacgaggacatcgctcagggcaccaagtgcaccctggagttccaggtgattactggtggtcactatgatgtagattgtcgattagaagatcctgatggtaaagtgttatacaaagagatgaagaaacagtatgatagttttaccttcacagcctccaaaaatgggacatacaaattttgcttcagcaatgaattttctactttcacacataaaactgtatattttgattttcaagttggagaagacccacctttgtttcctagtgagaaccgagtcagtgctcttacccagatggaatctgcctgtgtttcaattcacgaagctctgaagtctgtcatcgattatcagactcatttccgtttaagagaagctcaaggccgaagccgagcagaggatctaaatacaagagtggcctattggtcagtaggagaagccctcattcttctggtggttagcatagggcaggtatttcttttgaaaagctttttctcagataaaagaaccaccacaactcgtgttggatcataactacgttttgagaattgatgcaccattgccactgtaatattgctgtcctctaattaattttaggtactgaagaacttaatattggcaacatttttaaatccttactcatacacttgttgggagggatgtacaatgcatattcccaaactgtggaaaggacacctttttttatttgtaaaggtggaaaaactttggaactcattttgggctattcatgttaaatattcaacaccaatgatctactctgttcgcagttgtttatatctactcttcgcacactaaactttggtattttgattccttttaaccatttaagactacttttcttataggtagttgatattttaaaaactttagatttaatgtctacatgtgttagggaggaagaaaattgccttttaattgttaataagaaaaccaaatgtgatgaactgtagcccaagccctattctgcactgttcagttttatggaggaaaaataaatctaccataggaatgttagttaatattgatatatcatggtaaaattgatttctcactagcttagaaaatgtcagacttttgtttttggggtttataatttaaaccagctatgctattttttcataaaggcatttgtagtacacagaaaacagtagtttcagtagtgtaaaagagtttatacaggccttaaatatcagactttgtaacaggtagaaatattacagaataatttaagacactacaatgggggcaaatgaaataggaaaatttttagtgagttacncgtactcattacattttcagtgcttttacaaggaaaaaaggtgatatgtttaattttaaaattttaattggctagctcttgcccttatatgactttaatgtctgtgagtcattcccagcttaaattaacaattgttagtattagtctcacacataagtgccatacattttatcctcatggatgtgatgcactgaaaagttagttgctctccttttttcttttttttgtcgtgcatattttatttctgtagtttctggttagctaccctaaagtgatttaaaaatttagaatgctttgtgtttcctatttggtaatcttcattgacttttctttagttaatgagtattaaatagtgcatattctgtagactatagggtttacattgtgttgcatcttataacttgtatagattgagctgattgaaataagattttgttccaagtattatctgatagaatacaagatgattcaaaattatatagatatttaaagcttttctgctgtttttttttttttttaattgcaactgcttttctgccgtgcctctcttccctacccaaaagtgatgagttctgaacaagacaagactgtcatattgtagagactttggtatgtgataccatagaatactgattggatagccatcctagtcacttaccaatactgactagaagttaactcttaattctaagctatcttaaaatgcatatatatacttcttgcatggaagagcaaaacaaattcaagttgtcatgcctgataatttcagatgccaccgtatagcaaagggtgaacatgttttcaaccctttaactttttacggtgtttgaagaccagctactccttaatatttatcaatggattaagaagtttaagattttgcagatttatcaatttgggtttttgtactgaagttgtcttgcggctttgcaagtgtccctttatatttaaatttgaaagttgtaagcactgatgttaatgtgattgatcagcatgggcatatgtaaaatgtccttttctggttgcctctctatgctattgtgttcagatacttacaccataattaaacagtaagttatagacttgctgagtttggcatagatagtgcactcatttaatctgtgcctctcaaaacttcagaatattagcatattaccacaaataatttttggtgaaactattgagatattaaaatttttgaaatcactactgttacctgttatagaaaatagtgttggcttagtctagtctctgtgtaactggttacattttgatggttgtctatactcaactggatatgtgtatgtaaattagaaaatacatacctatccagacataaatgctaagtaacatttttttcttcctccaactacataatttgtagctcatcatttttccttaatcctttcctaacttgttgcagcagtttgaatttcccagatatttatgtttgaacataatggctcagaatacatatttgaacatcatagttgtatatatttttaaagtagaataaataatggaaagcaacttgatatacaagtttatactaaaatttcaactgtgtgaagatacattttaaggcattactttgctaataatctacacattcttttttctattaaataaacaaatggtttgtggttcacagctttcatccaagcttggtgataatcaattttgaaaatacagtggactgaaaagcaaatttattctttcgaagatttcatttaaatctctgtactatgcatttttgtttcagtttgtaaatgtgtaacatttatagttaaataggacaaagcaggccctatgactattgttttcaaaaaattaatatataaataattcagaggggtttttcatttacttttgaaaagaaatttctttaacaggattgcacctatcaatttcttgtagaataaaaaaaaatctttcaaca

SEQ ID NO: 406562 - DNA, 3580 bp, Homo sapiens
  misc_feature (1822)..(1822): n is a, c, g, or t
cccaggctgcaacggaggcagagccaacgcctcgcgggcttccacgtacgcactccaacgcgtgttcccggagaagaacgcatccgggtcacgggagccggtgtctcaggctccgccccttcaccccccgaaaggctaatccccacttccgaccctctcaggccttttccgcttctcttttacctccccaggtccgcccgtctgcgcccctcacaggaagccggagggtcgctctgatcccgaatctcccacaggcgtgaacctgctctgctgtgtatctttgcggggtggcctgcgctgaggcctgccgcgcgcggtgagtccgcgcagacctgaccctgcgtctcgcagctcggttgaggccgccgccgccttctcgggatgccgcggccggggtccgcgcagcgctgggcggccgtcgcgggccgttgggggtgcaggctgctcgcactgctgctactggtgcctggacccggcggcgcctctgagatcaccttcgagcttcctgacaacgccaagcagtgcttctacgaggacatcgctcagggcaccaagtgcaccctggagttccaggtgattactggtggtcactatgatgtagattgtcgattagaagatcctgatggtaaagtgttatacaaagagatgaagaaacagtatgatagttttaccttcacagcctccaaaaatgggacatacaaattttgcttcagcaatgaattttctactttcacacataaaactgtatattttgattttcaagttggagaagacccacctttgtttcctagtgagaaccgagtcagtgctcttacccagatggaatctgcctgtgtttcaattcacgaagctctgaagtctgtcatcgattatcagactcatttccgtttaagagaagctcaaggccgaagccgagcagaggatctaaatacaagagtggcctattggtcagtaggagaagccctcattcttctggtggttagcatagggcaggtatttcttttgaaaagctttttctcagataaaagaaccaccacaactcgtgttggatcataactacgttttgagaattgatgcaccattgccactgtaatattgctgtcctctaattaattttaggtactgaagaacttaatattggcaacatttttaaatccttactcatacacttgttgggagggatgtacaatgcatattcccaaactgtggaaaggacacctttttttatttgtaaaggtggaaaaactttggaactcattttgggctattcatgttaaatattcaacaccaatgatctactctgttcgcagttgtttatatctactcttcgcacactaaactttggtattttgattccttttaaccatttaagactacttttcttataggtagttgatattttaaaaactttagatttaatgtctacatgtgttagggaggaagaaaattgccttttaattgttaataagaaaaccaaatgtgatgaactgtagcccaagccctattctgcactgttcagttttatggaggaaaaataaatctaccataggaatgttagttaatattgatatatcatggtaaaattgatttctcactagcttagaaaatgtcagacttttgtttttggggtttataatttaaaccagctatgctattttttcataaaggcatttgtagtacacagaaaacagtagtttcagtagtgtaaaagagtttatacaggccttaaatatcagactttgtaacaggtagaaatattacagaataatttaagacactacaatgggggcaaatgaaataggaaaatttttagtgagttacncgtactcattacattttcagtgcttttacaaggaaaaaaggtgatatgtttaattttaaaattttaattggctagctcttgcccttatatgactttaatgtctgtgagtcattcccagcttaaattaacaattgttagtattagtctcacacataagtgccatacattttatcctcatggatgtgatgcactgaaaagttagttgctctccttttttcttttttttgtcgtgcatattttatttctgtagtttctggttagctaccctaaagtgatttaaaaatttagaatgctttgtgtttcctatttggtaatcttcattgacttttctttagttaatgagtattaaatagtgcatattctgtagactatagggtttacattgtgttgcatcttataacttgtatagattgagctgattgaaataagattttgttccaagtattatctgatagaatacaagatgattcaaaattatatagatatttaaagcttttctgctgtttttttttttttttaattgcaactgcttttctgccgtgcctctcttccctacccaaaagtgatgagttctgaacaagacaagactgtcatattgtagagactttggtatgtgataccatagaatactgattggatagccatcctagtcacttaccaatactgactagaagttaactcttaattctaagctatcttaaaatgcatatatatacttcttgcatggaagagcaaaacaaattcaagttgtcatgcctgataatttcagatgccaccgtatagcaaagggtgaacatgttttcaaccctttaactttttacggtgtttgaagaccagctactccttaatatttatcaatggattaagaagtttaagattttgcagatttatcaatttgggtttttgtactgaagttgtcttgcggctttgcaagtgtccctttatatttaaatttgaaagttgtaagcactgatgttaatgtgattgatcagcatgggcatatgtaaaatgtccttttctggttgcctctctatgctattgtgttcagatacttacaccataattaaacagtaagttatagacttgctgagtttggcatagatagtgcactcatttaatctgtgcctctcaaaacttcagaatattagcatattaccacaaataatttttggtgaaactattgagatattaaaatttttgaaatcactactgttacctgttatagaaaatagtgttggcttagtctagtctctgtgtaactggttacattttgatggttgtctatactcaactggatatgtgtatgtaaattagaaaatacatacctatccagacataaatgctaagtaacatttttttcttcctccaactacataatttgtagctcatcatttttccttaatcctttcctaacttgttgcagcagtttgaatttcccagatatttatgtttgaacataatggctcagaatacatatttgaacatcatagttgtatatatttttaaagtagaataaataatggaaagcaacttgatatacaagtttatactaaaatttcaactgtgtgaagatacattttaaggcattactttgctaataatctacacattcttttttctattaaataacaaggtgggggtcaaggttcacaaggtggggataattgaacaaggggggagacatttttcggatgataatcgcagatgggggaagggaaataagacagggcgtgtgaaaaaacgggggtaaaaagaggt

SEQ ID NO: 406563 - DNA, 2133 bp, Homo sapiens
cccaggctgcaacggaggcagagccaacgcctcgcgggcttccacgtacgcactccaacgcgtgttcccggagaagaacgcatccgggtcacgggagccggtgtctcaggctccgccccttcaccccccgaaaggctaatccccacttccgaccctctcaggccttttccgcttctcttttacctccccaggtccgcccgtctgcgcccctcacaggaagccggagggtcgctctgatcccgaatctcccacaggcgtgaacctgctctgctgtgtatctttgcggggtggcctgcgctgaggcctgccgcgcgcggtgagtccgcgcagacctgaccctgcgtctcgcagctcggttgaggccgccgccgccttctcgggatgccgcggccggggtccgcgcagcgctgggcggccgtcgcgggccgttgggggtgcaggctgctcgcactgctgctactggtgcctggacccggcggcgcctctgagatcaccttcgagcttcctgacaacgccaagcagtgcttctacgaggacatcgctcagggcaccaagtgcaccctggagttccaggtgattactggtggtcactatgatgtagattgtcgattagaagatcctgatggtaaagtgttatacaaagagatgaagaaacagtatgatagttttaccttcacagcctccaaaaatgggacatacaaattttgcttcagcaatgaattttctactttcacacataaaactgtatattttgattttcaagttggagaagacccacctttgtttcctagtgagaaccgagtcagtgctcttacccagatggaatctgcctgtgtttcaattcacgaagctctgaagtctgtcatcgattatcagactcatttccgtttaagagaagctcaaggccgaagccgagcagaggatctaaatacaagagtggcctattggtcagtaggagaagccctcattcttctggtggttagcatagggcaggtatttcttttgaaaagctttttctcagataaaagaaccaccacaactcgtgttggatcataactacgttttgagaattgatgcaccattgccactgtaatattgctgtcctctaattaattttaggtactgaagaacttaatattggcaacatttttaaatccttactcatacacttgttgggagggatgtacaatgcatattcccaaactgtggaaaggacacctttttttatttgtaaaggtggaaaaactttggaactcattttgggctattcatgttaaatattcaacaccaatgatctactctgttcgcagttgtttatatctactcttcgcacactaaactttggtattttgattccttttaaccatttaagactacttttcttataggtagttgatattttaaaaactttagatttaatgtctacatgtgttagggaggaagaaaattgccttttaattgttaataagaaaaccaaatgtgatgaactgtagcccaagccctattctgcactgttcagttttatggaggaaaaataaatctaccataggaatgttagttaatattgataatcaattttgaaaatacagtggactgaaaagcaaatttattctttcgaagatttcatttaaatctctgtactatgcatttttgtttcagtttgtaaatgtgtaacatttatagttaaataggacaaagcaggccctatgactattgttttcaaaaaattaatatataaataattcagaggggtttttcatttacttttgaaaagaaatttctttaacaggattgcacctatcaatttcttgtagaataaaaaaaaatctttcaacaaactgactttacttgtttctgtcaggatttaaatctttctaaagctccttataaacttaaagcctagagtacagttctgtaatgagagtgattatttatttggtattttattaaaatatctgagggactgtccaagaaagaaggtgaaagagaaataccacgtctgtactgcctaatttgtaaccttctctttgcattccttactgaaagtttgtgtaggtgaaaagcagttaaatcatcagttgctctaaagaggtcttaatttttaagtaaattacctttagtttgtatattacc

SEQ ID NO: 406564 - DNA, 1636 bp, Homo sapiens
  misc_feature (1085)..(1089): n is a, c, g, or t
  misc_feature (1091)..(1092): n is a, c, g, or t
  misc_feature (1098)..(1099): n is a, c, g, or t
  misc_feature (1101)..(1102): n is a, c, g, or t
  misc_feature (1106)..(1106): n is a, c, g, or t
  misc_feature (1110)..(1117): n is a, c, g, or t
  misc_feature (1120)..(1120): n is a, c, g, or t
  misc_feature (1127)..(1129): n is a, c, g, or t
  misc_feature (1147)..(1150): n is a, c, g, or t
  misc_feature (1155)..(1155): n is a, c, g, or t
  misc_feature (1157)..(1157): n is a, c, g, or t
  misc_feature (1159)..(1161): n is a, c, g, or t
  misc_feature (1163)..(1163): n is a, c, g, or t
  misc_feature (1165)..(1165): n is a, c, g, or t
  misc_feature (1172)..(1172): n is a, c, g, or t
  misc_feature (1179)..(1179): n is a, c, g, or t
  misc_feature (1182)..(1182): n is a, c, g, or t
  misc_feature (1189)..(1189): n is a, c, g, or t
  misc_feature (1205)..(1205): n is a, c, g, or t
  misc_feature (1208)..(1208): n is a, c, g, or t
  misc_feature (1220)..(1220): n is a, c, g, or t
  misc_feature (1226)..(1226): n is a, c, g, or t
  misc_feature (1229)..(1230): n is a, c, g, or t
  misc_feature (1232)..(1232): n is a, c, g, or t
  misc_feature (1244)..(1246): n is a, c, g, or t
  misc_feature (1248)..(1248): n is a, c, g, or t
cccaggctgcaacggaggcagagccaacgcctcgcgggcttccacgtacgcactccaacgcgtgttcccggagaagaacgcatccgggtcacgggagccggtgtctcaggctccgccccttcaccccccgaaaggctaatccccacttccgaccctctcaggccttttccgcttctcttttacctccccaggtccgcccgtctgcgcccctcacaggaagccggagggtcgctctgatcccgaatctcccacaggcgtgaacctgctctgctgtgtatctttgcggggtggcctgcgctgaggcctgccgcgcgcggtgagtccgcgcagacctgaccctgcgtctcgcagctcggttgaggccgccgccgccttctcgggatgccgcggccggggtccgcgcagcgctgggcggccgtcgcgggccgttgggggtgcaggctgctcgcactgctgctactggtgcctggacccggcggcgcctctgagatcaccttcgagcttcctgacaacgccaagcagtgcttctacgaggacatcgctcagggcaccaagtgcaccctggagttccaggtgattactggtggtcactatgatgtagattgtcgattagaagatcctgatggtaaagtgttatacaaagagatgaagaaacagtatgatagttttaccttcacagcctccaaaaatgggacatacaaattttgcttcagcaatgaattttctactttcacacataaaactgtatattttgattttcaagttggagaagacccacctttgtttcctagtgagaaccgagtcagtgctcttacccagatggaatctgcctgtgtttcaattcacgaagctctgaagtctgtcatcgattatcagactcatttccgtttaagagaagctcaaggccgaagccgagcagaggatctaaatacaagagtggcctattggcacagtgtggatacaagtccaggatatcatgagtcagattccaagaagtctgaagatctatccttgtgtaatgttgctgagcacagcaatacaacagaggggccaacaggaaagcaggagggagctcagagcgctcnnnnngnngtcccnncnngacnctgnnnnnnnnctnccccccnnntcccccacaccccacccnnnngaccncncnnncnanccccccncaccccncanccccccncaagaccacccccccnccncccccccaacancccccnccnngnccccacgtcccnnncnccatttacagaatttagatgatgctgtaaatgggtctgcatggacaatcttattactgactgaaaactttttaagagatacttggtgtaatttccagttctatacgtccctaatgaactccgttaacaggcagcataaatacaactctgttatacccatgcggcccctgaacaatccccttccccgagaaaggactccctttgccctccaaaccatcaatgccttagaggaagaaagtcgtggatttcctacacaagtagaaagaatttttcaggagtctgtgtataagacacaacaaactatatggaaagagacaagaaatatggtacaaagacaatttattgcctgagatgaaacatataacatgtggctggctcttgttttgtaa

SEQ ID NO: 406565 - DNA, 504 bp, Homo sapiens
gccaggttttgtcacttaaataatcattttatttaagcctttaagcattttattggattggctgcttgtctttgttttaactcatttctctagttttgatcagttctccgaagccagggtcaacctcagcactgtcaacatttacggctggataatgttggtttggggagctgtcctgcgcattgtaggatgcttagcggcatccccagcctctacctgttatatgctaatagcccccccgacccctgagttgtgacaaccaaaaatgtctacatgtgacaacaaatgttccctggggaggtggggggaaagtcacacccactcgagaaccactgtttctaaaccgcccttttgtattttgctattttatgttcaacctgaaaatggttaatctggtaatgttactattctattaagaaattgatatgaaaatgttactgcgattccaaggagggcaaagcgtcctgcggtgagtgttcccgacgccggagttggcgcggccgc

SEQ ID NO: 406566 - DNA, 4902 bp, Homo sapiens
cccggggggcgcgctgcattgtggggtggcggcggcggccgcgctagcgacgcggggccgggcggctgagcgttcgcggggccgaggccatggctttctgggcggggggttcgcccagcgtcgtggactatttccctagcgaggacttctaccgctgcggctactgcaagaacgagtcgggcagccgctccaatggcatgtgggcacattccatgacagtacaggattatcaggatctcatagaccgaggatggcgaagaagtggaaaatatgtgtacaaacctgtcatgaatcaaacatgttgtcctcagtacacaataaggtgccgacctttacaatttcagccttcaaaatctcacaagaaggttttgaaaaaaatgttgaaatttctggctaaaggggaggttcccaaaggaagttgtgaggatgagcccatggattccacaatggatgatgctgttgcgggtgactttgcattgataaataaactggatatacagtgtgatcttaaaacactcagtgatgacatcaaagagagtttagagagtgaaggaaaaaattcaaagaaagaagaacctcaggaattacttcagtcacaagatttcgtaggagagaagttgggctctggtgaaccgtcacattcagttaaagttcacacagttcctaagccaggcaaaggggctgatttgagtaagcctccatgtcgaaaagcaaaggaaatccggaaagaaaggaaaaggttaaaactaatgcagcagaacccagctggagaacttgagggtttccaggctcaaggtcacccaccatctttgtttccaccaaaggctaaatccaaccagccaaaatcactcgaagatttaatttttgagtctttaccagagaatgcatcacacaagttagaggtgagggtggtgagatcatctccaccaagttcgcagttcaaagccacacttctggagtcttaccaggtctataaacgttaccagatggttattcacaagaacccacctgatacgccaaccgaaagccagttcacaagattcctttgcagttcacccttggaggcagagactccccctaatgggccagattgtggctatggctcctttcaccagcagtactggcttgacggaaagatcattgctgtgggggtgattgacatcctcccaaactgtgtatcatctgtgtatttgtactacgatcctgattattcgtttttgtctttgggcgtctactctgcactacgagaaattgcttttactaggcagcttcatgagaaaacttctcaactcagctattattatatgggtttctacattcattcatgtcccaagatgaaatataagggtcagtatagaccttctgatttgctgtgccctgagacatatgtttgggtacccattgagcaatgcctgccttcacttgaaaactccaagtactgccgtttcaaccaggacccagaagcagtggatgaggatcgcagtacggaacctgaccgattgcaggtgtttcacaagagagccatcatgccttacggtgtttataagaaacagcagaaagacccaagtgaggaggctgctgttctgcagtacgccagcctggtggggcagaagtgctccgagcggatgctgctgttcagaaactgacctgttcacctctgccgggaagttcctgtgttgtgctgatgatttgtgccaggatacatattcagtacctgtggggaaataactgtcaccacccacaaattagacattttttattttgactatctatggcttttaaaaaatattttgtggcaatgtatctgtgagaatctcatagttaatataaagattttaaaactgcattatgacctagcccccataattgggatttatcattttggaggattctttctagagcaagatatgctcaaattctcctgtttgtattttgtaaaatgaagaagtgaatctaagtaacttaatcacagttgtgcattttttttggttctgttagagaaattaaaacagactgtttcctcaggcccattttaaactgaacttatgctaggaaaccttaagtatggggaaggtagaaagttcatttcatcacttagaaaatatgtcttctcaagaacaaaactgtgctgttacaactcagtgttcaatgtgaaattgctgccaaatgttatgtagtttaatagagaacttgaaaaaataaaacattaaaatggagcttgtgttagcatcaggtatccatttgttcaggacagtcctgttcatgtctgttgtcttggcatagttttttcccctagaatatagtactcccttttactctaaaaaatatcccagtttggacaataaaatacataattactctagttatattatttgctttacttctaaaaatgtaagaaattgaatttttttaaagaaaaatgttggttcctgccttgatctaagtctcatccaaaggaaataaatagtcactagttttttatcttacaactcaggacatttgtctttggttattaatggaaattagtatgtgattactttcatagttatgccacaaatcacattgaagaaggaatcattccgacctctgttccaggacaagagctagaacaatccatttcttgtcctttgatttgagagtcacagtcagggtggcttctgccacccttagtaactcagagcagaggccagccccctccttccctcactttcttttgctgagtcctttgcccacctgtcaaggtggcaggcactgtgctgggtacaggaggacagtcagacatgtcccttcttagctatagtcgagctgtctgggaaacaggatgaaaaacaggagggttattttcttgtgccctctttgtcagctgatcccctcttctgctaccagctatttggccagcaagccgtttttagtccccactttgcccatttttctgttttggttcatcgtttcttaaaagccatgttataaaacatggtagtttgaatcctgttgctaattttaaactttcctctaaaatgtactgaattttgacaaaaatttgaaaatatcctcagctaactagaataaaaaggatcataaaacaatgattttaaaactgaaatctctagaaactcaacatccaagtcagccgcatttcttcattcagagtgtgtgtgtcacacctgccaaggtgctgcgtactctgctaaccgagctagagtagtgagcaaagccattttctctgatcacaagattttacatttttctgggattttgacctgcaaagtagtctcgtaagagcatttgagagacttacttggaactgccttcagaatctatagagccttttttctctttttcctctaaaatgaaaagagcttcattttatgattataacaaaagtgacactgtaagcagttagaacattaagaagtataaataaaaagtaaaaatcatctacaaccctaccatactcagaaggagaaaagaactgtcatgtatgtatacacacatacctatgtaattttaatataaatagaattatgttctacatgctgttttatttcctcaacagtaaattatggacatgtctgaaatgtgaaataaatttcaaaataaggcttcagaaagtgtagtaagtaatctctgcattattaaaaataagcagggtagggctggtacttggctcccttagcatttgaatgtccaacttggtgttatcactgtatcttccctccatttgtctttgtgattagcatgtaaaatggtattcataaagatcacaacccttgaatatcagatgaagagaaaacttgactccaacatcttaccacaactctggtttcttcctgcagaattcattttcagaggaaaatgatgaatcatccctgtctgtgaaccactgtgctttccttgagggtggcattgtaggttgacaccagcaaagactcagagtgacttgagcattggagatccttctacttggctgctgtattcatgcattatgttggtttgagaatagctagtgtattgatccaagtagtcaaagtgtcttaaaaggacacctatttgtccttttgagccccagctgagtgaatactgatagtggactagaaaagcatagtcaagaaaagtgacccaccttgttacttgaccagcagtctagctgagagatctgattttatgttcgtaactttctgtaaagaaagacacaaggacttttcaaagacagtttatatctttccaaggcaggaagctttgcatttgcaatcttagtgttgtgtccctttctgattttcaaatacatcacacctgccttcctgttttgggagcaaagatgtaatttcaattccccttgctaccgtccttatttaaattatttccattctaagagatttttgttatttttttaaatgtaatctgagcacttttttgtattctaaaagatagatgatatcagataaatatgttgtacatttgattaaaattatttagataaatattactatgttgacttttaaatagctttatcctatttttcattcattttgcaaatatttgttgtgtgtagtttcttaacgtgtcagaatctattatgtaaaagaacctttccagatttctgaacagtatatgctttgattttataggctttatattatttcagtatgaataaagataaggaatatgaaacagttaactaaaatgtatctgtcgttgctaacttgaaaaatgaagtagaaacagttggaaaatgtttgaattagaagttattcaagtgcacactcttttctaaaagaaagccaatgactataaggcaaaagaagtttgactgcatgtggtattttttgctcttgtatatgctttttgaacaagctatttgataaagcctgaatggaaaaaataaagctgtttctatctgca

SEQ ID NO: 406567 - DNA, 5176 bp, Homo sapiens
gccaggttttgtcacttaaataatcattttatttaagcctttaagcattttattggattggctgcttgtctttgttttaactcatttctctagttttgatcagttctccgaagccagggtcaacctcagcactgtcaacatttacggctggataatgttggtttggggagctgtcctgcgcattgtaggatgcttagcggcatccccagcctctacctgttatatgctaatagcccccccgacccctgagttgtgacaaccaaaaatgtctacatgtgacaacaaatgttccctggggaggtggggggaaagtcacacccactcgagaaccactgtttctaaaccgcccttttgtattttgctattttatgttcaacctgaaaatggttaatctggtaatgttactattctattaagaaattgatatgaaaatgttactgcgattccaaggagggcaaagcgtcctgcggcatgtgggcacattccatgacagtacaggattatcaggatctcatagaccgaggatggcgaagaagtggaaaatatgtgtacaaacctgtcatgaatcaaacatgttgtcctcagtacacaataaggtgccgacctttacaatttcagccttcaaaatctcacaagaaggttttgaaaaaaatgttgaaatttctggctaaaggggaggttcccaaaggaagttgtgaggatgagcccatggattccacaatggatgatgctgttgcgggtgactttgcattgataaataaactggatatacagtgtgatcttaaaacactcagtgatgacatcaaagagagtttagagagtgaaggaaaaaattcaaagaaagaagaacctcaggaattacttcagtcacaagatttcgtaggagagaagttgggctctggtgaaccgtcacattcagttaaagttcacacagttcctaagccaggcaaaggggctgatttgagtaagcctccatgtcgaaaagcaaaggaaatccggaaagaaaggaaaaggttaaaactaatgcagcagaacccagctggagaacttgagggtttccaggctcaaggtcacccaccatctttgtttccaccaaaggctaaatccaaccagccaaaatcactcgaagatttaatttttgagtctttaccagagaatgcatcacacaagttagaggtgagggtggtgagatcatctccaccaagttcgcagttcaaagccacacttctggagtcttaccaggtctataaacgttaccagatggttattcacaagaacccacctgatacgccaaccgaaagccagttcacaagattcctttgcagttcacccttggaggcagagactccccctaatgggccagattgtggctatggctcctttcaccagcagtactggcttgacggaaagatcattgctgtgggggtgattgacatcctcccaaactgtgtatcatctgtgtatttgtactacgatcctgattattcgtttttgtctttgggcgtctactctgcactacgagaaattgcttttactaggcagcttcatgagaaaacttctcaactcagctattattatatgggtttctacattcattcatgtcccaagatgaaatataagggtcagtatagaccttctgatttgctgtgccctgagacatatgtttgggtacccattgagcaatgcctgccttcacttgaaaactccaagtactgccgtttcaaccaggacccagaagcagtggatgaggatcgcagtacggaacctgaccgattgcaggtgtttcacaagagagccatcatgccttacggtgtttataagaaacagcagaaagacccaagtgaggaggctgctgttctgcagtacgccagcctggtggggcagaagtgctccgagcggatgctgctgttcagaaactgacctgttcacctctgccgggaagttcctgtgttgtgctgatgatttgtgccaggatacatattcagtacctgtggggaaataactgtcaccacccacaaattagacattttttattttgactatctatggcttttaaaaaatattttgtggcaatgtatctgtgagaatctcatagttaatataaagattttaaaactgcattatgacctagcccccataattgggatttatcattttggaggattctttctagagcaagatatgctcaaattctcctgtttgtattttgtaaaatgaagaagtgaatctaagtaacttaatcacagttgtgcattttttttggttctgttagagaaattaaaacagactgtttcctcaggcccattttaaactgaacttatgctaggaaaccttaagtatggggaaggtagaaagttcatttcatcacttagaaaatatgtcttctcaagaacaaaactgtgctgttacaactcagtgttcaatgtgaaattgctgccaaatgttatgtagtttaatagagaacttgaaaaaataaaacattaaaatggagcttgtgttagcatcaggtatccatttgttcaggacagtcctgttcatgtctgttgtcttggcatagttttttcccctagaatatagtactcccttttactctaaaaaatatcccagtttggacaataaaatacataattactctagttatattatttgctttacttctaaaaatgtaagaaattgaatttttttaaagaaaaatgttggttcctgccttgatctaagtctcatccaaaggaaataaatagtcactagttttttatcttacaactcaggacatttgtctttggttattaatggaaattagtatgtgattactttcatagttatgccacaaatcacattgaagaaggaatcattccgacctctgttccaggacaagagctagaacaatccatttcttgtcctttgatttgagagtcacagtcagggtggcttctgccacccttagtaactcagagcagaggccagccccctccttccctcactttcttttgctgagtcctttgcccacctgtcaaggtggcaggcactgtgctgggtacaggaggacagtcagacatgtcccttcttagctatagtcgagctgtctgggaaacaggatgaaaaacaggagggttattttcttgtgccctctttgtcagctgatcccctcttctgctaccagctatttggccagcaagccgtttttagtccccactttgcccatttttctgttttggttcatcgtttcttaaaagccatgttataaaacatggtagtttgaatcctgttgctaattttaaactttcctctaaaatgtactgaattttgacaaaaatttgaaaatatcctcagctaactagaataaaaaggatcataaaacaatgattttaaaactgaaatctctagaaactcaacatccaagtcagccgcatttcttcattcagagtgtgtgtgtcacacctgccaaggtgctgcgtactctgctaaccgagctagagtagtgagcaaagccattttctctgatcacaagattttacatttttctgggattttgacctgcaaagtagtctcgtaagagcatttgagagacttacttggaactgccttcagaatctatagagccttttttctctttttcctctaaaatgaaaagagcttcattttatgattataacaaaagtgacactgtaagcagttagaacattaagaagtataaataaaaagtaaaaatcatctacaaccctaccatactcagaaggagaaaagaactgtcatgtatgtatacacacatacctatgtaattttaatataaatagaattatgttctacatgctgttttatttcctcaacagtaaattatggacatgtctgaaatgtgaaataaatttcaaaataaggcttcagaaagtgtagtaagtaatctctgcattattaaaaataagcagggtagggctggtacttggctcccttagcatttgaatgtccaacttggtgttatcactgtatcttccctccatttgtctttgtgattagcatgtaaaatggtattcataaagatcacaacccttgaatatcagatgaagagaaaacttgactccaacatcttaccacaactctggtttcttcctgcagaattcattttcagaggaaaatgatgaatcatccctgtctgtgaaccactgtgctttccttgagggtggcattgtaggttgacaccagcaaagactcagagtgacttgagcattggagatccttctacttggctgctgtattcatgcattatgttggtttgagaatagctagtgtattgatccaagtagtcaaagtgtcttaaaaggacacctatttgtccttttgagccccagctgagtgaatactgatagtggactagaaaagcatagtcaagaaaagtgacccaccttgttacttgaccagcagtctagctgagagatctgattttatgttcgtaactttctgtaaagaaagacacaaggacttttcaaagacagtttatatctttccaaggcaggaagctttgcatttgcaatcttagtgttgtgtccctttctgattttcaaatacatcacacctgccttcctgttttgggagcaaagatgtaatttcaattccccttgctaccgtccttatttaaattatttccattctaagagatttttgttatttttttaaatgtaatctgagcacttttttgtattctaaaagatagatgatatcagataaatatgttgtacatttgattaaaattatttagataaatattactatgttgacttttaaatagctttatcctatttttcattcattttgcaaatatttgttgtgtgtagtttcttaacgtgtcagaatctattatgtaaaagaacctttccagatttctgaacagtatatgctttgattttataggctttatattatttcagtatgaataaagataaggaatatgaaacagttaactaaaatgtatctgtcgttgctaacttgaaaaatgaagtagaaacagttggaaaatgtttgaattagaagttattcaagtgcacactcttttctaaaagaaagccaatgactataaggcaaaagaagtttgactgcatgtggtattttttgctcttgtatatgctttttgaacaagctatttgataaagcctgaatggaaaaaataaagctgtttctatctgca

SEQ ID NO: 406568 - DNA, 4132 bp, Homo sapiens
gactgaggcaggagaatcgcttgaacccagggggcggaagttgcagtgagccaagattgcgccactgcactccagcctggcgacagaacgagactctgtctcaaaacaaaaaaaaaggcagaacccagctggagaacttgagggtttccaggctcaaggtcacccaccatctttgtttccaccaaaggctaaatccaaccagccaaaatcactcgaagatttaatttttgagtctttaccagagaatgcatcacacaagttagagcaagattcctttgcagttcacccttggaggcagagactccccctaatgggccagattgtggctatggctcctttcaccagcagtactggcttgacggaaagatcattgctgtgggggtgattgacatcctcccaaactgtgtatcatctgtgtatttgtactacgatcctgattattcgtttttgtctttgggcgtctactctgcactacgagaaattgcttttactaggcagcttcatgagaaaacttctcaactcagctattattatatgggtttctacattcattcatgtcccaagatgaaatataagggtcagtatagaccttctgatttgctgtgccctgagacatatgtttgggtacccattgagcaatgcctgccttcacttgaaaactccaagtactgccgtttcaaccaggacccagaagcagtggatgaggatcgcagtacggaacctgaccgattgcaggtgtttcacaagagagccatcatgccttacggtgtttataagaaacagcagaaagacccaagtgaggaggctgctgttctgcagtacgccagcctggtggggcagaagtgctccgagcggatgctgctgttcagaaactgacctgttcacctctgccgggaagttcctgtgttgtgctgatgatttgtgccaggatacatattcagtacctgtggggaaataactgtcaccacccacaaattagacattttttattttgactatctatggcttttaaaaaatattttgtggcaatgtatctgtgagaatctcatagttaatataaagattttaaaactgcattatgacctagcccccataattgggatttatcattttggaggattctttctagagcaagatatgctcaaattctcctgtttgtattttgtaaaatgaagaagtgaatctaagtaacttaatcacagttgtgcattttttttggttctgttagagaaattaaaacagactgtttcctcaggcccattttaaactgaacttatgctaggaaaccttaagtatggggaaggtagaaagttcatttcatcacttagaaaatatgtcttctcaagaacaaaactgtgctgttacaactcagtgttcaatgtgaaattgctgccaaatgttatgtagtttaatagagaacttgaaaaaataaaacattaaaatggagcttgtgttagcatcaggtatccatttgttcaggacagtcctgttcatgtctgttgtcttggcatagttttttcccctagaatatagtactcccttttactctaaaaaatatcccagtttggacaataaaatacataattactctagttatattatttgctttacttctaaaaatgtaagaaattgaatttttttaaagaaaaatgttggttcctgccttgatctaagtctcatccaaaggaaataaatagtcactagttttttatcttacaactcaggacatttgtctttggttattaatggaaattagtatgtgattactttcatagttatgccacaaatcacattgaagaaggaatcattccgacctctgttccaggacaagagctagaacaatccatttcttgtcctttgatttgagagtcacagtcagggtggcttctgccacccttagtaactcagagcagaggccagccccctccttccctcactttcttttgctgagtcctttgcccacctgtcaaggtggcaggcactgtgctgggtacaggaggacagtcagacatgtcccttcttagctatagtcgagctgtctgggaaacaggatgaaaaacaggagggttattttcttgtgccctctttgtcagctgatcccctcttctgctaccagctatttggccagcaagccgtttttagtccccactttgcccatttttctgttttggttcatcgtttcttaaaagccatgttataaaacatggtagtttgaatcctgttgctaattttaaactttcctctaaaatgtactgaattttgacaaaaatttgaaaatatcctcagctaactagaataaaaaggatcataaaacaatgattttaaaactgaaatctctagaaactcaacatccaagtcagccgcatttcttcattcagagtgtgtgtgtcacacctgccaaggtgctgcgtactctgctaaccgagctagagtagtgagcaaagccattttctctgatcacaagattttacatttttctgggattttgacctgcaaagtagtctcgtaagagcatttgagagacttacttggaactgccttcagaatctatagagccttttttctctttttcctctaaaatgaaaagagcttcattttatgattataacaaaagtgacactgtaagcagttagaacattaagaagtataaataaaaagtaaaaatcatctacaaccctaccatactcagaaggagaaaagaactgtcatgtatgtatacacacatacctatgtaattttaatataaatagaattatgttctacatgctgttttatttcctcaacagtaaattatggacatgtctgaaatgtgaaataaatttcaaaataaggcttcagaaagtgtagtaagtaatctctgcattattaaaaataagcagggtagggctggtacttggctcccttagcatttgaatgtccaacttggtgttatcactgtatcttccctccatttgtctttgtgattagcatgtaaaatggtattcataaagatcacaacccttgaatatcagatgaagagaaaacttgactccaacatcttaccacaactctggtttcttcctgcagaattcattttcagaggaaaatgatgaatcatccctgtctgtgaaccactgtgctttccttgagggtggcattgtaggttgacaccagcaaagactcagagtgacttgagcattggagatccttctacttggctgctgtattcatgcattatgttggtttgagaatagctagtgtattgatccaagtagtcaaagtgtcttaaaaggacacctatttgtccttttgagccccagctgagtgaatactgatagtggactagaaaagcatagtcaagaaaagtgacccaccttgttacttgaccagcagtctagctgagagatctgattttatgttcgtaactttctgtaaagaaagacacaaggacttttcaaagacagtttatatctttccaaggcaggaagctttgcatttgcaatcttagtgttgtgtccctttctgattttcaaatacatcacacctgccttcctgttttgggagcaaagatgtaatttcaattccccttgctaccgtccttatttaaattatttccattctaagagatttttgttatttttttaaatgtaatctgagcacttttttgtattctaaaagatagatgatatcagataaatatgttgtacatttgattaaaattatttagataaatattactatgttgacttttaaatagctttatcctatttttcattcattttgcaaatatttgttgtgtgtagtttcttaacgtgtcagaatctattatgtaaaagaacctttccagatttctgaacagtatatgctttgattttataggctttatattatttcagtatgaataaagataaggaatatgaaacagttaactaaaatgtatctgtcgttgctaacttgaaaaatgaagtagaaacagttggaaaatgtttgaattagaagttattcaagtgcacactcttttctaaaagaaagccaatgactataaggcaaaagaagtttgactgcatgtggtattttttgctcttgtatatgctttttgaacaagctatttgataaagcctgaatggaaaaaataaagctgtttctatctgca

SEQ ID NO: 406569 - DNA, 4588 bp, Homo sapiens
cccggggggcgcgctgcattgtggggtggcggcggcggccgcgctagcgacgcggggccgggcggctgagcgttcgcggggccgaggccatggctttctgggcggggggttcgcccagcgtcgtggactatttccctagcgaggacttctaccgctgcggctactgcaagaacgagtcgggcagccgctccaatggcatgtgggcacattccatgacagtacaggattatcaggatctcatagaccgaggatggcgaagaagtggaaaatatgtgtacaaacctgtcatgaatcaaacatgttgtcctcagtacacaataaggtgccgacctttacaatttcagccttcaaaatctcacaagaaggttttgaaaaaaatgttgaaatttctggctaaaggggaggttcccaaaggaagttgtgaggatgagcccatggattccacaatggatgatgctgttgcgggtgactttgcattgataaataaactggatatacagtgtgatcttaaaacactcagtgatgacatcaaagagagtttagagagtgaaggaaaaaattcaaagaaagaagaacctcaggaattacttcagtcacaagatttcgtaggagagaagttgggctctggtgaaccgtcacattcagttaaagttcacacagttcctaagccaggcaaaggggctgatttgagtaagcctccatgtcgaaaagcaaaggaaatccggaaagaaaggaaaaggttaaaactaatgcagcagaacccagctggagaacttgagggtttccaggctcaaggtcacccaccatctttgtttccaccaaaggctaaatccaaccagccaaaatcactcgaagatttaatttttgagtctttaccagagaatgcatcacacaagttagaggtgagggtggtgagatcatctccaccaagttcgcagttcaaagccacacttctggagtcttaccaggtctataaacgttaccagatggttattcacaagaacccacctgatacgccaaccgaaagccagttcacaagattcctttgcagttcacccttggaggcagagactccccctaatgggccagattgtggctatggctcctttcaccagcagtactggcttgacggaaagatcattgctgtgggggtgattgacatcctcccaaactgtgtatcatctgtgtatttgtactacgatcctgattattcgtttttgtctttgggcgtctactctgcactacgagaaattgcttttactaggcagcttcatgagaaaacttctcaactcagctattattatatgggtttctacattcattcatgtcccaagatgaaatataagggtcagtatagaccttctgatttgctgtgccctgagacatatgtttgggtacccattgagcaatgcctgccttcacttgaaaactccaagtactgccgtttcaaccaggacccagaagcagtggatgaggatcgcagtacggaacctgaccgattgcaggtgtttcacaagagagccatcatgccttacggtgtttataagaaacagcagaaagacccaagtgaggaggctgctgttctgcagtacgccagcctggtggggcagaagtgctccgagcggatgctgctgttcagaaactgacctgttcacctctgccgggaagttcctgtgttgtgctgatgatttgtgccaggatacatattcagtacctgtggggaaataactgtcaccacccacaaattagacattttttattttgactatctatggcttttaaaaaatattttgtggcaatgtatctgtgagaatctcatagttaatataaagattttaaaactgcattatgacctagcccccataattgggatttatcattttggaggattctttctagagcaagatatgctcaaattctcctgtttgtattttgtaaaatgaagaagtgaatctaagtaacttaatcacagttgtgcattttttttggttctgttagagaaattaaaacagactgtttcctcaggcccattttaaactgaacttatgctaggaaaccttaagtatggggaaggtagaaagttcatttcatcacttagaaaatatgtcttctcaagaacaaaactgtgctgttacaactcagtgttcaatgtgaaattgctgccaaatgttatgtagtttaatagagaacttgaaaaaataaaacattaaaatggagcttgtgttagcatcaggtatccatttgttcaggacagtcctgttcatgtctgttgtcttggcatagttttttcccctagaatatagtactcccttttactctaaaaaatatcccagtttggacaataaaatacataattactctagttatattatttgctttacttctaaaaatgtaagaaattgaatttttttaaagaaaaatgttggttcctgccttgatctaagtctcatccaaaggaaataaatagtcactagttttttatcttacaactcaggacatttgtctttggttattaatggaaattagtatgtgattactttcatagttatgccacaaatcacattgaagaaggaatcattccgacctctgttccaggacaagagctagaacaatccatttcttgtcctttgatttgagagtcacagtcagggtggcttctgccacccttagtaactcagagcagaggccagccccctccttccctcactttcttttgctgagtcctttgcccacctgtcaaggtggcaggcactgtgctgggtacaggaggacagtcagacatgtcccttcttagctatagtcgagctgtctgggaaacaggatgaaaaacaggagggttattttcttgtgccctctttgtcagctgatcccctcttctgctaccagctatttggccagcaagccgtttttagtccccactttgcccatttttctgttttggttcatcgtttcttaaaagccatgttataaaacatggtagtttgaatcctgttgctaattttaaactttcctctaaaatgtactgaattttgacaaaaatttgaaaatatcctcagctaactagaataaaaaggatcataaaacaatgattttaaaactgaaatctctagaaactcaacatccaagtcagccgcatttcttcattcagagtgtgtgtgtcacacctgccaaggtgctgcgtactctgctaaccgagctagagtagtgagcaaagccattttctctgatcacaagattttacatttttctgggattttgacctgcaaagtagtctcgtaagagcatttgagagacttacttggaactgccttcagaatctatagagccttttttctctttttcctctaaaatgaaaagagcttcattttatgattataacaaaagtgacactgtaagcagttagaacattaagaagtataaataaaaagtaaaaatcatctacaaccctaccatactcagaaggagaaaagaactgtcatgtatgtatacacacatacctatgtaattttaatataaatagaattatgttctacatgctgttttatttcctcaacagtaaattatggacatgtctgaaatgtgaaataaatttcaaaataaggcttcagaaagtgtagtaagtaatctctgcattattaaaaataagcagggtagggctggtacttggctcccttagcatttgaatgtccaacttggtgttatcactgtatcttccctccatttgtctttgtgattagcatgtaaaatggtattcataaagatcacaacccttgaatatcagatgaagagaaaacttgactccaacatcttaccacaactctggtttcttcctgcagaattcattttcagaggaaaatgatgaatcatccctgtctgtgaaccactgtgctttccttgagggtggcattgtaggttgacaccagcaaagactcagagtgacttgagcattggagatccttctacttggctgctgtattcatgcattatgttggtttgagaatagctagtgtattgatccaagtagtcaaagtgtcttaaaaggacacctatttgtccttttgagccccagctgagtgaatactgatagtggactagaaaagcatagtcaagaaaagtgacccaccttgttacttgaccagcagtctagctgagagatctgattttatgttcgtaactttctgtaaagaaagacacaaggacttttcaaagacagtttatatctttccaaggcaggaagctttgcatttgcaatcttagtgttgtgtccctttctgattttcaaatacatcacacctgccttcctgttttgggagcaaagatgtaatttcaattccccttgctaccgtccttatttaaattatttccattctaagagatttttgttatttttttaaatgtaatctgagcacttttttgtattctaaaagatagatgatatcagataaatatgttgtacatttgattaaaattatttagataaatattactatgttgacttttaaatagctttatcctatttttcattcattttgcaaatatttttattgccattgtgtagattgatgggggatccatcatacagtcgacc

SEQ ID NO: 406570 - DNA, 1669 bp, Homo sapiens
cccggggggcgcgctgcattgtggggtggcggcggcggccgcgctagcgacgcggggccgggcggctgagcgttcgcggggccgaggccatggctttctgggcggggggttcgcccagcgtcgtggactatttccctagcgaggacttctaccgctgcggctactgcaagaacgagtcgggcagccgctccaatggcatgtgggcacattccatgacagtacaggattatcaggatctcatagaccgaggatggcgaagaagtggaaaatatgtgtacaaacctgtcatgaatcaaacatgttgtcctcagtacacaataaggtgccgacctttacaatttcagccttcaaaatctcacaagaaggttttgaaaaaaatgttgaaatttctggctaaaggggaggttcccaaaggaagttgtgaggatgagcccatggattccacaatggatgatgctgttgcgggtgactttgcattgataaataaactggatatacagtgtgatcttaaaacactcagtgatgacatcaaagagagtttagagagtgaaggaaaaaattcaaagaaagaagaacctcaggaattacttcagtcacaagatttcgtaggagagaagttgggctctggtgaaccgtcacattcagttaaagttcacacagttcctaagccaggcaaaggggctgatttgagtaagcctccatgtcgaaaagcaaaggaaatccggaaagaaaggaaaaggttaaaactaatgcagcagaacccagctggagaacttgagggtttccaggctcaaggtcacccaccatctttgtttccaccaaaggctaaatccaaccagccaaaatcactcgaagatttaatttttgagtctttaccagagaatgcatcacacaagttagaggtgagggtggtgagatcatctccaccaagttcgcagttcaaagccacacttctggagtcttaccaggtctataaacgttaccagatggttattcacaagaacccacctgatacgccaaccgaaagccagttcacaagattcctttgcagttcacccttggaggcagagactccccctaatgggccagattgtggctatggctcctttcaccagcagtactggcttgacggaaagatcattgctgtgggggtgattgacatcctcccaaactgtgtatcatctgtgtatttgtactacgatcctgattattcgtttttgtctttgggcgtctactctgcactacgagaaattgcttttactaggcagcttcatgagaaaacttctcaactcagctattattatatgggtttctacattcattcatgtcccaagatgaaatataagggtcagtatagaccttctgatttgctgtgccctgagacatatgtttgggtacccattgagcaatgcctgccttcacttgaaaactccaagtactgccgtttcaaccaggacccagaagcagcaccctcacagacacaccgaggatcggtactttgcatccttcaatccaatcaagttgacactcagtattaaccatcacaactactgaaaaagcattaaaattctgtaaacattaatggtcttcctgcatcctgtttataagcaaatttgaaatttaaaaaatttgtgtgatgttagaaggcagcaataaatgtagaaaatta

SEQ ID NO: 406571 - DNA, 574 bp, Homo sapiens
cccggggggcgcgctgcattgtggggtggcggcggcggccgcgctagcgacgcggggccgggcggctgagcgttcgcggggccgaggccatggctttctgggcggggggttcgcccagcgtcgtggactatttccctagcgaggacttctaccgctgcggctactgcaagaacgagtcgggcagccgctccaatggtgagcgagccgggccggcgggcgtgggaagccgggcgcccgggtctcgggatcccagggtcccccagcgaggacgcgagggggccggagcccctggccccagtgccacggccgagacggagggggcactctcgggagggccgcggcgccggcttagcggggcagcttcgcggtgcctgttctgcaggaaaatcctaaccggtgcccggactctcgaaatcgtggtggtctccccagagtcgggagacggacgcccgtctggggtagattgtgtgaggtgaaggacggcgcgcagtgccagggaacgccccagagccgtagttaatggccggggctgaccggtgggtgctgcggtgggagcgtcccgggagcgagggcg

SEQ ID NO: 406572 - DNA, 4898 bp, Homo sapiens
cccggggggcgcgctgcattgtggggtggcggcggcggccgcgctagcgacgcggggccgggcggctgagcgttcgcggggccgaggccatggctttctgggcggggggttcgcccagcgtcgtggactatttccctagcgaggacttctaccgctgcggctactgcaagaacgagtcgggcagccgctccaatggcatgtgggcacattccatgacagtacaggattatcaggatctcatagaccgaggatggcgaagaagtggaaaatatgtgtacaaacctgtcatgaatcaaacatgttgtcctcagtacacaataaggtgccgacctttacaatttcagccttcaaaatctcacaagaaggttttgaaaaaaatgttgaaatttctggctaaaggggaggttcccaaaggaagttgtgaggatgagcccatggattccacaatggatgatgctgttgcgggtgactttgcattgataaataaactggatatacagtgtgatcttaaaacactcagtgatgacatcaaagagagtttagagagtgaaggaaaaaattcaaagaaagaagaacctcaggaattacttcagtcacaagatttcgtaggagagaagttgggctctggtgaaccgtcacattcagttaaagttcacacagttcctaagccaggcaaaggggctgatttgagtaagcctccatgtcgaaaagcaaaggaaatccggaaagaaaggaaaaggttaaaactaatgcagcagaacccagctggagaacttgagggtttccaggctcaaggtcacccaccatctttgtttccaccaaaggctaaatccaaccagccaaaatcactcgaagatttaatttttgagtctttaccagagaatgcatcacacaagttagaggtgaggttagtacctgtctcctttgaggacccagagttcaagtcgtctttcagccagtccttttctttgtatgtcaagtatcaagtggccatacaccaggatccacccgatgaatgtgggaagactgagcaagattcctttgcagttcacccttggaggcagagactccccctaatgggccagattgtggctatggctcctttcaccagcagtactggcttgacggaaagatcattgctgtgggggtgattgacatcctcccaaactgtgtatcatctgtgtatttgtactacgatcctgattattcgtttttgtctttgggcgtctactctgcactacgagaaattgcttttactaggcagcttcatgagaaaacttctcaactcagctattattatatgggtttctacattcattcatgtcccaagatgaaatataagggtcagtatagaccttctgatttgctgtgccctgagacatatgtttgggtacccattgagcaatgcctgccttcacttgaaaactccaagtactgccgtttcaaccaggacccagaagcagtggatgaggatcgcagtacggaacctgaccgattgcaggtgtttcacaagagagccatcatgccttacggtgtttataagaaacagcagaaagacccaagtgaggaggctgctgttctgcagtacgccagcctggtggggcagaagtgctccgagcggatgctgctgttcagaaactgacctgttcacctctgccgggaagttcctgtgttgtgctgatgatttgtgccaggatacatattcagtacctgtggggaaataactgtcaccacccacaaattagacattttttattttgactatctatggcttttaaaaaatattttgtggcaatgtatctgtgagaatctcatagttaatataaagattttaaaactgcattatgacctagcccccataattgggatttatcattttggaggattctttctagagcaagatatgctcaaattctcctgtttgtattttgtaaaatgaagaagtgaatctaagtaacttaatcacagttgtgcattttttttggttctgttagagaaattaaaacagactgtttcctcaggcccattttaaactgaacttatgctaggaaaccttaagtatggggaaggtagaaagttcatttcatcacttagaaaatatgtcttctcaagaacaaaactgtgctgttacaactcagtgttcaatgtgaaattgctgccaaatgttatgtagtttaatagagaacttgaaaaaataaaacattaaaatggagcttgtgttagcatcaggtatccatttgttcaggacagtcctgttcatgtctgttgtcttggcatagttttttcccctagaatatagtactcccttttactctaaaaaatatcccagtttggacaataaaatacataattactctagttatattatttgctttacttctaaaaatgtaagaaattgaatttttttaaagaaaaatgttggttcctgccttgatctaagtctcatccaaaggaaataaatagtcactagttttttatcttacaactcaggacatttgtctttggttattaatggaaattagtatgtgattactttcatagttatgccacaaatcacattgaagaaggaatcattccgacctctgttccaggacaagagctagaacaatccatttcttgtcctttgatttgagagtcacagtcagggtggcttctgccacccttagtaactcagagcagaggccagccccctccttccctcactttcttttgctgagtcctttgcccacctgtcaaggtggcaggcactgtgctgggtacaggaggacagtcagacatgtcccttcttagctatagtcgagctgtctgggaaacaggatgaaaaacaggagggttattttcttgtgccctctttgtcagctgatcccctcttctgctaccagctatttggccagcaagccgtttttagtccccactttgcccatttttctgttttggttcatcgtttcttaaaagccatgttataaaacatggtagtttgaatcctgttgctaattttaaactttcctctaaaatgtactgaattttgacaaaaatttgaaaatatcctcagctaactagaataaaaaggatcataaaacaatgattttaaaactgaaatctctagaaactcaacatccaagtcagccgcatttcttcattcagagtgtgtgtgtcacacctgccaaggtgctgcgtactctgctaaccgagctagagtagtgagcaaagccattttctctgatcacaagattttacatttttctgggattttgacctgcaaagtagtctcgtaagagcatttgagagacttacttggaactgccttcagaatctatagagccttttttctctttttcctctaaaatgaaaagagcttcattttatgattataacaaaagtgacactgtaagcagttagaacattaagaagtataaataaaaagtaaaaatcatctacaaccctaccatactcagaaggagaaaagaactgtcatgtatgtatacacacatacctatgtaattttaatataaatagaattatgttctacatgctgttttatttcctcaacagtaaattatggacatgtctgaaatgtgaaataaatttcaaaataaggcttcagaaagtgtagtaagtaatctctgcattattaaaaataagcagggtagggctggtacttggctcccttagcatttgaatgtccaacttggtgttatcactgtatcttccctccatttgtctttgtgattagcatgtaaaatggtattcataaagatcacaacccttgaatatcagatgaagagaaaacttgactccaacatcttaccacaactctggtttcttcctgcagaattcattttcagaggaaaatgatgaatcatccctgtctgtgaaccactgtgctttccttgagggtggcattgtaggttgacaccagcaaagactcagagtgacttgagcattggagatccttctacttggctgctgtattcatgcattatgttggtttgagaatagctagtgtattgatccaagtagtcaaagtgtcttaaaaggacacctatttgtccttttgagccccagctgagtgaatactgatagtggactagaaaagcatagtcaagaaaagtgacccaccttgttacttgaccagcagtctagctgagagatctgattttatgttcgtaactttctgtaaagaaagacacaaggacttttcaaagacagtttatatctttccaaggcaggaagctttgcatttgcaatcttagtgttgtgtccctttctgattttcaaatacatcacacctgccttcctgttttgggagcaaagatgtaatttcaattccccttgctaccgtccttatttaaattatttccattctaagagatttttgttatttttttaaatgtaatctgagcacttttttgtattctaaaagatagatgatatcagataaatatgttgtacatttgattaaaattatttagataaatattactatgttgacttttaaatagctttatcctatttttcattcattttgcaaatatttgttgtgtgtagtttcttaacgtgtcagaatctattatgtaaaagaacctttccagatttctgaacagtatatgctttgattttataggctttatattatttcagtatgaataaagataaggaatatgaaacagttaactaaaatgtatctgtcgttgctaacttgaaaaatgaagtagaaacagttggaaaatgtttgaattagaagttattcaagtgcacactcttttctaaaagaaagccaatgactataaggcaaaagaagtttgactgcatgtggtattttttgctcttgtatatgctttttgaacaagctatttgataaagcctgaatggaaaaaataaagctgtttctatctgca

SEQ ID NO: 406573 - DNA, 4824 bp, Homo sapiens
tggtcggcccgagcggaccctcgcggcggccatggcgtcggtggtggaatacaagggcctcagggccggctaccactgcggctacctgcgattccaaggagggcaaagcgtcctgcggcatgtgggcacattccatgacagtacaggattatcaggatctcatagaccgaggatggcgaagaagtggaaaatatgtgtacaaacctgtcatgaatcaaacatgttgtcctcagtacacaataaggtgccgacctttacaatttcagccttcaaaatctcacaagaaggttttgaaaaaaatgttgaaatttctggctaaaggggaggttcccaaaggaagttgtgaggatgagcccatggattccacaatggatgatgctgttgcgggtgactttgcattgataaataaactggatatacagtgtgatcttaaaacactcagtgatgacatcaaagagagtttagagagtgaaggaaaaaattcaaagaaagaagaacctcaggaattacttcagtcacaagatttcgtaggagagaagttgggctctggtgaaccgtcacattcagttaaagttcacacagttcctaagccaggcaaaggggctgatttgagtaagcctccatgtcgaaaagcaaaggaaatccggaaagaaaggaaaaggttaaaactaatgcagcagaacccagctggagaacttgagggtttccaggctcaaggtcacccaccatctttgtttccaccaaaggctaaatccaaccagccaaaatcactcgaagatttaatttttgagtctttaccagagaatgcatcacacaagttagaggtgagggtggtgagatcatctccaccaagttcgcagttcaaagccacacttctggagtcttaccaggtctataaacgttaccagatggttattcacaagaacccacctgatacgccaaccgaaagccagttcacaagattcctttgcagttcacccttggaggcagagactccccctaatgggccagattgtggctatggctcctttcaccagcagtactggcttgacggaaagatcattgctgtgggggtgattgacatcctcccaaactgtgtatcatctgtgtatttgtactacgatcctgattattcgtttttgtctttgggcgtctactctgcactacgagaaattgcttttactaggcagcttcatgagaaaacttctcaactcagctattattatatgggtttctacattcattcatgtcccaagatgaaatataagggtcagtatagaccttctgatttgctgtgccctgagacatatgtttgggtacccattgagcaatgcctgccttcacttgaaaactccaagtactgccgtttcaaccaggacccagaagcagtggatgaggatcgcagtacggaacctgaccgattgcaggtgtttcacaagagagccatcatgccttacggtgtttataagaaacagcagaaagacccaagtgaggaggctgctgttctgcagtacgccagcctggtggggcagaagtgctccgagcggatgctgctgttcagaaactgacctgttcacctctgccgggaagttcctgtgttgtgctgatgatttgtgccaggatacatattcagtacctgtggggaaataactgtcaccacccacaaattagacattttttattttgactatctatggcttttaaaaaatattttgtggcaatgtatctgtgagaatctcatagttaatataaagattttaaaactgcattatgacctagcccccataattgggatttatcattttggaggattctttctagagcaagatatgctcaaattctcctgtttgtattttgtaaaatgaagaagtgaatctaagtaacttaatcacagttgtgcattttttttggttctgttagagaaattaaaacagactgtttcctcaggcccattttaaactgaacttatgctaggaaaccttaagtatggggaaggtagaaagttcatttcatcacttagaaaatatgtcttctcaagaacaaaactgtgctgttacaactcagtgttcaatgtgaaattgctgccaaatgttatgtagtttaatagagaacttgaaaaaataaaacattaaaatggagcttgtgttagcatcaggtatccatttgttcaggacagtcctgttcatgtctgttgtcttggcatagttttttcccctagaatatagtactcccttttactctaaaaaatatcccagtttggacaataaaatacataattactctagttatattatttgctttacttctaaaaatgtaagaaattgaatttttttaaagaaaaatgttggttcctgccttgatctaagtctcatccaaaggaaataaatagtcactagttttttatcttacaactcaggacatttgtctttggttattaatggaaattagtatgtgattactttcatagttatgccacaaatcacattgaagaaggaatcattccgacctctgttccaggacaagagctagaacaatccatttcttgtcctttgatttgagagtcacagtcagggtggcttctgccacccttagtaactcagagcagaggccagccccctccttccctcactttcttttgctgagtcctttgcccacctgtcaaggtggcaggcactgtgctgggtacaggaggacagtcagacatgtcccttcttagctatagtcgagctgtctgggaaacaggatgaaaaacaggagggttattttcttgtgccctctttgtcagctgatcccctcttctgctaccagctatttggccagcaagccgtttttagtccccactttgcccatttttctgttttggttcatcgtttcttaaaagccatgttataaaacatggtagtttgaatcctgttgctaattttaaactttcctctaaaatgtactgaattttgacaaaaatttgaaaatatcctcagctaactagaataaaaaggatcataaaacaatgattttaaaactgaaatctctagaaactcaacatccaagtcagccgcatttcttcattcagagtgtgtgtgtcacacctgccaaggtgctgcgtactctgctaaccgagctagagtagtgagcaaagccattttctctgatcacaagattttacatttttctgggattttgacctgcaaagtagtctcgtaagagcatttgagagacttacttggaactgccttcagaatctatagagccttttttctctttttcctctaaaatgaaaagagcttcattttatgattataacaaaagtgacactgtaagcagttagaacattaagaagtataaataaaaagtaaaaatcatctacaaccctaccatactcagaaggagaaaagaactgtcatgtatgtatacacacatacctatgtaattttaatataaatagaattatgttctacatgctgttttatttcctcaacagtaaattatggacatgtctgaaatgtgaaataaatttcaaaataaggcttcagaaagtgtagtaagtaatctctgcattattaaaaataagcagggtagggctggtacttggctcccttagcatttgaatgtccaacttggtgttatcactgtatcttccctccatttgtctttgtgattagcatgtaaaatggtattcataaagatcacaacccttgaatatcagatgaagagaaaacttgactccaacatcttaccacaactctggtttcttcctgcagaattcattttcagaggaaaatgatgaatcatccctgtctgtgaaccactgtgctttccttgagggtggcattgtaggttgacaccagcaaagactcagagtgacttgagcattggagatccttctacttggctgctgtattcatgcattatgttggtttgagaatagctagtgtattgatccaagtagtcaaagtgtcttaaaaggacacctatttgtccttttgagccccagctgagtgaatactgatagtggactagaaaagcatagtcaagaaaagtgacccaccttgttacttgaccagcagtctagctgagagatctgattttatgttcgtaactttctgtaaagaaagacacaaggacttttcaaagacagtttatatctttccaaggcaggaagctttgcatttgcaatcttagtgttgtgtccctttctgattttcaaatacatcacacctgccttcctgttttgggagcaaagatgtaatttcaattccccttgctaccgtccttatttaaattatttccattctaagagatttttgttatttttttaaatgtaatctgagcacttttttgtattctaaaagatagatgatatcagataaatatgttgtacatttgattaaaattatttagataaatattactatgttgacttttaaatagctttatcctatttttcattcattttgcaaatatttgttgtgtgtagtttcttaacgtgtcagaatctattatgtaaaagaacctttccagatttctgaacagtatatgctttgattttataggctttatattatttcagtatgaataaagataaggaatatgaaacagttaactaaaatgtatctgtcgttgctaacttgaaaaatgaagtagaaacagttggaaaatgtttgaattagaagttattcaagtgcacactcttttctaaaagaaagccaatgactataaggcaaaagaagtttgactgcatgtggtattttttgctcttgtatatgctttttgaacaagctatttgataaagcctgaatggaaaaaataaagctgtttctatctgca

SEQ ID NO: 406574 - DNA, 4595 bp, Homo sapiens
cccggggggcgcgctgcattgtggggtggcggcggcggccgcgctagcgacgcggggccgggcggctgagcgttcgcggggccgaggccatggctttctgggcggggggttcgcccagcgtcgtggactatttccctagcgaggacttctaccgctgcggctactgcaagaacgagtcgggcagccgctccaatggcatgtgggcacattccatgacagtacaggattatcaggatctcatagaccgaggatggcgaagaagtggaaaatatgtgtacaaacctgtcatgaatcaaacatgttgtcctcagtacacaataaggtgccgacctttacaatttcagccttcaaaatctcacaagaaggttttgaaaaaaatgttgaaatttctggctaaaggggaggttcccaaaggaagttgtgaggatgagcccatggattccacaatggatgatgctgttgcgggtgactttgcattgataaataaactggatatacagtgtgatcttaaaacactcagtgatgacatcaaagagagtttagagagtgaaggaaaaaattcaaagaaagaagaacctcaggaattacttcagtcacaagatttcgtaggagagaagttgggctctggtgaaccgtcacattcagttaaagttcacacagttcctaagccaggcaaaggggctgatttgagtaagcctccatgtcgaaaagcaaaggaaatccggaaagaaaggaaaaggttaaaactaatgcagcagaacccagctggagaacttgagggtttccaggctcaaggtcacccaccatctttgtttccaccaaaggctaaatccaaccagccaaaatcactcgaagatttaatttttgagtctttaccagagaatgcatcacacaagttagaggtgagggtggtgagatcatctccaccaagttcgcagttcaaagccacacttctggagtcttaccaggtctataaacgttaccagatggttattcacaagaacccacctgatacgccaaccgaaagccagttcacaagattcctttgcagttcacccttggaggcagagactccccctaatgggccagattgtggctatggctcctttcaccagcagtactggcttgacggaaagatcattgctgtgggggtgattgacatcctcccaaactgtgtatcatctgtgtatttgtactacgatcctgattattcgtttttgtctttgggcgtctactctgcactacgagaaattgcttttactaggcagcttcatgagaaaacttctcaactcagctattattatatgggtttctacattcattcatgtcccaagatgaaatataagggtcagtatagaccttctgatttgctgtgccctgagacatatgtttgggtacccattgagcaatgcctgccttcacttgaaaactccaagtactgccgtttcaaccaggacccagaagcagtggatgaggatcgcagtacggaacctgaccgattgcaggtgtttcacaagagagccatcatgccttacggtgtttataagaaacagcagaaagacccaagtgaggaggctgctgttctgcagtacgccagcctggtggggcagaagtgctccgagcggatgctgctgttcagaaactgacctgttcacctctgccgggaagttcctgtgttgtgctgatgatttgtgccaggatacatattcagtacctgtggggaaataactgtcaccacccacaaattagacattttttattttgactatctatggcttttaaaaaatattttgtggcaatgtatctgtgagaatctcatagttaatataaagattttaaaactgcattatgacctagcccccataattgggatttatcattttggaggattctttctagagcaagatatgctcaaattctcctgtttgtattttgtaaaatgaagaagtgaatctaagtaacttaatcacagttgtgcattttttttggttctgttagagaaattaaaacagactgtttcctcaggcccattttaaactgaacttatgctaggaaaccttaagtatggggaaggtagaaagttcatttcatcacttagaaaatatgtcttctcaagaacaaaactgtgctgttacaactcagtgttcaatgtgaaattgctgccaaatgttatgtagtttaatagagaacttgaaaaaataaaacattaaaatggagcttgtgttagcatcaggtatccatttgttcaggacagtcctgttcatgtctgttgtcttggcatagttttttcccctagaatatagtactcccttttactctaaaaaatatcccagtttggacaataaaatacataattactctagttatattatttgctttacttctaaaaatgtaagaaattgaatttttttaaagaaaaatgttggttcctgccttgatctaagtctcatccaaaggaaataaatagtcactagttttttatcttacaactcaggacatttgtctttggttattaatggaaattagtatgtgattactttcatagttatgccacaaatcacattgaagaaggaatcattccgacctctgttccaggacaagagctagaacaatccatttcttgtcctttgatttgagagtcacagtcagggtggcttctgccacccttagtaactcagagcagaggccagccccctccttccctcactttcttttgctgagtcctttgcccacctgtcaaggtggcaggcactgtgctgggtacaggaggacagtcagacatgtcccttcttagctatagtcgagctgtctgggaaacaggatgaaaaacaggagggttattttcttgtgccctctttgtcagctgatcccctcttctgctaccagctatttggccagcaagccgtttttagtccccactttgcccatttttctgttttggttcatcgtttcttaaaagccatgttataaaacatggtagtttgaatcctgttgctaattttaaactttcctctaaaatgtactgaattttgacaaaaatttgaaaatatcctcagctaactagaataaaaaggatcataaaacaatgattttaaaactgaaatctctagaaactcaacatccaagtcagccgcatttcttcattcagagtgtgtgtgtcacacctgccaaggtgctgcgtactctgctaaccgagctagagtagtgagcaaagccattttctctgatcacaagattttacatttttctgggattttgacctgcaaagtagtctcgtaagagcatttgagagacttacttggaactgccttcagaatctatagagccttttttctctttttcctctaaaatgaaaagagcttcattttatgattataacaaaagtgacactgtaagcagttagaacattaagaagtataaataaaaagtaaaaatcatctacaaccctaccatactcagaaggagaaaagaactgtcatgtatgtatacacacatacctatgtaattttaatataaatagaattatgttctacatgctgttttatttcctcaacagtaaattatggacatgtctgaaatgtgaaataaatttcaaaataaggcttcagaaagtgtagtaagtaatctctgcattattaaaaataagcagggtagggctggtacttggctcccttagcatttgaatgtccaacttggtgttatcactgtatcttccctccatttgtctttgtgattagcatgtaaaatggtattcataaagatcacaacccttgaatatcagatgaagagaaaacttgactccaacatcttaccacaactctggtttcttcctgcagaattcattttcagaggaaaatgatgaatcatccctgtctgtgaaccactgtgctttccttgagggtggcattgtaggttgacaccagcaaagactcagagtgacttgagcattggagatccttctacttggctgctgtattcatgcattatgttggtttgagaatagctagtgtattgatccaagtagtcaaagtgtcttaaaaggacacctatttgtccttttgagccccagctgagtgaatactgatagtggactagaaaagcatagtcaagaaaagtgacccaccttgttacttgaccagcagtctagctgagagatctgattttatgttcgtaactttctgtaaagaaagacacaaggacttttcaaagacagtttatatctttccaaggcaggaagctttgcatttgcaatcttagtgttgtgtccctttctgattttcaaatacatcacacctgccttcctgttttgggagcaaagatgtaatttcaattccccttgctaccgtccttatttaaattatttccattctaagagatttttgttatttttttaaatgtaatctgagcacttttttgtattctaaaagatagatgatatcagataaatatgttgtacatttgattaaaattatttagataaatattactatgttgacttttaaatagctttatcctatttttcattcattttgcaaatatttgttgtgtgtagtttcttacccgccctcggaatcccttatccaggtgaaccccgc

SEQ ID NO: 406575 - DNA, 1192 bp, Homo sapiens
cccggggggcgcgctgcattgtggggtggcggcggcggccgcgctagcgacgcggggccgggcggctgagcgttcgcggggccgaggccatggctttctgggcggggggttcgcccagcgtcgtggactatttccctagcgaggacttctaccgctgcggctactgcaagaacgagtcgggcagccgctccaatggcatgtgggcacattccatgacagtacaggattatcaggatctcatagaccgaggatggcgaagaagtggaaaatatgtgtacaaacctgtcatgaatcaaacatgttgtcctcagtacacaataaggtgccgacctttacaatttcagccttcaaaatctcacaagaaggttttgaaaaaaatgttgaaatttctggctaaaggggaggttcccaaaggaagttgtgaggatgagcccatggattccacaatggatgatgctgttgcgggtgactttgcattgataaataaactggatatacagtgtgatcttaaaacactcagtgatgacatcaaagagagtttagagagtgaaggaaaaaattcaaagaaagaagaacctcaggaattacttcagtcacaagatttcgtaggagagaagttgggctctggtgaaccgtcacattcagttaaagttcacacagttcctaagccaggcaaaggggctgatttgagtaagcctccatgtcgaaaagcaaaggaaatccggaaagaaaggaaaaggttaaaactaatgcagcagaacccagctggagaacttgagggtttccaggctcaaggtcacccaccatctttgtttccaccaaaggctaaatccaaccagccaaaatcactcgaagatttaatttttgagtctttaccagagaatgcatcacacaagttagaggtgaggttagtacctgtctcctttgaggacccagagttcaagtcgtctttcagccagtccttttctttgtatgtcaagtatcaagtggccatacaccaggatccacccgatgaatgtgggaagactgagattaagaaattgctactcgggaagctaaagcgggaaaatcgcttaaacccaggacgcagaggttgccgtgagctgagatggtgccactgaactccagactggatgcagaatgagactctgtctcaaaaaaataaataaataaataagttgattactactaa

SEQ ID NO: 406576 - DNA, 368 bp, Homo sapiens
ttcccctgcacgtgctctcttgcctgccaccatgtaagacgtggctttgctccttctttgctttctgccgtgattgtgaggcctccccagccatatggaactgtgagtccattaaaactctttcctttataaattactcagtctcgggtatgtctttattagcagcatgagaacagactaatacagtaagtcttcattgaatcatttgggcaggtttatgaaagcaatccagaaccccagagaccacttctcctttatgatcaacaactcccttgtcactgattcttccaactggcattgaaacttgctcaaagcactccctgtttgaaacctacaaaccctttaactattaccacttctctttgatt

SEQ ID NO: 406577 - DNA, 1392 bp, Homo sapiens
agatcgaaagagatgggatggcacaaaaaacacaagaaactcctggcaatttgaattatttccgctcctgcacctcagtttccgcctctgtaaaatgggctcgcgctgccttaaccctcctccgcccgcccactctgacaccaccggaaaggattcattcgggaacattcgtggggcggagacgggacagggggcctcggcctgtagcgtcacgtccgccagggttacctgtggggctgggagcgaaccgcactcgcaccgcaaccccggcatcagtgcccaggttggcctcgcgccgtcctacggggcggccagaggccgccgaaggcctctcgcgctgcagcagtctcctcaggagcgccgccatgtgggatggaatagcacacgtgggcttctccctgcgtcacttccggggactgcttccagccaatcggcctccgccacagccagcgcagccttgccccttaaagtcacaggccccctagcgcgaaatcccacgcccccctggacggctgcggccgcactcgccaccagggggcagaggccagagaaagggctatttcccggacccgcccccttcagcttgggaaagcgaaagcgtggcaggggccggacctgggagcggaggaggcgggtctccatagaaacctccacctgtttccggccgggctgtgagagattaggggctgctgcgggggccaatctcagccagctcgcctcttcccagcggcctctgcgggagcggtgggtgttgtacacaatcatcatggcggcggccggggccccggatggcatggaggaacctggcatggacacggaggccgagactgtggctactgaggctcccgcgcggcccgtcaactgcctggaggctgaagccgcggcgggggcggcggccgaggactccggcgccgcacgaggcagcctgcagccggccccggcccagccccctggggaccccgcagcccaggcctcggtcagcaacggcgaagacgcgggcggcggcgcgggcagggagctggtggacttgaagatcatctggaataagaccaagcatgacgtgaagttccccctggacagcacaggctccgagctgaaacagaagatccactcgattacaggtctcccgcctgccatgcagaaagtcatgtataagggactcgtccccgaggataaaacattgagagaaataaaagtgaccagtggggccaagatcatggtggttggctccaccatcaatgatgttttagcagtaaacacacccaaagatgctgcgcagcaggatgcaaaggccgaagagaacaagaaggagcctctctgcaggcagaaaggcccatgatggaaatttatggcagcagttgggtgccgcagagtggaggtgacaactacctg

SEQ ID NO: 406578 - DNA, 5507 bp, Homo sapiens
agatcgaaagagatgggatggcacaaaaaacacaagaaactcctggcaatttgaattatttccgctcctgcacctcagtttccgcctctgtaaaatgggctcgcgctgccttaaccctcctccgcccgcccactctgacaccaccggaaaggattcattcgggaacattcgtggggcggagacgggacagggggcctcggcctgtagcgtcacgtccgccagggttacctgtggggctgggagcgaaccgcactcgcaccgcaaccccggcatcagtgcccaggttggcctcgcgccgtcctacggggcggccagaggccgccgaaggcctctcgcgctgcagcagtctcctcaggagcgccgccatgtgggatggaatagcacacgtgggcttctccctgcgtcacttccggggactgcttccagccaatcggcctccgccacagccagcgcagccttgccccttaaagtcacaggccccctagcgcgaaatcccacgcccccctggacggctgcggccgcactcgccaccagggggcagaggccagagaaagggctatttcccggacccgcccccttcagcttgggaaagcgaaagcgtggcaggggccggacctgggagcggaggaggcgggtctccatagaaacctccacctgtttccggccgggctgtgagagattaggggctgctgcgggggccaatctcagccagctcgcctcttcccagcggcctctgcgggagcggtgggtgttgtacacaatcatcatggcggcggccggggccccggatggcatggaggaacctggcatggacacggaggccgagactgtggctactgaggctcccgcgcggcccgtcaactgcctggaggctgaagccgcggcgggggcggcggccgaggactccggcgccgcacgaggcagcctgcagccggccccggcccagccccctggggaccccgcagcccaggcctcggtcagcaacggcgaagacgcgggcggcggcgcgggcagggagctggtggacttgaagatcatctggaataagaccaagcatgacgtgaagttccccctggacagcacaggctccgagctgaaacagaagatccactcgattacaggtctcccgcctgccatgcagaaagtcatgtataagggactcgtccccgaggataaaacattgagagaaataaaagtgaccagtggggccaagatcatggtggttggctccaccatcaatgatgttttagcagtaaacacacccaaagatgctgcgcagcaggatgcaaaggccgaagagaacaagaaggagcctctctgcaggcagaaacaacacaggaaagtgttggataaaggaaaacctgaagatgtgatgccatctgttaagggggcccaggagcgcctgccaacggtaccgctgtccggcatgtacaataaatctggaggaaaagtgagactcacctttaaactagaacaagaccagctgtggattggcactaaagagcggactgagaaattgcccatgggctccataaaaaatgtggtcagtgaacctatcgaaggacatgaagactaccacatgatggcgtttcagttgggccccacggaagcctcttactactgggtgtactgggttccaactcaatatgtggatgcaatcaaagacactgtgctggggaaatggcagtatttttgaaagcactttcacctctggcccaggagactgacccaaagtgaaggacattgccgggagaggcctgcagcatccctggatttcagagttctggaactttgttcataaaaaatctatattcaatctgaggtgatgtggtgactgaagccagaggtgatgtactttcaccattagcttaattttaacttaaaattaccagttccctttcttgcagtcagcttcataccatttttaaagtcaatacgatggaaatcaataaatctgaattccgaacatgttgtgtggaatactcttaagtgtgtttgagagtagatctgccaattatgttgacaagggaatgatcaaaagctttgttttttttaaaaaaaaaaaagcagtttcaattgaaatattttcatacatctttggttgcaaacatttggactgcattgcaatgagttggggtgttttttttttccttttttgtataaaattgtatgcaaaatgggggtgggttagtaagccacatatttctgtccattgattcagatttaattctttccctttttcattctctcgcttcctcaatttgagtttttgttttaagaacccaaagatgtcagttcttcttttggtacctcatcaacgcttcctttcctgggctccctcccgccgtgctgctgctgcctgtgaacgcacggtgggagaggaagagctgctcagtcttgggcaaggagctctcacacttgctgtggtgttcgttgagcagcagagtatctcccagtgactcctgtttaaatgtcttgccctttgggcccccatctccaaggagttccattgctggttggatgattgtctgcacccctcactgagcttggcctagaggcccagcctggcatggttgtgcctgggctgtgccgctcaacagccccagctcccaagcagacaaagacctcttccaggaggagccaggtagaagatagttatacagccatatagctgcagatccagataaccttctttctttggaagttttcaagaaattcttaagcagtccaaggatgatttcaattatgcttctccattgggtccttctgctcatgcattcagttcaagtgtcctttatcccaggttcagagatgctgcctttctgaagaagacatctgaccctagcaggttggccagtgttattgaacaacaaaaatgggataaattgctttcatgattagctcaccttcttctggttttagcccttctgttctctgtacacgtgaacttctgtcatctccttctggcttggttgcctctgaaaggagggaaagtctcttggtaaattatctcttttgtgctgtttgctgtttctctgctgccgtctttgcagttctcctctcactggttgcaggctttcatagtaaggtttggcgagaaatgttccaaacatcacattttggattctaggctgtcacccctcattctgtgaaacgtattagcatgtgttcgcccaagatgactattccttgtgagccagttaatgatgatattctacgcccttcccttctaagctgtagttcaggaatccagcccacatagacagactcttgctttccatggtgtagtcaatgccaagtgatgcatctaggcaggaaaatctactctttgcttttttgggggcaattagtacatttgtgaagtgcagcatccaagaaacagcctgttttttcatcccttgagaaaggagcagtcattgcagcttttctgtccttgtcggcctgcagttcctggggaaaagagtacatctgagctacttgtccaagcctctgtctgcaggtgacaggttttgggggaaatgagatgcattaagtagaacatcatctcgggtcagacattgccccttttgtttgccaatgccccagtcctagagacttgtcctgacagtgccgcacacctacttttgatctctcagagcaggtggctccatccccagactagcctggctgctctccgaggcccctccacctgctccccttattgccccattcttgtggcttgccgggccacttggcctcccttcttgccggtgacagcgttccatcatctccccgctccccaagggccaactgcttctcactcaggctggtgtcatttcaggaggaccaaagcctgcgtgagcctttttattttcagtaaaatggtgcttttttccttacttcgagatactatatataaataataatgtaaatgacaccttttcgtacggagctgtttgagtattgctttacagagctcactaaatcagcttcaacaatcttgagctctgtggctcctcaccctgtctgcatggaagaccttgctggacgctctcgggagagcagacatagcaccagaagccactgggagaagtgttttcgatccgtgtctgggccacagtagtattcactgtttagtctttgagttccgtaagcagtctcttcatacatttcttacagtctggagtgtactgactaaatctgtgtaagcaaattgaaatactctttcttttaggtagcgtcacagtggttttttttttcctcaggataatttctatacaatttccttactgtcagagggaccagatctttccctcactgtggcaggggccgtgcaggtggataaaggaagagctggtttccggagagtgactgtaacagcgttgactcgaagctagagatggagggggtggccgtctcttagacattggacacctctcagagcctcctgagggcttctttgtcttctagaatctctaccggtggtcctcctgcaggttctggctcacagacatcatcatgcctttttttccctccctgaggcgccttggcagaagagcgtgaccctgtgagccaggccccccttagctctgcttcagatcacagaacacagacagactcgcgagttgctggacctctttggtattaagtgtttgaatccatggtgggccttttgcaagtagcgttagctctttttaaatgttgaactgagctaaggatgcactttcttgtggacatagaaggggcccacgtaaggccctgagtaggctccttagttgctgctttacctgatgagggccaaagagattaactctgcctcgttgccatgtctcagaaaagttgccatatttcacccagaaggggctcgttttcctcttactcttactttaaccatgtgcctggaggagccattctgggctcttgcacttgcccagcctttctttgccaggggcagagaagggaaagggggtagattgagtgtgccaagggccgtgcaagggcaggcttgctttccacccatctgctgagggagccctctcctctcgctccttgcctctgttcacacctgttgtcttggaagaggatggtccctttgtcttaaggctttgtgataaagtcatctccagttaggatctgcacctgtttccttcgtaatagtgcctggcggcctttctgaagttacaggtggttgggagccctctcgcatgcagaacatctggtagattgatctgccaggctgggtggttctactgctttctcaatttctaagaaccttttttttttcttaaagagttctgctgaattatttgacaatatttgtaagtaccatgtttccttgtggtgtatgctctgttctggtttctgttttcaaatcaaatgcctgtttgggaggagatgaacgtatttagtctattagatttgcactgctggattttttttttaaagtgtaaccttgaatagctgtcttattgtttatcctgtaagattagtcaatcgattaaagtttgataattaaaaaaaactctttt

SEQ ID NO: 406579 - DNA, 4278 bp, Homo sapiens
tgaaccctctgctagatcattctcttctgtagagcctgtccatcttccctttatcagtagtaagctgcccagcctctgtcaactttgcaggtgattttgcttagttctgtctcatcacattcacttgctgaagtgcatagacttcctgcctcttgctggacctctacttttgcttgtgggcagcctcattgaaggcagttgctacggctgacctggaaagaccctgccatgaagataggtgcaggcagagaagtctggatgggaactaagtctagcggactgagaaattgcccatgggctccataaaaaatgtggtcagtgaacctatcgaaggacatgaagactaccacatgatggcgtttcagttgggccccacggaagcctcttactactgggtgtactgggttccaactcaatatgtggatgcaatcaaagacactgtgctggggaaatggcagtatttttgaaagcactttcacctctggcccaggagactgacccaaagtgaaggacattgccgggagaggcctgcagcatccctggatttcagagttctggaactttgttcataaaaaatctatattcaatctgaggtgatgtggtgactgaagccagaggtgatgtactttcaccattagcttaattttaacttaaaattaccagttccctttcttgcagtcagcttcataccatttttaaagtcaatacgatggaaatcaataaatctgaattccgaacatgttgtgtggaatactcttaagtgtgtttgagagtagatctgccaattatgttgacaagggaatgatcaaaagctttgttttttttaaaaaaaaaaaagcagtttcaattgaaatattttcatacatctttggttgcaaacatttggactgcattgcaatgagttggggtgttttttttttccttttttgtataaaattgtatgcaaaatgggggtgggttagtaagccacatatttctgtccattgattcagatttaattctttccctttttcattctctcgcttcctcaatttgagtttttgttttaagaacccaaagatgtcagttcttcttttggtacctcatcaacgcttcctttcctgggctccctcccgccgtgctgctgctgcctgtgaacgcacggtgggagaggaagagctgctcagtcttgggcaaggagctctcacacttgctgtggtgttcgttgagcagcagagtatctcccagtgactcctgtttaaatgtcttgccctttgggcccccatctccaaggagttccattgctggttggatgattgtctgcacccctcactgagcttggcctagaggcccagcctggcatggttgtgcctgggctgtgccgctcaacagccccagctcccaagcagacaaagacctcttccaggaggagccaggtagaagatagttatacagccatatagctgcagatccagataaccttctttctttggaagttttcaagaaattcttaagcagtccaaggatgatttcaattatgcttctccattgggtccttctgctcatgcattcagttcaagtgtcctttatcccaggttcagagatgctgcctttctgaagaagacatctgaccctagcaggttggccagtgttattgaacaacaaaaatgggataaattgctttcatgattagctcaccttcttctggttttagcccttctgttctctgtacacgtgaacttctgtcatctccttctggcttggttgcctctgaaaggagggaaagtctcttggtaaattatctcttttgtgctgtttgctgtttctctgctgccgtctttgcagttctcctctcactggttgcaggctttcatagtaaggtttggcgagaaatgttccaaacatcacattttggattctaggctgtcacccctcattctgtgaaacgtattagcatgtgttcgcccaagatgactattccttgtgagccagttaatgatgatattctacgcccttcccttctaagctgtagttcaggaatccagcccacatagacagactcttgctttccatggtgtagtcaatgccaagtgatgcatctaggcaggaaaatctactctttgcttttttgggggcaattagtacatttgtgaagtgcagcatccaagaaacagcctgttttttcatcccttgagaaaggagcagtcattgcagcttttctgtccttgtcggcctgcagttcctggggaaaagagtacatctgagctacttgtccaagcctctgtctgcaggtgacaggttttgggggaaatgagatgcattaagtagaacatcatctcgggtcagacattgccccttttgtttgccaatgccccagtcctagagacttgtcctgacagtgccgcacacctacttttgatctctcagagcaggtggctccatccccagactagcctggctgctctccgaggcccctccacctgctccccttattgccccattcttgtggcttgccgggccacttggcctcccttcttgccggtgacagcgttccatcatctccccgctccccaagggccaactgcttctcactcaggctggtgtcatttcaggaggaccaaagcctgcgtgagcctttttattttcagtaaaatggtgcttttttccttacttcgagatactatatataaataataatgtaaatgacaccttttcgtacggagctgtttgagtattgctttacagagctcactaaatcagcttcaacaatcttgagctctgtggctcctcaccctgtctgcatggaagaccttgctggacgctctcgggagagcagacatagcaccagaagccactgggagaagtgttttcgatccgtgtctgggccacagtagtattcactgtttagtctttgagttccgtaagcagtctcttcatacatttcttacagtctggagtgtactgactaaatctgtgtaagcaaattgaaatactctttcttttaggtagcgtcacagtggttttttttttcctcaggataatttctatacaatttccttactgtcagagggaccagatctttccctcactgtggcaggggccgtgcaggtggataaaggaagagctggtttccggagagtgactgtaacagcgttgactcgaagctagagatggagggggtggccgtctcttagacattggacacctctcagagcctcctgagggcttctttgtcttctagaatctctaccggtggtcctcctgcaggttctggctcacagacatcatcatgcctttttttccctccctgaggcgccttggcagaagagcgtgaccctgtgagccaggccccccttagctctgcttcagatcacagaacacagacagactcgcgagttgctggacctctttggtattaagtgtttgaatccatggtgggccttttgcaagtagcgttagctctttttaaatgttgaactgagctaaggatgcactttcttgtggacatagaaggggcccacgtaaggccctgagtaggctccttagttgctgctttacctgatgagggccaaagagattaactctgcctcgttgccatgtctcagaaaagttgccatatttcacccagaaggggctcgttttcctcttactcttactttaaccatgtgcctggaggagccattctgggctcttgcacttgcccagcctttctttgccaggggcagagaagggaaagggggtagattgagtgtgccaagggccgtgcaagggcaggcttgctttccacccatctgctgagggagccctctcctctcgctccttgcctctgttcacacctgttgtcttggaagaggatggtccctttgtcttaaggctttgtgataaagtcatctccagttaggatctgcacctgtttccttcgtaatagtgcctggcggcctttctgaagttacaggtggttgggagccctctcgcatgcagaacatctggtagattgatctgccaggctgggtggttctactgctttctcaatttctaagaaccttttttttttcttaaagagttctgctgaattatttgacaatatttgtaagtaccatgtttccttgtggtgtatgctctgttctggtttctgttttcaaatcaaatgcctgtttgggaggagatgaacgtatttagtctattagatttgcactgctggattttttttttaaagtgtaaccttgaatagctgtcttattgtttatcctgtaagattagtcaatcgattaaagtttgataattaaaaaaaactctttt

SEQ ID NO: 406580 - DNA, 5138 bp, Homo sapiens
agatcgaaagagatgggatggcacaaaaaacacaagaaactcctggcaatttgaattatttccgctcctgcacctcagtttccgcctctgtaaaatgggctcgcgctgccttaaccctcctccgcccgcccactctgacaccaccggaaaggattcattcgggaacattcgtggggcggagacgggacagggggcctcggcctgtagcgtcacgtccgccagggttacctgtggggctgggagcgaaccgcactcgcaccgcaaccccggcatcagtgcccaggttggcctcgcgccgtcctacggggcggccagaggccgccgaaggcctctcgcgctgcagcagtctcctcaggagcgccgccatgtgggatggaatagcacacgtgggcttctccctgcgtcacttccggggactgcttccagccaatcggcctccgccacagccagcgcagccttgccccttaaagtcacaggccccctagcgcgaaatcccacgcccccctggacggctgcggccgcactcgccaccagggggcagaggccagagaaagggctatttcccggacccgcccccttcagcttgggaaagcgaaagcgtggcaggggccggacctgggagcggaggaggcgggtctccatagaaacctccacctgtttccggccgggctgtgagagattaggggctgctgcgggggccaatctcagccagctcgcctcttcccagcggcctctgcgggagcggtgggtgttgtacacaatcatcatggcggcggccggggccccggatggcatggaggaacctggcatggacacggaggccgagactgtggctactgaggctcccgcgcggcccgtcaactgcctggaggctgaagccgcggcgggggcggcggccgaggactccggcgccgcacgaggcagcctgcagccggccccggcccagccccctggggaccccgcagcccaggcctcggtcagcaacggcgaagacgcgggcggcggcgcgggcagggagctggtggacttgaagatcatctggaataagaccaagcatgacgtgaagttccccctggacagcacaggctccgagctgaaacagaagatccactcgattacaggtctcccgcctgccatgcagaaagtcatgtataagggactcgtccccgaggataaaacattgagagaaataaaagtgaccagtggggccaagatcatggtggttggctccaccatcaatgatgttttagcagtaaacacacccaaagatgctgcgcagcaggatgcaatcaaagacactgtgctggggaaatggcagtatttttgaaagcactttcacctctggcccaggagactgacccaaagtgaaggacattgccgggagaggcctgcagcatccctggatttcagagttctggaactttgttcataaaaaatctatattcaatctgaggtgatgtggtgactgaagccagaggtgatgtactttcaccattagcttaattttaacttaaaattaccagttccctttcttgcagtcagcttcataccatttttaaagtcaatacgatggaaatcaataaatctgaattccgaacatgttgtgtggaatactcttaagtgtgtttgagagtagatctgccaattatgttgacaagggaatgatcaaaagctttgttttttttaaaaaaaaaaaagcagtttcaattgaaatattttcatacatctttggttgcaaacatttggactgcattgcaatgagttggggtgttttttttttccttttttgtataaaattgtatgcaaaatgggggtgggttagtaagccacatatttctgtccattgattcagatttaattctttccctttttcattctctcgcttcctcaatttgagtttttgttttaagaacccaaagatgtcagttcttcttttggtacctcatcaacgcttcctttcctgggctccctcccgccgtgctgctgctgcctgtgaacgcacggtgggagaggaagagctgctcagtcttgggcaaggagctctcacacttgctgtggtgttcgttgagcagcagagtatctcccagtgactcctgtttaaatgtcttgccctttgggcccccatctccaaggagttccattgctggttggatgattgtctgcacccctcactgagcttggcctagaggcccagcctggcatggttgtgcctgggctgtgccgctcaacagccccagctcccaagcagacaaagacctcttccaggaggagccaggtagaagatagttatacagccatatagctgcagatccagataaccttctttctttggaagttttcaagaaattcttaagcagtccaaggatgatttcaattatgcttctccattgggtccttctgctcatgcattcagttcaagtgtcctttatcccaggttcagagatgctgcctttctgaagaagacatctgaccctagcaggttggccagtgttattgaacaacaaaaatgggataaattgctttcatgattagctcaccttcttctggttttagcccttctgttctctgtacacgtgaacttctgtcatctccttctggcttggttgcctctgaaaggagggaaagtctcttggtaaattatctcttttgtgctgtttgctgtttctctgctgccgtctttgcagttctcctctcactggttgcaggctttcatagtaaggtttggcgagaaatgttccaaacatcacattttggattctaggctgtcacccctcattctgtgaaacgtattagcatgtgttcgcccaagatgactattccttgtgagccagttaatgatgatattctacgcccttcccttctaagctgtagttcaggaatccagcccacatagacagactcttgctttccatggtgtagtcaatgccaagtgatgcatctaggcaggaaaatctactctttgcttttttgggggcaattagtacatttgtgaagtgcagcatccaagaaacagcctgttttttcatcccttgagaaaggagcagtcattgcagcttttctgtccttgtcggcctgcagttcctggggaaaagagtacatctgagctacttgtccaagcctctgtctgcaggtgacaggttttgggggaaatgagatgcattaagtagaacatcatctcgggtcagacattgccccttttgtttgccaatgccccagtcctagagacttgtcctgacagtgccgcacacctacttttgatctctcagagcaggtggctccatccccagactagcctggctgctctccgaggcccctccacctgctccccttattgccccattcttgtggcttgccgggccacttggcctcccttcttgccggtgacagcgttccatcatctccccgctccccaagggccaactgcttctcactcaggctggtgtcatttcaggaggaccaaagcctgcgtgagcctttttattttcagtaaaatggtgcttttttccttacttcgagatactatatataaataataatgtaaatgacaccttttcgtacggagctgtttgagtattgctttacagagctcactaaatcagcttcaacaatcttgagctctgtggctcctcaccctgtctgcatggaagaccttgctggacgctctcgggagagcagacatagcaccagaagccactgggagaagtgttttcgatccgtgtctgggccacagtagtattcactgtttagtctttgagttccgtaagcagtctcttcatacatttcttacagtctggagtgtactgactaaatctgtgtaagcaaattgaaatactctttcttttaggtagcgtcacagtggttttttttttcctcaggataatttctatacaatttccttactgtcagagggaccagatctttccctcactgtggcaggggccgtgcaggtggataaaggaagagctggtttccggagagtgactgtaacagcgttgactcgaagctagagatggagggggtggccgtctcttagacattggacacctctcagagcctcctgagggcttctttgtcttctagaatctctaccggtggtcctcctgcaggttctggctcacagacatcatcatgcctttttttccctccctgaggcgccttggcagaagagcgtgaccctgtgagccaggccccccttagctctgcttcagatcacagaacacagacagactcgcgagttgctggacctctttggtattaagtgtttgaatccatggtgggccttttgcaagtagcgttagctctttttaaatgttgaactgagctaaggatgcactttcttgtggacatagaaggggcccacgtaaggccctgagtaggctccttagttgctgctttacctgatgagggccaaagagattaactctgcctcgttgccatgtctcagaaaagttgccatatttcacccagaaggggctcgttttcctcttactcttactttaaccatgtgcctggaggagccattctgggctcttgcacttgcccagcctttctttgccaggggcagagaagggaaagggggtagattgagtgtgccaagggccgtgcaagggcaggcttgctttccacccatctgctgagggagccctctcctctcgctccttgcctctgttcacacctgttgtcttggaagaggatggtccctttgtcttaaggctttgtgataaagtcatctccagttaggatctgcacctgtttccttcgtaatagtgcctggcggcctttctgaagttacaggtggttgggagccctctcgcatgcagaacatctggtagattgatctgccaggctgggtggttctactgctttctcaatttctaagaaccttttttttttcttaaagagttctgctgaattatttgacaatatttgtaagtaccatgtttccttgtggtgtatgctctgttctggtttctgttttcaaatcaaatgcctgtttgggaggagatgaacgtatttagtctattagatttgcactgctggattttttttttaaagtgtaaccttgaatagctgtcttattgtttatcctgtaagattagtcaatcgattaaagtttgataattaaaaaaaactctttt

SEQ ID NO: 406581 - DNA, 4848 bp, Homo sapiens
agatcgaaagagatgggatggcacaaaaaacacaagaaactcctggcaatttgaattatttccgctcctgcacctcagtttccgcctctgtaaaatgggctcgcgctgccttaaccctcctccgcccgcccactctgacaccaccggaaaggattcattcgggaacattcgtggggcggagacgggacagggggcctcggcctgtagcgtcacgtccgccagggttacctgtggggctgggagcgaaccgcactcgcaccgcaaccccggcatcagtgcccaggttggcctcgcgccgtcctacggggcggccagaggccgccgaaggcctctcgcgctgcagcagtctcctcaggagcgccgccatgtgggatggaatagcacacgtgggcttctccctgcgtcacttccggggactgcttccagccaatcggcctccgccacagccagcgcagccttgccccttaaagtcacaggccccctagcgcgaaatcccacgcccccctggacggctgcggccgcactcgccaccagggggcagaggccagagaaagggctatttcccggacccgcccccttcagcttgggaaagcgaaagcgtggcaggggccggacctgggagcggaggaggcgggtctccatagaaacctccacctgtttccggccgggctgtgagagattaggggctgctgcgggggccaatctcagccagctcgcctcttcccagcggcctctgcgggagcggtgggtgttgtacacaatcatcatggcggcggccggggccccggatggcatggaggaacctggcatggacacggaggccgagactgtggctactgaggctcccgcgcggcccgtcaactgcctggaggctgaagccgcggcgggggcggcggccgaggactccggcgccgcacgaggcagcctgcagccggccccggcccagccccctggggaccccgcagcccaggcctcggtcagcaacggcgaagacgcgggcggcggcgcgggcagggagctggtggacttgaagatcatctggaataagaccaagcatgacgtgaagttccccctggacagcacaggctccgagctgaaacagaagatccactcgattacaggtctcccgcctgccatgcagaaagtcatgtataagggactcgtccccgaggataaaacattgagaggtgatgtactttcaccattagcttaattttaacttaaaattaccagttccctttcttgcagtcagcttcataccatttttaaagtcaatacgatggaaatcaataaatctgaattccgaacatgttgtgtggaatactcttaagtgtgtttgagagtagatctgccaattatgttgacaagggaatgatcaaaagctttgttttttttaaaaaaaaaaaagcagtttcaattgaaatattttcatacatctttggttgcaaacatttggactgcattgcaatgagttggggtgttttttttttccttttttgtataaaattgtatgcaaaatgggggtgggttagtaagccacatatttctgtccattgattcagatttaattctttccctttttcattctctcgcttcctcaatttgagtttttgttttaagaacccaaagatgtcagttcttcttttggtacctcatcaacgcttcctttcctgggctccctcccgccgtgctgctgctgcctgtgaacgcacggtgggagaggaagagctgctcagtcttgggcaaggagctctcacacttgctgtggtgttcgttgagcagcagagtatctcccagtgactcctgtttaaatgtcttgccctttgggcccccatctccaaggagttccattgctggttggatgattgtctgcacccctcactgagcttggcctagaggcccagcctggcatggttgtgcctgggctgtgccgctcaacagccccagctcccaagcagacaaagacctcttccaggaggagccaggtagaagatagttatacagccatatagctgcagatccagataaccttctttctttggaagttttcaagaaattcttaagcagtccaaggatgatttcaattatgcttctccattgggtccttctgctcatgcattcagttcaagtgtcctttatcccaggttcagagatgctgcctttctgaagaagacatctgaccctagcaggttggccagtgttattgaacaacaaaaatgggataaattgctttcatgattagctcaccttcttctggttttagcccttctgttctctgtacacgtgaacttctgtcatctccttctggcttggttgcctctgaaaggagggaaagtctcttggtaaattatctcttttgtgctgtttgctgtttctctgctgccgtctttgcagttctcctctcactggttgcaggctttcatagtaaggtttggcgagaaatgttccaaacatcacattttggattctaggctgtcacccctcattctgtgaaacgtattagcatgtgttcgcccaagatgactattccttgtgagccagttaatgatgatattctacgcccttcccttctaagctgtagttcaggaatccagcccacatagacagactcttgctttccatggtgtagtcaatgccaagtgatgcatctaggcaggaaaatctactctttgcttttttgggggcaattagtacatttgtgaagtgcagcatccaagaaacagcctgttttttcatcccttgagaaaggagcagtcattgcagcttttctgtccttgtcggcctgcagttcctggggaaaagagtacatctgagctacttgtccaagcctctgtctgcaggtgacaggttttgggggaaatgagatgcattaagtagaacatcatctcgggtcagacattgccccttttgtttgccaatgccccagtcctagagacttgtcctgacagtgccgcacacctacttttgatctctcagagcaggtggctccatccccagactagcctggctgctctccgaggcccctccacctgctccccttattgccccattcttgtggcttgccgggccacttggcctcccttcttgccggtgacagcgttccatcatctccccgctccccaagggccaactgcttctcactcaggctggtgtcatttcaggaggaccaaagcctgcgtgagcctttttattttcagtaaaatggtgcttttttccttacttcgagatactatatataaataataatgtaaatgacaccttttcgtacggagctgtttgagtattgctttacagagctcactaaatcagcttcaacaatcttgagctctgtggctcctcaccctgtctgcatggaagaccttgctggacgctctcgggagagcagacatagcaccagaagccactgggagaagtgttttcgatccgtgtctgggccacagtagtattcactgtttagtctttgagttccgtaagcagtctcttcatacatttcttacagtctggagtgtactgactaaatctgtgtaagcaaattgaaatactctttcttttaggtagcgtcacagtggttttttttttcctcaggataatttctatacaatttccttactgtcagagggaccagatctttccctcactgtggcaggggccgtgcaggtggataaaggaagagctggtttccggagagtgactgtaacagcgttgactcgaagctagagatggagggggtggccgtctcttagacattggacacctctcagagcctcctgagggcttctttgtcttctagaatctctaccggtggtcctcctgcaggttctggctcacagacatcatcatgcctttttttccctccctgaggcgccttggcagaagagcgtgaccctgtgagccaggccccccttagctctgcttcagatcacagaacacagacagactcgcgagttgctggacctctttggtattaagtgtttgaatccatggtgggccttttgcaagtagcgttagctctttttaaatgttgaactgagctaaggatgcactttcttgtggacatagaaggggcccacgtaaggccctgagtaggctccttagttgctgctttacctgatgagggccaaagagattaactctgcctcgttgccatgtctcagaaaagttgccatatttcacccagaaggggctcgttttcctcttactcttactttaaccatgtgcctggaggagccattctgggctcttgcacttgcccagcctttctttgccaggggcagagaagggaaagggggtagattgagtgtgccaagggccgtgcaagggcaggcttgctttccacccatctgctgagggagccctctcctctcgctccttgcctctgttcacacctgttgtcttggaagaggatggtccctttgtcttaaggctttgtgataaagtcatctccagttaggatctgcacctgtttccttcgtaatagtgcctggcggcctttctgaagttacaggtggttgggagccctctcgcatgcagaacatctggtagattgatctgccaggctgggtggttctactgctttctcaatttctaagaaccttttttttttcttaaagagttctgctgaattatttgacaatatttgtaagtaccatgtttccttgtggtgtatgctctgttctggtttctgttttcaaatcaaatgcctgtttgggaggagatgaacgtatttagtctattagatttgcactgctggattttttttttaaagtgtaaccttgaatagctgtcttattgtttatcctgtaagattagtcaatcgattaaagtttgataattaaaaaaaactctttt

SEQ ID NO: 406582 - DNA, 2472 bp, Homo sapiens
tgacttagaggatcccggcctcacttggttgcactcattgatcaggaatggatgacgataagtgtccgtaactactgatcttctgcattcaagtgggaggccgggtatcgcgcgcgacttcttaatctttgtgctagctttatgatcgtattccttgtgagccagttaatgatgatattctacgcccttcccttctaagctgtagttcaggaatccagcccacatagacagactcttgctttccatggtgtagtcaatgccaagtgatgcatctaggcaggaaaatctactctttgcttttttgggggcaattagtacatttgtgaagtgcagcatccaagaaacagcctgttttttcatcccttgagaaaggagcagtcattgcagcttttctgtccttgtcggcctgcagttcctggggaaaagagtacatctgagctacttgtccaagcctctgtctgcaggtgacaggttttgggggaaatgagatgcattaagtagaacatcatctcgggtcagacattgccccttttgtttgccaatgccccagtcctagagacttgtcctgacagtgccgcacacctacttttgatctctcagagcaggtggctccatccccagactagcctggctgctctccgaggcccctccacctgctccccttattgccccattcttgtggcttgccgggccacttggcctcccttcttgccggtgacagcgttccatcatctccccgctccccaagggccaactgcttctcactcaggctggtgtcatttcaggaggaccaaagcctgcgtgagcctttttattttcagtaaaatggtgcttttttccttacttcgagatactatatataaataataatgtaaatgacaccttttcgtacggagctgtttgagtattgctttacagagctcactaaatcagcttcaacaatcttgagctctgtggctcctcaccctgtctgcatggaagaccttgctggacgctctcgggagagcagacatagcaccagaagccactgggagaagtgttttcgatccgtgtctgggccacagtagtattcactgtttagtctttgagttccgtaagcagtctcttcatacatttcttacagtctggagtgtactgactaaatctgtgtaagcaaattgaaatactctttcttttaggtagcgtcacagtggttttttttttcctcaggataatttctatacaatttccttactgtcagagggaccagatctttccctcactgtggcaggggccgtgcaggtggataaaggaagagctggtttccggagagtgactgtaacagcgttgactcgaagctagagatggagggggtggccgtctcttagacattggacacctctcagagcctcctgagggcttctttgtcttctagaatctctaccggtggtcctcctgcaggttctggctcacagacatcatcatgcctttttttccctccctgaggcgccttggcagaagagcgtgaccctgtgagccaggccccccttagctctgcttcagatcacagaacacagacagactcgcgagttgctggacctctttggtattaagtgtttgaatccatggtgggccttttgcaagtagcgttagctctttttaaatgttgaactgagctaaggatgcactttcttgtggacatagaaggggcccacgtaaggccctgagtaggctccttagttgctgctttacctgatgagggccaaagagattaactctgcctcgttgccatgtctcagaaaagttgccatatttcacccagaaggggctcgttttcctcttactcttactttaaccatgtgcctggaggagccattctgggctcttgcacttgcccagcctttctttgccaggggcagagaagggaaagggggtagattgagtgtgccaagggccgtgcaagggcaggcttgctttccacccatctgctgagggagccctctcctctcgctccttgcctctgttcacacctgttgtcttggaagaggatggtccctttgtcttaaggctttgtgataaagtcatctccagttaggatctgcacctgtttccttcgtaatagtgcctggcggcctttctgaagttacaggtggttgggagccctctcgcatgcagaacatctggtagattgatctgccaggctgggtggttctactgctttctcaatttctaagaaccttttttttttcttaaagagttctgctgaattatttgacaatatttgtaagtaccatgtttccttgtggtgtatgctctgttctggtttctgttttcaaatcaaatgcctgtttgggaggagatgaacgtatttagtctattagatttgcactgctggattttttttttaaagtgtaaccttgaatagctgtcttattgtttatcctgtaagattagtcaatcgattaaagtttgataattaaaaaaaactctttt

SEQ ID NO: 406583 - DNA, 4913 bp, Homo sapiens
agatcgaaagagatgggatggcacaaaaaacacaagaaactcctggcaatttgaattatttccgctcctgcacctcagtttccgcctctgtaaaatgggctcgcgctgccttaaccctcctccgcccgcccactctgacaccaccggaaaggattcattcgggaacattcgtggggcggagacgggacagggggcctcggcctgtagcgtcacgtccgccagggttacctgtggggctgggagcgaaccgcactcgcaccgcaaccccggcatcagtgcccaggttggcctcgcgccgtcctacggggcggccagaggccgccgaaggcctctcgcgctgcagcagtctcctcaggagcgccgccatgtgggatggaatagcacacgtgggcttctccctgcgtcacttccggggactgcttccagccaatcggcctccgccacagccagcgcagccttgccccttaaagtcacaggccccctagcgcgaaatcccacgcccccctggacggctgcggccgcactcgccaccagggggcagaggccagagaaagggctatttcccggacccgcccccttcagcttgggaaagcgaaagcgtggcaggggccggacctgggagcggaggaggcgggtctccatagaaacctccacctgtttccggccgggctgtgagagattaggggctgctgcgggggccaatctcagccagctcgcctcttcccagcggcctctgcgggagcggtgggtgttgtacacaatcatcatggcggcggccggggccccggatggcatggaggaacctggcatggacacggaggccgagactgtggctactgaggctcccgcgcggcccgtcaactgcctggaggctgaagccgcggcgggggcggcggccgaggactccggcgccgcacgaggcagcctgcagccggccccggcccagccccctggggaccccgcagcccaggcctcggtcagcaacggcgaagacgcgggcggcggcgcgggcagggagctggtggacttgaagatcatctggaataagaccaagcatgacgtgaagttccccctggacagcacaggctccgagctgaaacagaagatccactcgattacaggtctcccgcctgccatgcagaaagtcatgtataagggactcgtccccgaggataaaacattgagagaaataaaagtgaccagtggggccaagatcatggtggttggctccaccatcaatgatgttttagcagtaaacacacccaaagatgctgcgcagcaggatgcaaaggccgaagagaacaagaaggagcctctctgcaggcagaaacaacacaggaaagtgttggataaaggaaaacctgaagatgtgatgccatctgttaagggggcccaggagcgcctgccaacggtaccgctgtccggcatgtacaataaatctggaggaaaagtgagactcacctttaaactagaacaagaccagctgtggattggcactaaagagcggactgagaaattgcccatgggctccataaaaaatgtggtcagtgaacctatcgaaggacatgaagactaccacatgatggcgtttcagttgggccccacggaagcctcttactactgggtgtactgggttccaactcaatatgtggatgcaatcaaagacactgtgctggggaaatggcagtatttttgaaagcactttcacctctggcccaggagactgacccaaagtgaaggacattgccgggagaggcctgcagcatccctggatttcagagttctggaactttgttcataaaaaatctatattcaatctgaggtgatgtggtgactgaagccagaggtgatgtactttcaccattagcttaattttaacttaaaattaccagttccctttcttgcagtcagcttcataccatttttaaagtcaatacgatggaaatcaataaatctgaattccgaacatgttgtgtggaatactcttaagtgtgtttgagagtagatctgccaattatgttgacaagggaatgatcaaaagctttgttttttttaaaaaaaaaaaagcagtttcaattgaaatattttcatacatctttggttgcaaacatttggactgcattgcaatgagttggggtgttttttttttccttttttgtataaaattgtatgcaaaatgggggtgggttagtaagccacatatttctgtccattgattcagatttaattctttccctttttcattctctcgcttcctcaatttgagtttttgttttaagaacccaaagatgtcagttcttcttttggtacctcatcaacgcttcctttcctgggctccctcccgccgtgctgctgctgcctgtgaacgcacggtgggagaggaagagctgctcagtcttgggcaaggagctctcacacttgctgtggtgttcgttgagcagcagagtatctcccagtgactcctgtttaaatgtcttgccctttgggcccccatctccaaggagttccattgctggttggatgattgtctgcacccctcactgagcttggcctagaggcccagcctggcatggttgtgcctgggctgtgccgctcaacagccccagctcccaagcagacaaagacctcttccaggaggagccaggtagaagatagttatacagccatatagctgcagatccagataaccttctttctttggaagttttcaagaaattcttaagcagtccaaggatgatttcaattatgcttctccattgggtccttctgctcatgcattcagttcaagtgtcctttatcccaggttcagagatgctgcctttctgaagaagacatctgaccctagcaggttggccagtgttattgaacaacaaaaatgggataaattgctttcatgattagctcaccttcttctggttttagcccttctgttctctgtacacgtgaacttctgtcatctccttctggcttggttgcctctgaaaggagggaaagtctcttggtaaattatctcttttgtgctgtttgctgtttctctgctgccgtctttgcagttctcctctcactggttgcaggctttcatagtaaggtttggcgagaaatgttccaaacatcacattttggattctaggctgtcacccctcattctgtgaaacgtattagcatgtgttcgcccaagatgactattccttgtgagccagttaatgatgatattctacgcccttcccttctaagctgtagttcaggaatccagcccacatagacagactcttgctttccatggtgtagtcaatgccaagtgatgcatctaggcaggaaaatctactctttgcttttttgggggcaattagtacatttgtgaagtgcagcatccaagaaacagcctgttttttcatcccttgagaaaggagcagtcattgcagcttttctgtccttgtcggcctgcagttcctggggaaaagagtacatctgagctacttgtccaagcctctgtctgcaggtgacaggttttgggggaaatgagatgcattaagtagaacatcatctcgggtcagacattgccccttttgtttgccaatgccccagtcctagagacttgtcctgacagtgccgcacacctacttttgatctctcagagcaggtggctccatccccagactagcctggctgctctccgaggcccctccacctgctccccttattgccccattcttgtggcttgccgggccacttggcctcccttcttgccggtgacagcgttccatcatctccccgctccccaagggccaactgcttctcactcaggctggtgtcatttcaggaggaccaaagcctgcgtgagcctttttattttcagtaaaatggtgcttttttccttacttcgagatactatatataaataataatgtaaatgacaccttttcgtacggagctgtttgagtattgctttacagagctcactaaatcagcttcaacaatcttgagctctgtggctcctcaccctgtctgcatggaagaccttgctggacgctctcgggagagcagacatagcaccagaagccactgggagaagtgttttcgatccgtgtctgggccacagtagtattcactgtttagtctttgagttccgtaagcagtctcttcatacatttcttacagtctggagtgtactgactaaatctgtgtaagcaaattgaaatactctttcttttaggtagcgtcacagtggttttttttttcctcaggataatttctatacaatttccttacttttaaccatgtgcctggaggagccattctgggctcttgcacttgcccagcctttctttgccaggggcagagaagggaaagggggtagattgagtgtgccaagggccgtgcaagggcaggcttgctttccacccatctgctgagggagccctctcctctcgctccttgcctctgttcacacctgttgtcttggaagaggatggtccctttgtcttaaggctttgtgataaagtcatctccagttaggatctgcacctgtttccttcgtaatagtgcctggcggcctttctgaagttacaggtggttgggagccctctcgcatgcagaacatctggtagattgatctgccaggctgggtggttctactgctttctcaatttctaagaaccttttttttttcttaaagagttctgctgaattatttgacaatatttgtaagtaccatgtttccttgtggtgtatgctctgttctggtttctgttttcaaatcaaatgcctgtttgggaggagatgaacgtatttagtctattagatttgcactgctggattttttttttaaagtgtaaccttgaatagctgtcttattgtttatcctgtaagattagtcaatcgattaaagtttgataattaaaaaaaactctttt

SEQ ID NO: 406584 - DNA, 1563 bp, Homo sapiens
agatcgaaagagatgggatggcacaaaaaacacaagaaactcctggcaatttgaattatttccgctcctgcacctcagtttccgcctctgtaaaatgggctcgcgctgccttaaccctcctccgcccgcccactctgacaccaccggaaaggattcattcgggaacattcgtggggcggagacgggacagggggcctcggcctgtagcgtcacgtccgccagggttacctgtggggctgggagcgaaccgcactcgcaccgcaaccccggcatcagtgcccaggttggcctcgcgccgtcctacggggcggccagaggccgccgaaggcctctcgcgctgcagcagtctcctcaggagcgccgccatgtgggatggaatagcacacgtgggcttctccctgcgtcacttccggggactgcttccagccaatcggcctccgccacagccagcgcagccttgccccttaaagtcacaggccccctagcgcgaaatcccacgcccccctggacggctgcggccgcactcgccaccagggggcagaggccagagaaagggctatttcccggacccgcccccttcagcttgggaaagcgaaagcgtggcaggggccggacctgggagcggaggaggcgggtctccatagaaacctccacctgtttccggccgggctgtgagagattaggggctgctgcgggggccaatctcagccagctcgcctcttcccagcggcctctgcgggagcggtgggtgttgtacacaatcatcatggcggcggccggggccccggatggcatggaggaacctggcatggacacggaggccgagactgtggctactgaggctcccgcgcggcccgtcaactgcctggaggctgaagccgcggcgggggcggcggccgaggactccggcgccgcacgaggcagcctgcagccggccccggcccagccccctggggaccccgcagcccaggcctcggtcagcaacggcgaagacgcgggcggcggcgcgggcagggagctggtggacttgaagatcatctggaataagaccaagcatgacgtgaagttccccctggacagcacaggctccgagctgaaacagaagatccactcgattacaggtctcccgcctgccatgcagaaagtcatgtataagggactcgtccccgaggataaaacattgagagaaataaaagtgaccagtggggccaagatcatggtggttggctccaccatcaatgatgttttagcagtaaacacacccaaagatgctgcgcagcaggatgcaaaggccgaagagaacaagaaggagcctctctgcaggcagaaacaacacaggaaagtgttggataaaggaaaacctgaagatgtgatgccatctgttaagggggcccaggagcgcctgccaacggtaccgctgtccggcatgtacaataaatctggaggaaaagtgagactcacctttaaactagaacaagaccagctgtggattggcactaaagattctggaggaacgaaatgcctaatcactgttttgaccacgctacggctggaaatgccctg

SEQ ID NO: 406585 - DNA, 248 bp, Homo sapiens
cggactgagaaattgcccatgggctccataaaaaatgtggtcagtgaacctatcgaaggacatgaagactaccacatgatggtaagtagcgctggctgagttcagcccctctcactagactcccacttcacctggcagggaacagttttaactgagcttgtttaacggaagaaaactcagtctccagaagatgcacttttttaagaccctgatgttttcttcatctacttagaacttaatccatggcc

SEQ ID NO: 406586 - DNA, 4550 bp, Homo sapiens
ttttttttgaggggaggagggcaatctggaaatcccgtttgctgtagaactttgatatctaatatggtagctatccacatgtggctggttaaaatgaaattaagaattcagttcctcagtcatagtagctgcatttcaagtgtgtaatagtcacagcagtaggtagtggctagcacaggtacgaacatattcgccctcccagaaagttctgctggacagcactgtgctatagtttcaaaggatccatagtctgtcgtcattaaaagcttttgagccaaaacactaaggctttcttcatcctctctttcaagggaatagtaacacgacgaaatgtagtcagctgtttcatttcattctctcttctgacttatagcaacacaggaaagtgttggataaaggaaaacctgaagatgtgatgccatctgttaagggggcccaggagcgcctgccaacggtaccgctgtccggcatgtacaataaatctggaggaaaagtgagactcacctttaaactagaacaagaccagctgtggattggcactaaagagcggactgagaaattgcccatgggctccataaaaaatgtggtcagtgaacctatcgaaggacatgaagactaccacatgatggcgtttcagttgggccccacggaagcctcttactactgggtgtactgggttccaactcaatatgtggatgcaatcaaagacactgtgctggggaaatggcagtatttttgaaagcactttcacctctggcccaggagactgacccaaagtgaaggacattgccgggagaggcctgcagcatccctggatttcagagttctggaactttgttcataaaaaatctatattcaatctgaggtgatgtggtgactgaagccagaggtgatgtactttcaccattagcttaattttaacttaaaattaccagttccctttcttgcagtcagcttcataccatttttaaagtcaatacgatggaaatcaataaatctgaattccgaacatgttgtgtggaatactcttaagtgtgtttgagagtagatctgccaattatgttgacaagggaatgatcaaaagctttgttttttttaaaaaaaaaaaagcagtttcaattgaaatattttcatacatctttggttgcaaacatttggactgcattgcaatgagttggggtgttttttttttccttttttgtataaaattgtatgcaaaatgggggtgggttagtaagccacatatttctgtccattgattcagatttaattctttccctttttcattctctcgcttcctcaatttgagtttttgttttaagaacccaaagatgtcagttcttcttttggtacctcatcaacgcttcctttcctgggctccctcccgccgtgctgctgctgcctgtgaacgcacggtgggagaggaagagctgctcagtcttgggcaaggagctctcacacttgctgtggtgttcgttgagcagcagagtatctcccagtgactcctgtttaaatgtcttgccctttgggcccccatctccaaggagttccattgctggttggatgattgtctgcacccctcactgagcttggcctagaggcccagcctggcatggttgtgcctgggctgtgccgctcaacagccccagctcccaagcagacaaagacctcttccaggaggagccaggtagaagatagttatacagccatatagctgcagatccagataaccttctttctttggaagttttcaagaaattcttaagcagtccaaggatgatttcaattatgcttctccattgggtccttctgctcatgcattcagttcaagtgtcctttatcccaggttcagagatgctgcctttctgaagaagacatctgaccctagcaggttggccagtgttattgaacaacaaaaatgggataaattgctttcatgattagctcaccttcttctggttttagcccttctgttctctgtacacgtgaacttctgtcatctccttctggcttggttgcctctgaaaggagggaaagtctcttggtaaattatctcttttgtgctgtttgctgtttctctgctgccgtctttgcagttctcctctcactggttgcaggctttcatagtaaggtttggcgagaaatgttccaaacatcacattttggattctaggctgtcacccctcattctgtgaaacgtattagcatgtgttcgcccaagatgactattccttgtgagccagttaatgatgatattctacgcccttcccttctaagctgtagttcaggaatccagcccacatagacagactcttgctttccatggtgtagtcaatgccaagtgatgcatctaggcaggaaaatctactctttgcttttttgggggcaattagtacatttgtgaagtgcagcatccaagaaacagcctgttttttcatcccttgagaaaggagcagtcattgcagcttttctgtccttgtcggcctgcagttcctggggaaaagagtacatctgagctacttgtccaagcctctgtctgcaggtgacaggttttgggggaaatgagatgcattaagtagaacatcatctcgggtcagacattgccccttttgtttgccaatgccccagtcctagagacttgtcctgacagtgccgcacacctacttttgatctctcagagcaggtggctccatccccagactagcctggctgctctccgaggcccctccacctgctccccttattgccccattcttgtggcttgccgggccacttggcctcccttcttgccggtgacagcgttccatcatctccccgctccccaagggccaactgcttctcactcaggctggtgtcatttcaggaggaccaaagcctgcgtgagcctttttattttcagtaaaatggtgcttttttccttacttcgagatactatatataaataataatgtaaatgacaccttttcgtacggagctgtttgagtattgctttacagagctcactaaatcagcttcaacaatcttgagctctgtggctcctcaccctgtctgcatggaagaccttgctggacgctctcgggagagcagacatagcaccagaagccactgggagaagtgttttcgatccgtgtctgggccacagtagtattcactgtttagtctttgagttccgtaagcagtctcttcatacatttcttacagtctggagtgtactgactaaatctgtgtaagcaaattgaaatactctttcttttaggtagcgtcacagtggttttttttttcctcaggataatttctatacaatttccttactgtcagagggaccagatctttccctcactgtggcaggggccgtgcaggtggataaaggaagagctggtttccggagagtgactgtaacagcgttgactcgaagctagagatggagggggtggccgtctcttagacattggacacctctcagagcctcctgagggcttctttgtcttctagaatctctaccggtggtcctcctgcaggttctggctcacagacatcatcatgcctttttttccctccctgaggcgccttggcagaagagcgtgaccctgtgagccaggccccccttagctctgcttcagatcacagaacacagacagactcgcgagttgctggacctctttggtattaagtgtttgaatccatggtgggccttttgcaagtagcgttagctctttttaaatgttgaactgagctaaggatgcactttcttgtggacatagaaggggcccacgtaaggccctgagtaggctccttagttgctgctttacctgatgagggccaaagagattaactctgcctcgttgccatgtctcagaaaagttgccatatttcacccagaaggggctcgttttcctcttactcttactttaaccatgtgcctggaggagccattctgggctcttgcacttgcccagcctttctttgccaggggcagagaagggaaagggggtagattgagtgtgccaagggccgtgcaagggcaggcttgctttccacccatctgctgagggagccctctcctctcgctccttgcctctgttcacacctgttgtcttggaagaggatggtccctttgtcttaaggctttgtgataaagtcatctccagttaggatctgcacctgtttccttcgtaatagtgcctggcggcctttctgaagttacaggtggttgggagccctctcgcatgcagaacatctggtagattgatctgccaggctgggtggttctactgctttctcaatttctaagaaccttttttttttcttaaagagttctgctgaattatttgacaatatttgtaagtaccatgtttccttgtggtgtatgctctgttctggtttctgttttcaaatcaaatgcctgtttgggaggagatgaacgtatttagtctattagatttgcactgctggattttttttttaaagtgtaaccttgaatagctgtcttattgtttatcctgtaagattagtcaatcgattaaagtttgataattaaaaaaaactctttt

SEQ ID NO: 406587 - DNA, 5391 bp, Homo sapiens
agatcgaaagagatgggatggcacaaaaaacacaagaaactcctggcaatttgaattatttccgctcctgcacctcagtttccgcctctgtaaaatgggctcgcgctgccttaaccctcctccgcccgcccactctgacaccaccggaaaggattcattcgggaacattcgtggggcggagacgggacagggggcctcggcctgtagcgtcacgtccgccagggttacctgtggggctgggagcgaaccgcactcgcaccgcaaccccggcatcagtgcccaggttggcctcgcgccgtcctacggggcggccagaggccgccgaaggcctctcgcgctgcagcagtctcctcaggagcgccgccatgtgggatggaatagcacacgtgggcttctccctgcgtcacttccggggactgcttccagccaatcggcctccgccacagccagcgcagccttgccccttaaagtcacaggccccctagcgcgaaatcccacgcccccctggacggctgcggccgcactcgccaccagggggcagaggccagagaaagggctatttcccggacccgcccccttcagcttgggaaagcgaaagcgtggcaggggccggacctgggagcggaggaggcgggtctccatagaaacctccacctgtttccggccgggctgtgagagattaggggctgctgcgggggccaatctcagccagctcgcctcttcccagcggcctctgcgggagcggtgggtgttgtacacaatcatcatggcggcggccggggccccggatggcatggaggaacctggcatggacacggaggccgagactgtggctactgaggctcccgcgcggcccgtcaactgcctggaggctgaagccgcggcgggggcggcggccgaggactccggcgccgcacgaggcagcctgcagccggccccggcccagccccctggggaccccgcagcccaggcctcggtcagcaacggcgaagacgcgggcggcggcgcgggcagggagctggtggacttgaagatcatctggaataagaccaagcatgacgtgaagttccccctggacagcacaggctccgagctgaaacagaagatccactcgattacaggtctcccgcctgccatgcagaaagtcatgtataagggactcgtccccgaggataaaacattgagagaaataaaagtgaccagtggggccaagatcatggtggttggctccaccatcaatgatgttttagcagtaaacacacccaaagatgctgcgcagcaggatgcaaaggccgaagagaacaagaaggagcctctctgcaggcagaaacaacacaggaaagtgttggataaaggaaaacctgaagatgtgatgccatctgttaagggggcccaggagcgcctgccaacggtaccgctgtccggcatgtacaataaatctggaggaaaagtgagactcacctttaaactagaacaagaccagctgtggattggcactaaagagcggactgagaaattgcccatgggctccataaaaaatgtggtcagtgaacctatcgaaggacatgaagactaccacatgatggcgtttcagttgggccccacggaagcctcttactactgggtgtactgggttccaactcaatatgtggatgcaatcaaagacactgtgctggggaaatggcagtatttttgaaagcactttcacctctggcccaggagactgacccaaagtgaaggacattgccgggagaggcctgcagcatccctggatttcagagttctggaactttgttcataaaaaatctatattcaatctgaggtgatgtggtgactgaagccagaggtgatgtactttcaccattagcttaattttaacttaaaattaccagttccctttcttgcagtcagcttcataccatttttaaagtcaatacgatggaaatcaataaatctgaattccgaacatgttgtgtggaatactcttaagtgtgtttgagagtagatctgccaattatgttgacaagggaatgatcaaaagctttgttttttttaaaaaaaaaaaagcagtttcaattgaaatattttcatacatctttggttgcaaacatttggactgcattgcaatgagttggggtgttttttttttccttttttgtataaaattgtatgcaaaatgggggtgggttagtaagccacatatttctgtccattgattcagatttaattctttccctttttcattctctcgcttcctcaatttgagtttttgttttaagaacccaaagatgtcagttcttcttttggtacctcatcaacgcttcctttcctgggctccctcccgccgtgctgctgctgcctgtgaacgcacggtgggagaggaagagctgctcagtcttgggcaaggagctctcacacttgctgtggtgttcgttgagcagcagagtatctcccagtgactcctgtttaaatgtcttgccctttgggcccccatctccaaggagttccattgctggttggatgattgtctgcacccctcactgagcttggcctagaggcccagcctggcatggttgtgcctgggctgtgccgctcaacagccccagctcccaagcagacaaagacctcttccaggaggagccaggtagaagatagttatacagccatatagctgcagatccagataaccttctttctttggaagttttcaagaaattcttaagcagtccaaggatgatttcaattatgcttctccattgggtccttctgctcatgcattcagttcaagtgtcctttatcccaggttcagagatgctgcctttctgaagaagacatctgaccctagcaggttggccagtgttattgaacaacaaaaatgggataaattgctttcatgattagctcaccttcttctggttttagcccttctgttctctgtacacgtgaacttctgtcatctccttctggcttggttgcctctgaaaggagggaaagtctcttggtaaattatctcttttgtgctgtttgctgtttctctgctgccgtctttgcagttctcctctcactggttgcaggctttcatagtaaggtttggcgagaaatgttccaaacatcacattttggattctaggctgtcacccctcattctgtgaaacgtattagcatgtgttcgcccaagatgactattccttgtgagccagttaatgatgatattctacgcccttcccttctaagctgtagttcaggaatccacatccaagaaacagcctgttttttcatcccttgagaaaggagcagtcattgcagcttttctgtccttgtcggcctgcagttcctggggaaaagagtacatctgagctacttgtccaagcctctgtctgcaggtgacaggttttgggggaaatgagatgcattaagtagaacatcatctcgggtcagacattgccccttttgtttgccaatgccccagtcctagagacttgtcctgacagtgccgcacacctacttttgatctctcagagcaggtggctccatccccagactagcctggctgctctccgaggcccctccacctgctccccttattgccccattcttgtggcttgccgggccacttggcctcccttcttgccggtgacagcgttccatcatctccccgctccccaagggccaactgcttctcactcaggctggtgtcatttcaggaggaccaaagcctgcgtgagcctttttattttcagtaaaatggtgcttttttccttacttcgagatactatatataaataataatgtaaatgacaccttttcgtacggagctgtttgagtattgctttacagagctcactaaatcagcttcaacaatcttgagctctgtggctcctcaccctgtctgcatggaagaccttgctggacgctctcgggagagcagacatagcaccagaagccactgggagaagtgttttcgatccgtgtctgggccacagtagtattcactgtttagtctttgagttccgtaagcagtctcttcatacatttcttacagtctggagtgtactgactaaatctgtgtaagcaaattgaaatactctttcttttaggtagcgtcacagtggttttttttttcctcaggataatttctatacaatttccttactgtcagagggaccagatctttccctcactgtggcaggggccgtgcaggtggataaaggaagagctggtttccggagagtgactgtaacagcgttgactcgaagctagagatggagggggtggccgtctcttagacattggacacctctcagagcctcctgagggcttctttgtcttctagaatctctaccggtggtcctcctgcaggttctggctcacagacatcatcatgcctttttttccctccctgaggcgccttggcagaagagcgtgaccctgtgagccaggccccccttagctctgcttcagatcacagaacacagacagactcgcgagttgctggacctctttggtattaagtgtttgaatccatggtgggccttttgcaagtagcgttagctctttttaaatgttgaactgagctaaggatgcactttcttgtggacatagaaggggcccacgtaaggccctgagtaggctccttagttgctgctttacctgatgagggccaaagagattaactctgcctcgttgccatgtctcagaaaagttgccatatttcacccagaaggggctcgttttcctcttactcttactttaaccatgtgcctggaggagccattctgggctcttgcacttgcccagcctttctttgccaggggcagagaagggaaagggggtagattgagtgtgccaagggccgtgcaagggcaggcttgctttccacccatctgctgagggagccctctcctctcgctccttgcctctgttcacacctgttgtcttggaagaggatggtccctttgtcttaaggctttgtgataaagtcatctccagttaggatctgcacctgtttccttcgtaatagtgcctggcggcctttctgaagttacaggtggttgggagccctctcgcatgcagaacatctggtagattgatctgccaggctgggtggttctactgctttctcaatttctaagaaccttttttttttcttaaagagttctgctgaattatttgacaatatttgtaagtaccatgtttccttgtggtgtatgctctgttctggtttctgttttcaaatcaaatgcctgtttgggaggagatgaacgtatttagtctattagatttgcactgctggattttttttttaaagtgtaaccttgaatagctgtcttattgtttatcctgtaagattagtcaatcgattaaagtttgataattaaaaaaaactctttt

SEQ ID NO: 406588 - DNA, 5404 bp, Homo sapiens
agatcgaaagagatgggatggcacaaaaaacacaagaaactcctggcaatttgaattatttccgctcctgcacctcagtttccgcctctgtaaaatgggctcgcgctgccttaaccctcctccgcccgcccactctgacaccaccggaaaggattcattcgggaacattcgtggggcggagacgggacagggggcctcggcctgtagcgtcacgtccgccagggttacctgtggggctgggagcgaaccgcactcgcaccgcaaccccggcatcagtgcccaggttggcctcgcgccgtcctacggggcggccagaggccgccgaaggcctctcgcgctgcagcagtctcctcaggagcgccgccatgtgggatggaatagcacacgtgggcttctccctgcgtcacttccggggactgcttccagccaatcggcctccgccacagccagcgcagccttgccccttaaagtcacaggccccctagcgcgaaatcccacgcccccctggacggctgcggccgcactcgccaccagggggcagaggccagagaaagggctatttcccggacccgcccccttcagcttgggaaagcgaaagcgtggcaggggccggacctgggagcggaggaggcgggtctccatagaaacctccacctgtttccggccgggctgtgagagattaggggctgctgcgggggccaatctcagccagctcgcctcttcccagcggcctctgcgggagcggtgggtgttgtacacaatcatcatggcggcggccggggccccggatggcatggaggaacctggcatggacacggaggccgagactgtggctactgaggctcccgcgcggcccgtcaactgcctggaggctgaagccgcggcgggggcggcggccgaggactccggcgccgcacgaggcagcctgcagccggccccggcccagccccctggggaccccgcagcccaggcctcggtcagcaacggcgaagacgcgggcggcggcgcgggcagggagctggtggacttgaagatcatctggaataagaccaagcatgacgtgaagttccccctggacagcacaggctccgagctgaaacagaagatccactcgattacaggtctcccgcctgccatgcagaaagtcatgtataagggactcgtccccgaggataaaacattgagagaaataaaagtgaccagtggggccaagatcatggtggttggctccaccatcaatgatgttttagcagtaaacacacccaaagatgctgcgcagcaggatgcaaaggccgaagagaacaagaaggagcctctctgcaggcagaaacaacacaggaaagtgttggataaaggaaaacctgaagatgtgatgccatctgttaagggggcccaggagcgcctgccaacggtaccgctgtccggcatgtacaataaatctggaggaaaagtgagactcacctttaaactagaacaagaccagctgtggattggcactaaagagcggactgagaaattgcccatgggctccataaaaaatgtggtcagtgaacctatcgaaggacatgaagactaccacatgatggcgtttcagttgggccccacggaagcctcttactactgggtgtactgggttccaactcaatatgtggatgcaatcaaagacactgtgctggggaaatggcagtatttttgaaagcactttcacctctggcccaggagactgacccaaagtgaaggacattgccgggagaggcctgcagcatccctggatttcagagttctggaactttgttcataaaaaatctatattcaatctgaggtgatgtggtgactgaagccagaggtgatgtactttcaccattagcttaattttaacttaaaattaccagttccctttcttgcagtcagcttcataccatttttaaagtcaatacgatggaaatcaataaatctgaattccgaacatgttgtgtggaatactcttaagtgtgtttgagagtagatctgccaattatgttgacaagggaatgatcaaaagctttgttttttttaaaaaaaaaaaagcagtttcaattgaaatattttcatacatctttggttgcaaacatttggactgcattgcaatgagttggggtgttttttttttccttttttgtataaaattgtatgcaaaatgggggtgggttagtaagccacatatttctgtccattgattcagatttaattctttccctttttcattctctcgcttcctcaatttgagtttttgttttaagaacccaaagatgtcagttcttcttttggtacctcatcaacgcttcctttcctgggctccctcccgccgtgctgctgctgcctgtgaacgcacggtgggagaggaagagctgctcagtcttgggcaaggagctctcacacttgctgtggtgttcgttgagcagcagagtatctcccagtgactcctgtttaaatgtcttgccctttgggcccccatctccaaggagttccattgctggttggatgattgtctgcacccctcactgagcttggcctagaggcccagcctggcatggttgtgcctgggctgtgccgctcaacagccccagctcccaagcagacaaagacctcttccaggaggagccaggtagaagatagttatacagccatatagctgcagatccagataaccttctttctttggaagttttcaagaaattcttaagcagtccaaggatgatttcaattatgcttctccattgggtccttctgctcatgcattcagttcaagtgtcctttatcccaggttcagagatgctgcctttctgaagaagacatctgaccctagcaggttggccagtgttattgaacaacaaaaatgggataaattgctttcatgattagctcaccttcttctggttttagcccttctgttctctgtacacgtgaacttctgtcatctccttctggcttggttgcctctgaaaggagggaaagtctcttggtaaattatctcttttgtgctgtttgctgtttctctgctgccgtctttgcagttctcctctcactggttgcaggctttcatagtaaggtttggcgagaaatgttccaaacatcacattttggattctaggctgtcacccctcattctgtgaaacgtattagcatgtgttcgcccaagatgactattccttgtgagccagttaatgatgatattctacgcccttcccttctaagctgtagttcaggaatccagcccacatagacagactcttgctttccatggtgtagtcaatgccaagtgatgcatctaggcaggaaaatctactctttgcttttttgggggcaattagtacatttgtgaagtgcagcatccaagaaacagcctgttttttcatcccttgagaaaggagcagtcattgcagcttttctgtccttgtcggcctgcagttcctggggaaaagagtacatctgagctacttgtccaagcctctgtctgcaggtgacaggttttgggggaaatgagatgcattaagtagaacatcatctcgggtcagacattgccccttttgtttgccaatgccccagtcctagagacttgtcctgacagtgccgcacacctacttttgatctctcagagcaggtggctccatccccagactagcctggctgctctccgaggcccctccacctgctccccttattgccccattcttgtggcttgccgggccacttggcctcccttcttgccggtgacagcgttccatcatctccccgctccccaagggccaactgcttctcactcaggctggtgtcatttcaggaggaccaaagcctgcgtgagcctttttattttcagtaaaatggtgcttttttccttacttcgagatactatatataaataataatgtaaatgacaccttttcgtacggagctgtttgagtattgctttacagagctcactaaatcagcttcaacaatcttgagctctgtggctcctcaccctgtctgcatggaagaccttgctggacgctctcgggagagcagacatagcaccagaagccactgggagaagtgttttcgatccgtgtctgggccacagtagtattcactgtttagtctttgagttccgtaagcagtctcttcatacatttcttacagtctggagtgtactgactaaatctgtgtaagcaaattgaaatactctttcttttaggtagcgtcacagtggttttttttttcctcaggataatttctatacaatttccttactgtcagagggaccagatctttccctcactgtggcaggggccgtgcaggtggataaaggaagagctggtttccggagagtgactgtaacagcgttgactcgaagctagagatggagggggtggccgtctcttagacattggacacctctcagagcctcctgagggcttctttgtcttctagaatctctaccggtggtcctcctgcaggttctggctcacagacatcatcatgcctttttttccctccctgaggcgccttggcagaagagcgtgaccctgtgagccaggccccccttagctctgcttcagatcacagaacacagacagactcgcgagttgctggacctctttggtattaagtgtttgaatccatggtgggccttttgcaagtagcgttagctctttttaaatgttgaactgagctaaggatgcactttcttgtggacatagaaggggcccacgtaaggccctgagtaggctccttagttgctgctttacctgatgagggccaaagagattaactctgcctcgttgccatgtctcagaaaagttgccatatttcacccagaaggggctcgttttcctcttactcttactttaaccatgtgcctggaggagccattctgggctcttgcacttgcccagcctttctttgccaggggcagagaagggaaagggggtagattgagtgtgccaagggccgtgcaagggctttgtgataaagtcatctccagttaggatctgcacctgtttccttcgtaatagtgcctggcggcctttctgaagttacaggtggttgggagccctctcgcatgcagaacatctggtagattgatctgccaggctgggtggttctactgctttctcaatttctaagaaccttttttttttcttaaagagttctgctgaattatttgacaatatttgtaagtaccatgtttccttgtggtgtatgctctgttctggtttctgttttcaaatcaaatgcctgtttgggaggagatgaacgtatttagtctattagatttgcactgctggattttttttttaaagtgtaaccttgaatagctgtcttattgtttatcctgtaagattagtcaatcgattaaagtttgataattaaaaaaaactctttt

SEQ ID NO: 406589 - DNA, 700 bp, Homo sapiens
caaaaaggttgcaggtttccagtaaatggagatatcgattggaaatcagatctggcatttctccatagtgctcactcattggagcatatgatggttaattgcatagcttttagttgaccttagttttttcaatgagattgttaatcttataaactgtgaatcatccaccatcttgtaagaacctgttattgctttgtttgaacctgtgacagattatcttccaactttaaagagtggataattccattaaccaaccaaaaagaaaagtagtaagataaacattttcttcaaactctgaaaattatcctttttttttttgaaacccccactgtcctcccaagtcacagcaacaagttaaaaagatgatgggaggtggggaagagtggaggagcaggaggaattcttaacagtaagtttcggggtccagggcccgattggcatgtggccccattccaggtcactggggtcatttccaaatttgagttctccaggattgatagcatcatcccatgaggactggggcttagtgaggcagtagctttgatttccagctgagcacaagagtgtgatagtacttgtttgttttttgttgttgttgttttgagatggagtcttgctctgtcgcccaggctggggttgcagtgagctgagatcgccactgcactcaagcctgggtgacagagctagactccgtctcaaa

SEQ ID NO: 406590 - DNA, 1089 bp, Homo sapiens
ggagagccagcctgtccccttgaccacctgggtgcagggactctccccggcacctgacggacagtgggacctgcgagtctcaagggccagatttgcctttcagagctgtcctggaacttacccaagatagggacagtcagacttgcacccaagcattgctggtgcccaaggtttcatcggggcttcacccacttctgttgtcagaggtgtgcatcctcacacaggtgacactggcaggcagtcattttgggaggacatggtaagaaggcgacactttatgtcctgaaatctgatagtattgattgtaatagctgcaaagaccagtgcattatgtaaatttggttttatttattctgctgacatttaaacttttgttaactcagaatatttgagacatacgcacataactgtagcattgtagaatgggtaaggattttgttatctaatcaggaaatctagttctctaaaaaattgccacctgaagaaattctgttaccaccttagagcctgttctgaattttacgaaaattatagattggaaaggactttgtgttctcatgtaatttttgttccttagttacagtgttaagcttggagaggcaaacatgggctgtggtccataccttggttgtcttgttaacccttttgggactgggtactgcttagcaatggtaaatccacttagaacagtatgtggtgttattgtcctgttacttctccccacatacaggtttgtctagcataatttaaaatcagcaggtcttgacaattttgtgaaagtattttcttctttgttaaaaacgtcttggccaggctcagtggctcacgcctgtaatcccaggaccttgggaggctgagatggccgaatcacgaggtcaggagttcgagaccagcctggccaacacagtgaaaaccccatctctactaaaaatacaaaaattatctgggcgtggtggtgggcgcctgtaatctcagctgctcgggaggctgaggcaggagaatcgcttgaacccaggaagcagaggttgcagtgagctgagatcgccactgcactcaagcctgggtgacagagctagactccgtctcaaa

SEQ ID NO: 406591 - DNA, 534 bp, Homo sapiens
  misc_feature (431)..(431): n is a, c, g, or t
  misc_feature (458)..(458): n is a, c, g, or t
atcaaaaagctcagttcgagcggccttagtatagccgttcatattcgcaagaatatgagttccatcgtgatggatgcggtccgttgcttcctgattgctcaggatctggaaatgtatggaatcaactatttcgagataaaaaacaagaaaggaacagacctttggcttggagttgatgcccttggactgaatatttatgagaaagatgataagttaaccccaaagattggctttccttggagtgaaatcaggaacatctctttcaatgacaaaaagtttgtcattaaacccatcgacaagaaggcacctgactttgtgttttatgccccacgtctgagaatcaacaagcggatcctgcagctctgcatgggcaaccatgagttgtatatgcgccgcaggaagcctgacaccatcgaggtgcagcagagganccaggagacctgagcaagccagggganctgagcaagccaggggacctgagcaagccaggagacctgagctagccaggagacctgtgcatgccaggagacctgt

SEQ ID NO: 406592 - DNA, 418 bp, Homo sapiens
ggcttttgggagcccgggcagcgagcgcactcggcggacgcaagggcggcggggagcacacggagcactgcaggcgccgggttgggacagcgtcttcgctgctgctggatagtcgtgttttcggggatcgaggatactcaccagaaaccgaaaatgccgaaaccaatcaatgtccgagttaccaccatggatgcagagctggagtttgcaatccagccaaatacaactggaaaacagctttttgatcactttggcctccactatgtggataataaaggatttcctacctggctgaagctggataagaaggcaagtcaggattaactatttacaggctgtggattgggtgttggtctgcttcatcgataaggaaactggagcaactcaccctgtcttttgttttctgttcctttttgtt

SEQ ID NO: 406593 - DNA, 3417 bp, Homo sapiens
atcaaaaagctcagttcgagcggccttagtatagccgttcatattcgcaagaatatgagttccatcgtgatggatgcggtccgttgcttcctgattgctcaggatctggaaatgtatggaatcaactatttcgagataaaaaacaagaaaggaacagacctttggcttggagttgatgcccttggactgaatatttatgagaaagatgataagattggctttccttggagtgaaatcaggaacatctctttcaatgacaaaaagtttgtcattaaacccatcgacaagaaggcacctgactttgtgttgtatgccccacgtctgagaatcaacaagcggatcctgcagctctgcatgggcaaccatgagttgtatatgcgccgcaggaacctgacacggagcactgcaggcgccgggttgggacagcgtcttcgctgctgctggatagtcgtgttttcggggatcgaggatactcaccagaaaccgaaaatgccgaaaccaatcaatgtccgagttaccaccatggatgcagagctggagtttgcaatccagccaaatacaactggaaaacagctttttgatcaggtggtaaagactatcggcctccgggaagtgtggtactttggcctccactatgtggataataaaggatttcctacctggctgaagctggataagaaggtgtctgcccaggaggtcaggaaggagaatcccctccagttcaagttccgggccaagttctaccctgaagatgtggctgaggagctcatccaggacatcacccagaaacttttcttcctccaagtgaaggaaggaatccttagcgatgagatctactgcccccctgagactgccgtgctcttggggtcctacgctgtgcaggccaagtttggggactacaacaaagaagtgcacaagtctgggtacctcagctctgagcggctgatccctcaaagagtgatggaccagcacaaacttaccagggaccagtgggaggaccggatccaggtgtggcatgcggaacaccgtgggatgctcaaagataatgctatgttggaatacctgaagattgctcaggacctggaaatgtatggaatcaactatttcgagataaaaaacaagaaaggaacagacctttggcttggagttgatgcccttggactgaatatttatgagaaagatgataagttaaccccaaagattggctttccttggagtgaaatcaggaacatctctttcaatgacaaaaagtttgtcattaaacccatcgacaagaaggcacctgactttgtgttttatgccccacgtctgagaatcaacaagcggatcctgcagctctgcatgggcaaccatgagttgtatatgcgccgcaggaagcctgacaccatcgaggtgcagcagatgaaggcccaggcccgggaggagaagcatcagaagcagctggagcggcaacagctggaaacagagaagaaaaggagagaaaccgtggagagagagaaagagcagatgatgcgcgagaaggaggagttgatgctgcggctgcaggactatgaggagaagacaaagaaggcagagagagagctctcggagcagattcagagggccctgcagctggaggaggagaggaagcgggcacaggaggaggccgagcgcctagaggctgaccgtatggctgcactgcgggctaaggaggagctggagagacaggcggtggatcagataaagagccaggagcagctggctgcggagcttgcagaatacactgccaagattgccctcctggaagaggcgcggaggcgcaaggaggatgaagttgaagagtggcagcacagggccaaagaagcccaggatgacctggtgaagaccaaggaggagctgcacctggtgatgacagcacccccgcccccaccaccccccgtgtacgagccggtgagctaccatgtccaggagagcttgcaggatgagggcgcagagcccacgggctacagcgcggagctgtctagtgagggcatccgggatgaccgcaatgaggagaagcgcatcactgaggcagagaagaacgagcgtgtgcagcggcagctgctgacgctgagcagcgagctgtcccaggcccgagatgagaataagaggacccacaatgacatcatccacaacgagaacatgaggcaaggccgggacaagtacaagacgctgcggcagatccggcagggcaacaccaagcagcgcatcgacgagttcgaggccctgtaacagccaggccaggaccaagggcagaggggtgctcatagcgggcgctgccagccccgccacgcttgtctttagtgctccaagtctaggaactccctcagatcccagttcctttagaaagcagttacccaacagaaacattctgggctgggaaccagggaggcgccctggtttgttttccccagttgtaatagtgccaagcaggcctgattctcgcgattattctcgaatcacctcctgtgttgtgctgggagcaggactgattgaattacggaaaatgcctgtaaagtctgagtaagaaacttcatgctggcctgtgtgatacaagagtcagcatcattaaaggaaacgtggcaggacttccatctgtgccatacttgttctgtattcgaaatgagctcaaattgattttttaatttctatgaaggatccatctttgtatatttacatgcttagaggggtgaaaattattttggaaattgagtctgaagcactctcgcacacacagtgattccctcctcccgtcactccacgcagctggcagagagcacagtgatcaccagcgtgagtggtggaggaggacacttggatttttttttagtttttttttttttggcttaacagttttagaatacattgtacttatacaccttattaatgatcagctatatactatttatatacaagtgataatacagatttgtaacattagttttaaaaagggaaagttttgttctgtatattttgttaccttttacagaataaaagaattacatatgaaaaaccctctaaaccatggcacttgatgtgatgtggcaggagggcagtggtggagctggacctgcctgctgcagtcacgtgtaaacaggattattattagtgttttatgcatgtaatggactatgcacacttttaattttgtcagattcacacatgccactatgagctttcagactccagctgtgaagagactctgtttgcttgtgttgtttgtttgcagtctctctctgccatggccttggcaggctgctggaaggcagcttgtggaggccgttggttccgcccactcattccttctcgtgcactgctttctccttcacagctaagatgccatgtgcaggtggattccatgccgcagacatgaaataaaagctttgcaaaggcacgaag

SEQ ID NO: 406594 - DNA, 3716 bp, Homo sapiens
  misc_feature (3716)..(3716): n is a, c, g, or t
ggcttttgggagcccgggcagcgagcgcactcggcggacgcaagggcggcggggagcacacggagcactgcaggcgccgggttgggacagcgtcttcgctgctgctggatagtcgtgttttcggggatcgaggatactcaccagaaaccgaaaatgccgaaaccaatcaatgtccgagttaccaccatggatgcagagctggagtttgcaatccagccaaatacaactggaaaacagctttttgatcaggtggtaaagactatcggcctccgggaagtgtggtactttggcctccactatgtggataataaaggatttcctacctggctgaagctggataagaaggtgtctgcccaggaggtcaggaaggagaatcccctccagttcaagttccgggccaagttctaccctgaagatgtggctgaggagctcatccaggacatcacccagaaacttttcttcctccaagtgaaggaaggaatccttagcgatgagatctactgcccccctgagactgccgtgctcttggggtcctacgctgtgcaggccaagtttggggactacaacaaagaagtgcacaagtctgggtacctcagctctgagcggctgatccctcaaagagtgatggaccagcacaaacttaccagggaccagtgggaggaccggatccaggtgtggcatgcggaacaccgtgggatgctcaaagataatgctatgttggaatacctgaagattgctcaggacctggaaatgtatggaatcaactatttcgagataaaaaacaagaaaggaacagacctttggcttggagttgatgcccttggactgaatatttatgagaaagatgataagttaaccccaaagattggctttccttggagtgaaatcaggaacatctctttcaatgacaaaaagtttgtcattaaacccatcgacaagaaggcacctgactttgtgttttatgccccacgtctgagaatcaacaagcggatcctgcagctctgcatgggcaaccatgagttgtatatgcgccgcaggaagcctgacaccatcgaggtgcagcagatgaaggcccaggcccgggaggagaagcatcagaagcagctggagcggcaacagctggaaacagagaagaaaaggagagaaaccgtggagagagagaaagagcagatgatgcgcgagaaggaggagttgatgctgcggctgcaggactatgaggagaagacaaagaaggcagagagagagctctcggagcagattcagagggccctgcagctggaggaggagaggaagcgggcacaggaggaggccgagcgcctagaggctgaccgtatggctgcactgcgggctaaggaggagctggagagacaggcggtggatcagataaagagccaggagcagctggctgcggagcttgcagaatacactgccaagattgccctcctggaagaggcgcggaggcgcaaggaggatgaagttgaagagtggcagcacagggccaaagaagcccaggatgacctggtgaagaccaaggaggagctgcacctggtgatgacagcacccccgcccccaccaccccccgtgtacgagccggtgagctaccatgtccaggagagcttgcaggatgagggcgcagagcccacgggctacagcgcggagctgtctagtgagggcatccgggatgaccgcaatgaggagaagcgcatcactgaggcagagaagaacgagcgtgtgcagcggcagctgctgacgctgagcagcgagctgtcccaggcccgagatgagaataagaggacccacaatgacatcatccacaacgagaacatgaggcaaggccgggacaagtacaagacgctgcggcagatccggcagggcaacaccaagcagcgcatcgacgagttcgaggccctgtaacagccaggccaggaccaagggcagaggggtgctcatagcgggcgctgccagccccgccacgcttgtctttagtgctccaagtctaggaactccctcagatcccagttcctttagaaagcagttacccaacagaaacattctgggctgggaaccagggaggcgccctggtttgttttccccagttgtaatagtgccaagcaggcctgattctcgcgattattctcgaatcacctcctgtgttgtgctgggagcaggactgattgaattacggaaaatgcctgtaaagtctgagtaagaaacttcatgctggcctgtgtgatacaagagtcagcatcattaaaggaaacgtggcaggacttccatctgtgccatacttgttctgtattcgaaatgagctcaaattgattttttaatttctatgaaggatccatctttgtatatttacatgcttagaggggtgaaaattattttggaaattgagtctgaagcactctcgcacacacagtgattccctcctcccgtcactccacgcagctggcagagagcacagtgatcaccagcgtgagtggtggaggaggacacttggatttttttttagtttttttttttttggcttaacagttttagaatacattgtacttatacaccttattaatgatcagctatatactatttatatacaagtgataatacagatttgtaacattagttttaaaaagggaaagttttgttctgtatattttgttaccttttacagaataaaagaattacatatgaaaaaccctctaaaccatggcacttgatgtgatgtggcaggagggcagtggtggagctggacctgcctgctgcagtcacgtgtaaacaggattattattagtgttttatgcatgtaatggactatgcacacttttaattttgtcagattcacacatgccactatgagctttcagactccagctgtgaagagactctgtttgcttgtgttgtttgtttgcagtctctctctgccatggccttggcaggctgctggaaggcagcttgtggaggccgttggttccgcccactcattccttctcgtgcactgctttctccttcacagctaagatgccatgtgcaggtggattccatgccgcagacatgaaataaaagctttgcaaaggcacgaagaaaaaaaaaaaaaaaaaaaaaaaaaaaaaaaaaaagaagagaggcgggcgcgcgcgcgcgcatcaataaatatatctctccccagagaggaggcgccacaagcgttaccggcgagacccagaagtattcgtcgggtaacacacaagggtgcgcccacaaataagaggaggcagcgcgagaatatatataagagaaaggagctggcggcccggaggtactaaaaaacacgtggagaaacgaggagaaacaagaggggacataaagagaggaacaaaccttggggggaaaagaggaaccctctaaaaaactgagaggacgaggaggaacacacataattgtgggacacacacaacacccctacacacggacttcttgtaccagcgctctccatcaagagcgtaccaaaaatattaaaccagactctccttctaacccggctcgtgttatctaacagcgggctgtatcaaaaagacaataaaagcgccggaaatatatgcgtcaggcaggcaaggcctatcggagaaaacaagtattgtggcggctgaccaacaccgccgctatggacacacgaccgatgagccaaaaccacatcttttatatacccccggaacggtgatagttgataactcaaaccn

SEQ ID NO: 406595 - DNA, 3012 bp, Homo sapiens
  misc_feature (27)..(28): n is a, c, g, or t
  misc_feature (37)..(37): n is a, c, g, or t
gaggcatgggaataaccgggccccccnntgaggttanggatagtcgtgttttcggggatcgaggatactcaccagaaaccgaaaatgccgaaaccaatcaatgtccgagttaccaccatggatgcagagctggagtttgcaatccagccaaatacaactggaaaacagctttttgatcaggtggtaaagactatcggcctccgggaagtgtggtactttggcctccactatgtggataataaaggatttcctacctggctgaagctggataagaaggtgtctgcccaggaggtcaggaaggagaatcccctccagttcaagttccgggccaagttctaccctgaagatgtggctgaggagctcatccaggacatcacccagaaacttttcttcctccaagtgaaggaaggaatccttagcgatgagatctactgcccccctgagactgccgtgctcttggggtcctacgctgtgcaggccaagtttggggactacaacaaagaagtgcacaagtctgggtacctcagctctgagcggctgatccctcaaagagtgatggaccagcacaaacttaccagggaccagtgggaggaccggatccaggtgtggcatgcggaacaccgtgggatgctcaaagataatgctatgttggaatacctgaagattgctcaggacctggaaatgtatggaatcaactatttcgagataaaaaacaagaaaggaacagacctttggcttggagttgatgcccttggactgaatatttatgagaaagatgataagttaaccccaaagattggctttccttggagtgaaatcaggaacatctctttcaatgacaaaaagtttgtcattaaacccatcgacaagaaggcacctgactttgtgttttatgccccacgtctgagaatcaacaagcggatcctgcagctctgcatgggcaaccatgagttgtatatgcgccgcaggaagcctgacaccatcgaggtgcagcagatgaaggcccaggcccgggaggagaagcatcagaagcagctggagcggcaacagctggaaacagagaagaaaaggagagaaaccgtggagagagagaaagagcagatgatgcgcgagaaggaggagttgatgctgcggctgcaggactatgaggagaagacaaagaaggcagagagagagctctcggagcagattcagagggccctgcagctggaggaggagaggaagcgggcacaggaggaggccgagcgcctagaggctgaccgtatggctgcactgcgggctaaggaggagctggagagacaggcggtggatcagataaagagccaggagcagctggctgcggagcttgcagaatacactgccaagattgccctcctggaagaggcgcggaggcgcaaggaggatgaagttgaagagtggcagcacagggccaaagaagcccaggatgacctggtgaagaccaaggaggagctgcacctggtgatgacagcacccccgcccccaccaccccccgtgtacgagccggtgagctaccatgtccaggagagcttgcaggatgagggcgcagagcccacgggctacagcgcggagctgtctagtgagggcatccgggatgaccgcaatgaggagaagcgcatcactgaggcagagaagaacgagcgtgtgcagcggcagctgctgacgctgagcagcgagctgtcccaggcccgagatgagaataagaggacccacaatgacatcatccacaacgagaacatgaggcaaggccgggacaagtacaagacgctgcggcagatccggcagggcaacaccaagcagcgcatcgacgagttcgaggccctgtaacagccaggccaggaccaagggcagaggggtgctcatagcgggcgctgccagccccgccacgcttgtctttagtgctccaagtctaggaactccctcagatcccagttcctttagaaagcagttacccaacagaaacattctgggctgggaaccagggaggcgccctggtttgttttccccagttgtaatagtgccaagcaggcctgattctcgcgattattctcgaatcacctcctgtgttgtgctgggagcaggactgattgaattacggaaaatgcctgtaaagtctgagtaagaaacttcatgctggcctgtgtgatacaagagtcagcatcattaaaggaaacgtggcaggacttccatctgtgccatacttgttctgtattcgaaatgagctcaaattgattttttaatttctatgaaggatccatctttgtatatttacatgcttagaggggtgaaaattattttggaaattgagtctgaagcactctcgcacacacagtgattccctcctcccgtcactccacgcagctggcagagagcacagtgatcaccagcgtgagtggtggaggaggacacttggatttttttttagtttttttttttttggcttaacagttttagaatacattgtacttatacaccttattaatgatcagctatatactatttatatacaagtgataatacagatttgtaacattagttttaaaaagggaaagttttgttctgtatattttgttaccttttacagaataaaagaattacatatgaaaaaccctctaaaccatggcacttgatgtgatgtggcaggagggcagtggtggagctggacctgcctgctgcagtcacgtgtaaacaggattattattagtgttttatgcatgtaatggactatgcacacttttaattttgtcagattcacacatgccactatgagctttcagactccagctgtgaagagactctgtttgcttgtgttgtttgtttgcagtctctctctgccatggccttggcaggctgctggaaggcagcttgtggaggccgttggttccgcccactcattccttctcgtgcactgctttctccttcacagctaagatgccatgtgcaggtggattccatgccgcagacatgaaataaaagctttgcaaaggcacgaag

SEQ ID NO: 406596 - DNA, 3140 bp, Homo sapiens
ggcttttgggagcccgggcagcgagcgcactcggcggacgcaagggcggcggggagcacacggagcactgcaggcgccgggttgggacagcgtcttcgctgctgctggatagtcgtgttttcggggatcgaggatactcaccagaaaccgaaaatgccgaaaccaatcaatgtccgagttaccaccatggatgcagagctggagtttgcaatccagccaaatacaactggaaaacagctttttgatcaggtggtaaagactatcggcctccgggaagtgtggtactttggcctccactatgtggataataaaggatttcctacctggctgaagctggataagaaggtgtctgcccaggaggtcaggaaggagaatcccctccagttcaagttccgggccaagttctaccctgaagatgtggctgaggagctcatccaggacatcacccagaaacttttcttcctccaagtgaaggaaggaatccttagcgatgagatctactgcccccctgagactgccgtgctcttggggtcctacgctgtgcaggccaagtttggggactacaacaaagaagtgcacaagtctgggtacctcagctctgagcggctgatccctcaaagagtgatggaccagcacaaacttaccagggaccagtgggaggaccggatccaggtgtggcatgcggaacaccgtgggatgctcaaagataatgctatgttggaatacctgaagattgctcaggacctggaaatgtatggaatcaactatttcgagataaaaaacaagaaaggaacagacctttggcttggagttgatgcccttggactgaatatttatgagaaagatgataagttaaccccaaagattggctttccttggagtgaaatcaggaacatctctttcaatgacaaaaagtttgtcattaaacccatcgacaagaaggcacctgactttgtgttttatgccccacgtctgagaatcaacaagcggatcctgcagctctgcatgggcaaccatgagttgtatatgcgccgcaggaagcctgacaccatcgaggtgcagcagatgaaggcccaggcccgggaggagaagcatcagaagcagctggagcggcaacagctggaaacagagaagaaaaggagagaaaccgtggagagagagaaagagcagatgatgcgcgagaaggaggagttgatgctgcggctgcaggactatgaggagaagacaaagaaggcagagagagagctctcggagcagattcagagggccctgcagctggaggaggagaggaagcgggcacaggaggaggccgagcgcctagaggctgaccgtatggctgcactgcgggctaaggaggagctggagagacaggcggtggatcagataaagagccaggagcagctggctgcggagcttgcagaatacactgccaagattgccctcctggaagaggcgcggaggcgcaaggaggatgaagttgaagagtggcagcacagggccaaagaagcccaggatgacctggtgaagaccaaggaggagctgcacctggtgatgacagcacccccgcccccaccaccccccgtgtacgagccggtgagctaccatgtccaggagagcttgcaggatgagggcgcagagcccacgggctacagcgcggagctgtctagtgagggcatccgggatgaccgcaatgaggagaagcgcatcactgaggcagagaagaacgagcgtgtgcagcggcagctgctggggacgggccgggccatatggggaggaagggactagaccaacgctgcttaatgttacagacgctgagcagcgagctgtcccaggcccgagatgagaataagaggacccacaatgacatcatccacaacgagaacatgaggcaaggccgggacaagtacaagacgctgcggcagatccggcagggcaacaccaagcagcgcatcgacgagttcgaggccctgtaacagccaggccaggaccaagggcagaggggtgctcatagcgggcgctgccagccccgccacgcttgtctttagtgctccaagtctaggaactccctcagatcccagttcctttagaaagcagttacccaacagaaacattctgggctgggaaccagggaggcgccctggtttgttttccccagttgtaatagtgccaagcaggcctgattctcgcgattattctcgaatcacctcctgtgttgtgctgggagcaggactgattgaattacggaaaatgcctgtaaagtctgagtaagaaacttcatgctggcctgtgtgatacaagagtcagcatcattaaaggaaacgtggcaggacttccatctgtgccatacttgttctgtattcgaaatgagctcaaattgattttttaatttctatgaaggatccatctttgtatatttacatgcttagaggggtgaaaattattttggaaattgagtctgaagcactctcgcacacacagtgattccctcctcccgtcactccacgcagctggcagagagcacagtgatcaccagcgtgagtggtggaggaggacacttggatttttttttagtttttttttttttggcttaacagttttagaatacattgtacttatacaccttattaatgatcagctatatactatttatatacaagtgataatacagatttgtaacattagttttaaaaagggaaagttttgttctgtatattttgttaccttttacagaataaaagaattacatatgaaaaaccctctaaaccatggcacttgatgtgatgtggcaggagggcagtggtggagctggacctgcctgctgcagtcacgtgtaaacaggattattattagtgttttatgcatgtaatggactatgcacacttttaattttgtcagattcacacatgccactatgagctttcagactccagctgtgaagagactctgtttgcttgtgttgtttgtttgcagtctctctctgccatggccttggcaggctgctggaaggcagcttgtggaggccgttggttccgcccactcattccttctcgtgcactgctttctccttcacagctaagatgccatgtgcaggtggattccatgccgcagacatgaaataaaagctttgcaaaggcacgaag

SEQ ID NO: 406597 - DNA, 3245 bp, Homo sapiens
ggcttttgggagcccgggcagcgagcgcactcggcggacgcaagggcggcggggagcacacggagcactgcaggcgccgggttgggacagcgtcttcgctgctgctggatagtcgtgttttcggggatcgaggatactcaccagaaaccgaaaatgccgaaaccaatcaatgtccgagttaccaccatggatgcagagctggagtttgcaatccagccaaatacaactggaaaacagctttttgatcaagagacagggtttcgccatgtttgccaggctagtctcgaactcctgaactcaagtgatccacccgtcttggcctcccaaagtgctgggattacaagtgtgagccaccacgctcagcttgcagccttcccccatcccttttgggtgagtgggaagagggggaagaggtggtaaagactatcggcctccgggaagtgtggtactttggcctccactatgtggataataaaggatttcctacctggctgaagctggataagaaggtgtctgcccaggaggtcaggaaggagaatcccctccagttcaagttccgggccaagttctaccctgaagatgtggctgaggagctcatccaggacatcacccagaaacttttcttcctccaagtgaaggaaggaatccttagcgatgagatctactgcccccctgagactgccgtgctcttggggtcctacgctgtgcaggccaagtttggggactacaacaaagaagtgcacaagtctgggtacctcagctctgagcggctgatccctcaaagagtgatggaccagcacaaacttaccagggaccagtgggaggaccggatccaggtgtggcatgcggaacaccgtgggatgctcaaagataatgctatgttggaatacctgaagattgctcaggacctggaaatgtatggaatcaactatttcgagataaaaaacaagaaaggaacagacctttggcttggagttgatgcccttggactgaatatttatgagaaagatgataagttaaccccaaagattggctttccttggagtgaaatcaggaacatctctttcaatgacaaaaagtttgtcattaaacccatcgacaagaaggcacctgactttgtgttttatgccccacgtctgagaatcaacaagcggatcctgcagctctgcatgggcaaccatgagttgtatatgcgccgcaggaagcctgacaccatcgaggtgcagcagatgaaggcccaggcccgggaggagaagcatcagaagcagctggagcggcaacagctggaaacagagaagaaaaggagagaaaccgtggagagagagaaagagcagatgatgcgcgagaaggaggagttgatgctgcggctgcaggactatgaggagaagacaaagaaggcagagagagagctctcggagcagattcagagggccctgcagctggaggaggagaggaagcgggcacaggaggaggccgagcgcctagaggctgaccgtatggctgcactgcgggctaaggaggagctggagagacaggcggtggatcagataaagagccaggagcagctggctgcggagcttgcagaatacactgccaagattgccctcctggaagaggcgcggaggcgcaaggaggatgaagttgaagagtggcagcacagggccaaagaagcccaggatgacctggtgaagaccaaggaggagctgcacctggtgatgacagcacccccgcccccaccaccccccgtgtacgagccggtgagctaccatgtccaggagagcttgcaggatgagggcgcagagcccacgggctacagcgcggagctgtctagtgagggcatccgggatgaccgcaatgaggagaagcgcatcactgaggcagagaagaacgagcgtgtgcagcggcagctgctgacgctgagcagcgagctgtcccaggcccgagatgagaataagaggacccacaatgacatcatccacaacgagaacatgaggcaaggccgggacaagtacaagacgctgcggcagatccggcagggcaacaccaagcagcgcatcgacgagttcgaggccctgtaacagccaggccaggaccaagggcagaggggtgctcatagcgggcgctgccagccccgccacgcttgtctttagtgctccaagtctaggaactccctcagatcccagttcctttagaaagcagttacccaacagaaacattctgggctgggaaccagggaggcgccctggtttgttttccccagttgtaatagtgccaagcaggcctgattctcgcgattattctcgaatcacctcctgtgttgtgctgggagcaggactgattgaattacggaaaatgcctgtaaagtctgagtaagaaacttcatgctggcctgtgtgatacaagagtcagcatcattaaaggaaacgtggcaggacttccatctgtgccatacttgttctgtattcgaaatgagctcaaattgattttttaatttctatgaaggatccatctttgtatatttacatgcttagaggggtgaaaattattttggaaattgagtctgaagcactctcgcacacacagtgattccctcctcccgtcactccacgcagctggcagagagcacagtgatcaccagcgtgagtggtggaggaggacacttggatttttttttagtttttttttttttggcttaacagttttagaatacattgtacttatacaccttattaatgatcagctatatactatttatatacaagtgataatacagatttgtaacattagttttaaaaagggaaagttttgttctgtatattttgttaccttttacagaataaaagaattacatatgaaaaaccctctaaaccatggcacttgatgtgatgtggcaggagggcagtggtggagctggacctgcctgctgcagtcacgtgtaaacaggattattattagtgttttatgcatgtaatggactatgcacacttttaattttgtcagattcacacatgccactatgagctttcagactccagctgtgaagagactctgtttgcttgtgttgtttgtttgcagtctctctctgccatggccttggcaggctgctggaaggcagcttgtggaggccgttggttccgcccactcattccttctcgtgcactgctttctccttcacagctaagatgccatgtgcaggtggattccatgccgcagacatgaaataaaagctttgcaaaggcacgaag

SEQ ID NO: 406598 - DNA, 3035 bp, Homo sapiens
ggacgtgaaatctttacttagagaaaagcgacagagtcagagacccacgggggcgggcgccgagtgtcgggcgcggcaggaggacgaggcagggcgggcgggcgctctaagggttctgctctgactccaggttgggacagcgtcttcgctgctgctggatagtcgtgttttcggggatcgaggatactcaccagaaaccgaaaatgccgaaaccaatcaatgtccgagttaccaccatggatgcagagctggagtttgcaatccagccaaatacaactggaaaacagctttttgatcaggtgtctgcccaggaggtcaggaaggagaatcccctccagttcaagttccgggccaagttctaccctgaagatgtggctgaggagctcatccaggacatcacccagaaacttttcttcctccaagtgaaggaaggaatccttagcgatgagatctactgcccccctgagactgccgtgctcttggggtcctacgctgtgcaggccaagtttggggactacaacaaagaagtgcacaagtctgggtacctcagctctgagcggctgatccctcaaagagtgatggaccagcacaaacttaccagggaccagtgggaggaccggatccaggtgtggcatgcggaacaccgtgggatgctcaaagataatgctatgttggaatacctgaagattgctcaggacctggaaatgtatggaatcaactatttcgagataaaaaacaagaaaggaacagacctttggcttggagttgatgcccttggactgaatatttatgagaaagatgataagttaaccccaaagattggctttccttggagtgaaatcaggaacatctctttcaatgacaaaaagtttgtcattaaacccatcgacaagaaggcacctgactttgtgttttatgccccacgtctgagaatcaacaagcggatcctgcagctctgcatgggcaaccatgagttgtatatgcgccgcaggaagcctgacaccatcgaggtgcagcagatgaaggcccaggcccgggaggagaagcatcagaagcagctggagcggcaacagctggaaacagagaagaaaaggagagaaaccgtggagagagagaaagagcagatgatgcgcgagaaggaggagttgatgctgcggctgcaggactatgaggagaagacaaagaaggcagagagagagctctcggagcagattcagagggccctgcagctggaggaggagaggaagcgggcacaggaggaggccgagcgcctagaggctgaccgtatggctgcactgcgggctaaggaggagctggagagacaggcggtggatcagataaagagccaggagcagctggctgcggagcttgcagaatacactgccaagattgccctcctggaagaggcgcggaggcgcaaggaggatgaagttgaagagtggcagcacagggccaaagaagcccaggatgacctggtgaagaccaaggaggagctgcacctggtgatgacagcacccccgcccccaccaccccccgtgtacgagccggtgagctaccatgtccaggagagcttgcaggatgagggcgcagagcccacgggctacagcgcggagctgtctagtgagggcatccgggatgaccgcaatgaggagaagcgcatcactgaggcagagaagaacgagcgtgtgcagcggcagctgctgacgctgagcagcgagctgtcccaggcccgagatgagaataagaggacccacaatgacatcatccacaacgagaacatgaggcaaggccgggacaagtacaagacgctgcggcagatccggcagggcaacaccaagcagcgcatcgacgagttcgaggccctgtaacagccaggccaggaccaagggcagaggggtgctcatagcgggcgctgccagccccgccacgcttgtctttagtgctccaagtctaggaactccctcagatcccagttcctttagaaagcagttacccaacagaaacattctgggctgggaaccagggaggcgccctggtttgttttccccagttgtaatagtgccaagcaggcctgattctcgcgattattctcgaatcacctcctgtgttgtgctgggagcaggactgattgaattacggaaaatgcctgtaaagtctgagtaagaaacttcatgctggcctgtgtgatacaagagtcagcatcattaaaggaaacgtggcaggacttccatctgtgccatacttgttctgtattcgaaatgagctcaaattgattttttaatttctatgaaggatccatctttgtatatttacatgcttagaggggtgaaaattattttggaaattgagtctgaagcactctcgcacacacagtgattccctcctcccgtcactccacgcagctggcagagagcacagtgatcaccagcgtgagtggtggaggaggacacttggatttttttttagtttttttttttttggcttaacagttttagaatacattgtacttatacaccttattaatgatcagctatatactatttatatacaagtgataatacagatttgtaacattagttttaaaaagggaaagttttgttctgtatattttgttaccttttacagaataaaagaattacatatgaaaaaccctctaaaccatggcacttgatgtgatgtggcaggagggcagtggtggagctggacctgcctgctgcagtcacgtgtaaacaggattattattagtgttttatgcatgtaatggactatgcacacttttaattttgtcagattcacacatgccactatgagctttcagactccagctgtgaagagactctgtttgcttgtgttgtttgtttgcagtctctctctgccatggccttggcaggctgctggaaggcagcttgtggaggccgttggttccgcccactcattccttctcgtgcactgctttctccttcacagctaagatgccatgtgcaggtggattccatgccgcagacatgaaataaaagctttgcaaaggcacgaag

SEQ ID NO: 406599 - DNA, 3027 bp, Homo sapiens
ggcttttgggagcccgggcagcgagcgcactcggcggacgcaagggcggcggggagcacacggagcactgcaggcgccgggttgggacagcgtcttcgctgctgctggatagtcgtgttttcggggatcgaggatactcaccagaaaccgaaaatgccgaaaccaatcaatgtccgagttaccaccatggatgcagagctggagtttgcaatccagccaaatacaactggaaaacagctttttgatcaggtggtaaagactatcggcctccgggaagtgtggtactttggcctccactatgtggataataaaggatttcctacctggctgaagctggataagaaggtgtctgcccaggaggtcaggaaggagaatcccctccagttcaagttccgggccaagttctaccctgaagatgtggctgaggagctcatccaggacatcacccagaaacttttcttcctccaagtgaaggaaggaatccttagcgatgagatctactgcccccctgagactgccgtgctcttggggtcctacgctgtgcaggccaagtttggggactacaacaaagaagtgcacaagtctgggtacctcagctctgagcggctgatccctcaaagagtgatggaccagcacaaacttaccagggaccagtgggaggaccggatccaggtgtggcatgcggaacaccgtgggatgctcaaagataatgctatgttggaatacctgaagattgctcaggacctggaaatgtatggaatcaactatttcgagataaaaaacaagaaaggaacagacctttggcttggagttgatgcccttggactgaatatttatgagaaagatgataagttaaccccaaagattggctttccttggagtgaaatcaggaacatctctttcaatgacaaaaagtttgtcattaaacccatcgacaagaaggcacctgactttgtgttttatgccccacgtctgagaatcaacaagcggatcctgcagctctgcatgggcaaccatgagttgtatatgcgccgcaggaagcctgacaccatcgaggtgcagcagatgaaggcccaggcccgggaggagaagcatcagaagcagctggagcggcaacagctggaaacagagaagaaaaggagagaaaccgtggagagagagaaagagcagatgatgcgcgagaaggaggagttgatgctgcggctgcaggactatgaggagaagacaaagaaggcagagagagagctctcggagcagattcagagggccctgcagctggaggaggagaggaagcgggcacaggaggaggccgagcgcctagaggctgaccgtatggctgcactgcgggctaaggaggagctggagagacaggcggtggatcagataaagagccaggagcagctggctgcggagcttgcagaatacactgccaagattgccctcctggaagaggcgcggaggcgcaaggaggatgaagttgaagagtggcagcacagggccaaagaagcccaggatgacctggtgaagaccaaggaggagctgcacctggtgatgacagcacccccgcccccaccaccccccgtgtacgagccggtgagctaccatgtccaggagagcttgcaggatgagggcgcagagcccacgggctacagcgcggagctgtctagtgagggcatccgggatgaccgcaatgaggagaagcgcatcactgaggcagagaagaacgagcgtgtgcagcggcagctgctgacgctgagcagcgagctgtcccaggcccgagatgagaataagaggacccacaatgacatcatccacaacgagaacatgaggcaaggccgggacaagtacaagacgctgcggcagatccggcagggcaacaccaagcagcgcatcgacgagttcgaggccctgtaacagccaggccaggaccaagggcagaggggtgctcatagcgggcgctgccagccccgccacgcttgtctttagtgctccaagtctaggaactccctcagatcccagttcctttagaaagcagttacccaacagaaacattctgggctgggaaccagggaggcgccctggtttgttttccccagttgtaatagtgccaagcaggcctgattctcgcgattattctcgaatcacctcctgtgttgtgctgggagcaggactgattgaattacggaaaatgcctgtaaagtctgagtaagaaacttcatgctggcctgtgtgatacaagagtcagcatcattaaaggaaacgtggcaggacttccatctgtgccatacttgttctgtattcgaaatgagctcaaattgattttttaatttctatgaaggatccatctttgtatatttacatgcttagaggggtgcctcccgtcactccacgcagctggcagagagcacagtgatcaccagcgtgagtggtggaggaggacacttggatttttttttagtttttttttttttggcttaacagttttagaatacattgtacttatacaccttattaatgatcagctatatactatttatatacaagtgataatacagatttgtaacattagttttaaaaagggaaagttttgttctgtatattttgttaccttttacagaataaaagaattacatatgaaaaaccctctaaaccatggcacttgatgtgatgtggcaggagggcagtggtggagctggacctgcctgctgcagtcacgtgtaaacaggattattattagtgttttatgcatgtaatggactatgcacacttttaattttgtcagattcacacatgccactatgagctttcagactccagctgtgaagagactctgtttgcttgtgttgtttgtttgcagtctctctctgccatggccttggcaggctgctggaaggcagcttgtggaggccgttggttccgcccactcattccttctcgtgcactgctttctccttcacagctaagatgccatgtgcaggtggattccatgccgcagacatgaaataaaagctttgcaaaggcacgaag

SEQ ID NO: 406600 - DNA, 3081 bp, Homo sapiens
  misc_feature (2227)..(2227): n is a, c, g, or t
  misc_feature (2232)..(2232): n is a, c, g, or t
  misc_feature (2237)..(2237): n is a, c, g, or t
  misc_feature (2244)..(2244): n is a, c, g, or t
  misc_feature (2247)..(2247): n is a, c, g, or t
  misc_feature (2250)..(2250): n is a, c, g, or t
  misc_feature (2256)..(2258): n is a, c, g, or t
  misc_feature (2260)..(2260): n is a, c, g, or t
  misc_feature (2267)..(2267): n is a, c, g, or t
  misc_feature (2302)..(2302): n is a, c, g, or t
  misc_feature (2322)..(2323): n is a, c, g, or t
  misc_feature (2344)..(2344): n is a, c, g, or t
  misc_feature (2356)..(2356): n is a, c, g, or t
  misc_feature (2374)..(2374): n is a, c, g, or t
ggcttttgggagcccgggcagcgagcgcactcggcggacgcaagggcggcggggagcacacggagcactgcaggcgccgggttgggacagcgtcttcgctgctgctggatagtcgtgttttcggggatcgaggatactcaccagaaaccgaaaatgccgaaaccaatcaatgtccgagttaccaccatggatgcagagctggagtttgcaatccagccaaatacaactggaaaacagctttttgatcaggtggtaaagactatcggcctccgggaagtgtggtactttggcctccactatgtggataataaaggatttcctacctggctgaagctggataagaaggtgtctgcccaggaggtcaggaaggagaatcccctccagttcaagttccgggccaagttctaccctgaagatgtggctgaggagctcatccaggacatcacccagaaacttttcttcctccaagtgaaggaaggaatccttagcgatgagatctactgcccccctgagactgccgtgctcttggggtcctacgctgtgcaggccaagtttggggactacaacaaagaagtgcacaagtctgggtacctcagctctgagcggctgatccctcaaagagtgatggaccagcacaaacttaccagggaccagtgggaggaccggatccaggtgtggcatgcggaacaccgtgggatgctcaaagataatgctatgttggaatacctgaagattgctcaggacctggaaatgtatggaatcaactatttcgagataaaaaacaagaaaggaacagacctttggcttggagttgatgcccttggactgaatatttatgagaaagatgataagttaaccccaaagattggctttccttggagtgaaatcaggaacatctctttcaatgacaaaaagtttgtcattaaacccatcgacaagaaggcacctgactttgtgttttatgccccacgtctgagaatcaacaagcggatcctgcagctctgcatgggcaaccatgagttgtatatgcgccgcaggaagcctgacaccatcgaggtgcagcagatgaaggcccaggcccgggaggagaagcatcagaagcagctggagcggcaacagctggaaacagagaagaaaaggagagaaaccgtggagagagagaaagagcagatgatgcgcgagaaggaggagttgatgctgcggctgcaggactatgaggagaagacaaagaaggcagagagagagctctcggagcagattcagagggccctgcagctggaggaggagaggaagcgggcacaggaggaggccgagcgcctagaggctgaccgtatggctgcactgcgggctaaggaggagctggagagacaggcggtggatcagataaagagccaggagcagctggctgcggagcttgcagaatacactgccaagattgccctcctggaagaggcgcggaggcgcaaggaggatgaagttgaagagtggcagcacagggccaaagaagcccaggatgacctggtgaagaccaaggaggagctgcacctggtgatgacagcacccccgcccccaccaccccccgtgtacgagccggtgagctaccatgtccaggagagcttgcaggatgagggcgcagagcccacgggctacagcgcggagctgtctagtgagggcatccgggatgaccgcaatgaggagaagcgcatcactgaggcagagaagaacgagcgtgtgcagcggcagctgctgacgctgagcagcgagctgtcccaggcccgagatgagaataagaggacccacaatgacatcatccacaacgagaacatgaggcaaggccgggacaagtacaagacgctgcggcagatccggcagggcaacaccaagcagcgcatcgacgagttcgaggccctgtaacagccaggccaggaccaagggcagaggggtgctcatagcgggcgctgccagccccgccacgcttgtctttagtgctccaagtctaggaactccctcagatcccagttcctttagaaagcagttacccaacagaaacattctgggctgggaaccagggaggcgccctggtttgttttccccagttgtaatagtgccaagcaggcctgattctcgcgattattctcgaatcacctcctgtgttgtgctgggagcaggactgattgaattacggaaaatgcctgtaaagtctgagtaagaaacttcatgctggccnccctnacacnagacccnccntcnccaaannncnccccccngcccccccccccgccccacacccgccccgcaaccnaaaagagcccaaactgatcnnttaatccctacgaaggacccncccccgcacatncacacgcccagaggggtnaaaattattttggaaattgagtctgaagcactctcgcacacacagtgattccctcctcccgtcactccacgcagctggcagagagcacagtgatcaccagcgtgagtggtggaggaggacacttggatttttttttagtttttttttttttggcttaacagttttagaatacattgtacttatacaccttattaatgatcagctatatactatttatatacaagtgataatacagatttgtaacattagttttaaaaagggaaagttttgttctgtatattttgttaccttttacagaataaaagaattacatatgaaaaaccctctaaaccatggcacttgatgtgatgtggcaggagggcagtggtggagctggacctgcctgctgcagtcacgtgtaaacaggattattattagtgttttatgcatgtaatggactatgcacacttttaattttgtcagattcacacatgccactatgagctttcagactccagctgtgaagagactctgtttgcttgtgttgtttgtttgcagtctctctctgccatggccttggcaggctgctggaaggcagcttgtggaggccgttggttccgcccactcattccttctcgtgcactgctttctccttcacagctaagatgccatgtgcaggtggattccatgccgcagacatgaaataaaagctttgcaaaggcacgaag

SEQ ID NO: 406601 - DNA, 2919 bp, Homo sapiens
gtgtatcttgaaccaacctcgcattctaggaataaagcacacttgattgtcacgcactgacttttagttgtgttgttggattccatttgctagtatttcgttgaggattttttcatctgtgttcatcagggatttggcctgacgttttcttttttcattgtgtcctgccagattttggtatcaggatgatgctggcttcagagaatgagtcagggaggagtccttcctccttggttttgtgaaatagtttcagtaggattcgtaccaattctttgtatgtctggtagaattcagctgaggaccatcgttgcaacgatggtcctcagctcaacgatggtcctcagctcaacgatggtcctcagctcaacgatggtcctcagctcaacgatggtcctcagctcaacgatggtcctcagctcaacgatggtcctcagctctgagcggctgatccctcaaagagtgatggaccagcacaaacttaccagggaccagtgggaggaccggatccaggtgtggcatgcggaacaccgtgggatgctcaaagataatgctatgttggaatacctgaagattgctcaggacctggaaatgtatggaatcaactatttcgagataaaaaacaagaaaggaacagacctttggcttggagttgatgcccttggactgaatatttatgagaaagatgataagttaaccccaaagattggctttccttggagtgaaatcaggaacatctctttcaatgacaaaaagtttgtcattaaacccatcgacaagaaggcacctgactttgtgttttatgccccacgtctgagaatcaacaagcggatcctgcagctctgcatgggcaaccatgagttgtatatgcgccgcaggaagcctgacaccatcgaggtgcagcagatgaaggcccaggcccgggaggagaagcatcagaagcagctggagcggcaacagctggaaacagagaagaaaaggagagaaaccgtggagagagagaaagagcagatgatgcgcgagaaggaggagttgatgctgcggctgcaggactatgaggagaagacaaagaaggcagagagagagctctcggagcagattcagagggccctgcagctggaggaggagaggaagcgggcacaggaggaggccgagcgcctagaggctgaccgtatggctgcactgcgggctaaggaggagctggagagacaggcggtggatcagataaagagccaggagcagctggctgcggagcttgcagaatacactgccaagattgccctcctggaagaggcgcggaggcgcaaggaggatgaagttgaagagtggcagcacagggccaaagaagcccaggatgacctggtgaagaccaaggaggagctgcacctggtgatgacagcacccccgcccccaccaccccccgtgtacgagccggtgagctaccatgtccaggagagcttgcaggatgagggcgcagagcccacgggctacagcgcggagctgtctagtgagggcatccgggatgaccgcaatgaggagaagcgcatcactgaggcagagaagaacgagcgtgtgcagcggcagctgctgacgctgagcagcgagctgtcccaggcccgagatgagaataagaggacccacaatgacatcatccacaacgagaacatgaggcaaggccgggacaagtacaagacgctgcggcagatccggcagggcaacaccaagcagcgcatcgacgagttcgaggccctgtaacagccaggccaggaccaagggcagaggggtgctcatagcgggcgctgccagccccgccacgcttgtctttagtgctccaagtctaggaactccctcagatcccagttcctttagaaagcagttacccaacagaaacattctgggctgggaaccagggaggcgccctggtttgttttccccagttgtaatagtgccaagcaggcctgattctcgcgattattctcgaatcacctcctgtgttgtgctgggagcaggactgattgaattacggaaaatgcctgtaaagtctgagtaagaaacttcatgctggcctgtgtgatacaagagtcagcatcattaaaggaaacgtggcaggacttccatctgtgccatacttgttctgtattcgaaatgagctcaaattgattttttaatttctatgaaggatccatctttgtatatttacatgcttagaggggtgaaaattattttggaaattgagtctgaagcactctcgcacacacagtgattccctcctcccgtcactccacgcagctggcagagagcacagtgatcaccagcgtgagtggtggaggaggacacttggatttttttttagtttttttttttttggcttaacagttttagaatacattgtacttatacaccttattaatgatcagctatatactatttatatacaagtgataatacagatttgtaacattagttttaaaaagggaaagttttgttctgtatattttgttaccttttacagaataaaagaattacatatgaaaaaccctctaaaccatggcacttgatgtgatgtggcaggagggcagtggtggagctggacctgcctgctgcagtcacgtgtaaacaggattattattagtgttttatgcatgtaatggactatgcacacttttaattttgtcagattcacacatgccactatgagctttcagactccagctgtgaagagactctgtttgcttgtgttgtttgtttgcagtctctctctgccatggccttggcaggctgctggaaggcagcttgtggaggccgttggttccgcccactcattccttctcgtgcactgctttctccttcacagctaagatgccatgtgcaggtggattccatgccgcagacatgaaataaaagctttgcaaaggcacgaag

SEQ ID NO: 406602 - DNA, 2468 bp, Homo sapiens
ggcttttgggagcccgggcagcgagcgcactcggcggacgcaagggcggcggggagcacacggagcactgcaggcgccgggttgggacagcgtcttcgctgctgctggatagtcgtgttttcggggatcgaggatactcaccagaaaccgaaaatgccgaaaccaatcaatgtccgagttaccaccatggatgcagagctggagtttgcaatccagccaaatacaactggaaaacagctttttgatcaggtggtaaagactatcggcctccgggaagtgtggtactttggcctccactatgtggataataaaggatttcctacctggctgaagctggataagaaggtgtctgcccaggaggtcaggaaggagaatcccctccagttcaagttccgggccaagttctaccctgaagatgtggctgaggagctcatccaggacatcacccagaaacttttcttcctccaagtgaaggaaggaatccttagcgatgagatctactgcccccctgagactgccgtgctcttggggtcctacgctgtgcaggccaagtttggggactacaacaaagaagtgcacaagtctgggtacctcagctctgagcggctgatccctcaaagagtgatggaccagcacaaacttaccagggaccagtgggaggaccggatccaggtgtggcatgcggaacaccgtgggatgctcaaagataatgctatgttggaatacctgaagattgctcaggacctggaaatgtatggaatcaactatttcgagataaaaaacaagaaaggaacagacctttggcttggagttgatgcccttggactgaatatttatgagaaagatgataagttaaccccaaagattggctttccttggagtgaaatcaggaacatctctttcaatgacaaaaagtttgtcattaaacccatcgacaagaaggcacctgactttgtgttttatgccccacgtctgagaatcaacaagcggatcctgcagctctgcatgggcaaccatgagttgtatatgcgccgcaggaagcctgacaccatcgaggtgcagcagatgaaggcccaggcccgggaggagaagcatcagaagcagagaagaacgagcgtgtgcagcggcagctgctgacgctgagcagcgagctgtcccaggcccgagatgagaataagaggacccacaatgacatcatccacaacgagaacatgaggcaaggccgggacaagtacaagacgctgcggcagatccggcagggcaacaccaagcagcgcatcgacgagttcgaggccctgtaacagccaggccaggaccaagggcagaggggtgctcatagcgggcgctgccagccccgccacgcttgtctttagtgctccaagtctaggaactccctcagatcccagttcctttagaaagcagttacccaacagaaacattctgggctgggaaccagggaggcgccctggtttgttttccccagttgtaatagtgccaagcaggcctgattctcgcgattattctcgaatcacctcctgtgttgtgctgggagcaggactgattgaattacggaaaatgcctgtaaagtctgagtaagaaacttcatgctggcctgtgtgatacaagagtcagcatcattaaaggaaacgtggcaggacttccatctgtgccatacttgttctgtattcgaaatgagctcaaattgattttttaatttctatgaaggatccatctttgtatatttacatgcttagaggggtgaaaattattttggaaattgagtctgaagcactctcgcacacacagtgattccctcctcccgtcactccacgcagctggcagagagcacagtgatcaccagcgtgagtggtggaggaggacacttggatttttttttagtttttttttttttggcttaacagttttagaatacattgtacttatacaccttattaatgatcagctatatactatttatatacaagtgataatacagatttgtaacattagttttaaaaagggaaagttttgttctgtatattttgttaccttttacagaataaaagaattacatatgaaaaaccctctaaaccatggcacttgatgtgatgtggcaggagggcagtggtggagctggacctgcctgctgcagtcacgtgtaaacaggattattattagtgttttatgcatgtaatggactatgcacacttttaattttgtcagattcacacatgccactatgagctttcagactccagctgtgaagagactctgtttgcttgtgttgtttgtttgcagtctctctctgccatggccttggcaggctgctggaaggcagcttgtggaggccgttggttccgcccactcattccttctcgtgcactgctttctccttcacagctaagatgccatgtgcaggtggattccatgccgcagacatgaaataaaagctttgcaaaggcacgaag

SEQ ID NO: 406603 - DNA, 2546 bp, Homo sapiens
gggtcccctcctcaccggtcggctgcccggcccctgcctgcctgcacgcagcacacagcattgagcccatcctacacaaggcgccttaatttaaaaatactggaaaggttttactgttctagatattgagtgctaccagtgactctgcctgtttcactctccccaattaagataatgctatgttggaatacctgaagattgctcaggacctggaaatgtatggaatcaactatttcgagataaaaaacaagaaaggaacagacctttggcttggagttgatgcccttggactgaatatttatgagaaagatgataagttaaccccaaagattggctttccttggagtgaaatcaggaacatctctttcaatgacaaaaagtttgtcattaaacccatcgacaagaaggcacctgactttgtgttttatgccccacgtctgagaatcaacaagcggatcctgcagctctgcatgggcaaccatgagttgtatatgcgccgcaggaagcctgacaccatcgaggtgcagcagatgaaggcccaggcccgggaggagaagcatcagaagcagctggagcggcaacagctggaaacagagaagaaaaggagagaaaccgtggagagagagaaagagcagatgatgcgcgagaaggaggagttgatgctgcggctgcaggactatgaggagaagacaaagaaggcagagagagagctctcggagcagattcagagggccctgcagctggaggaggagaggaagcgggcacaggaggaggccgagcgcctagaggctgaccgtatggctgcactgcgggctaaggaggagctggagagacaggcggtggatcagataaagagccaggagcagctggctgcggagcttgcagaatacactgccaagattgccctcctggaagaggcgcggaggcgcaaggaggatgaagttgaagagtggcagcacagggccaaagaagcccaggatgacctggtgaagaccaaggaggagctgcacctggtgatgacagcacccccgcccccaccaccccccgtgtacgagccggtgagctaccatgtccaggagagcttgcaggatgagggcgcagagcccacgggctacagcgcggagctgtctagtgagggcatccgggatgaccgcaatgaggagaagcgcatcactgaggcagagaagaacgagcgtgtgcagcggcagctgctgacgctgagcagcgagctgtcccaggcccgagatgagaataagaggacccacaatgacatcatccacaacgagaacatgaggcaaggccgggacaagtacaagacgctgcggcagatccggcagggcaacaccaagcagcgcatcgacgagttcgaggccctgtaacagccaggccaggaccaagggcagaggggtgctcatagcgggcgctgccagccccgccacgcttgtctttagtgctccaagtctaggaactccctcagatcccagttcctttagaaagcagttacccaacagaaacattctgggctgggaaccagggaggcgccctggtttgttttccccagttgtaatagtgccaagcaggcctgattctcgcgattattctcgaatcacctcctgtgttgtgctgggagcaggactgattgaattacggaaaatgcctgtaaagtctgagtaagaaacttcatgctggcctgtgtgatacaagagtcagcatcattaaaggaaacgtggcaggacttccatctgtgccatacttgttctgtattcgaaatgagctcaaattgattttttaatttctatgaaggatccatctttgtatatttacatgcttagaggggtgaaaattattttggaaattgagtctgaagcactctcgcacacacagtgattccctcctcccgtcactccacgcagctggcagagagcacagtgatcaccagcgtgagtggtggaggaggacacttggatttttttttagtttttttttttttggcttaacagttttagaatacattgtacttatacaccttattaatgatcagctatatactatttatatacaagtgataatacagatttgtaacattagttttaaaaagggaaagttttgttctgtatattttgttaccttttacagaataaaagaattacatatgaaaaaccctctaaaccatggcacttgatgtgatgtggcaggagggcagtggtggagctggacctgcctgctgcagtcacgtgtaaacaggattattattagtgttttatgcatgtaatggactatgcacacttttaattttgtcagattcacacatgccactatgagctttcagactccagctgtgaagagactctgtttgcttgtgttgtttgtttgcagtctctctctgccatggccttggcaggctgctggaaggcagcttgtggaggccgttggttccgcccactcattccttctcgtgcactgctttctccttcacagctaagatgccatgtgcaggtggattccatgccgcagacatgaaataaaagctttgcaaaggcacgaag

SEQ ID NO: 406604 - DNA, 1672 bp, Homo sapiens
ggcttttgggagcccgggcagcgagcgcactcggcggacgcaagggcggcggggagcacacggagcactgcaggcgccgggttgggacagcgtcttcgctgctgctggatagtcgtgttttcggggatcgaggatactcaccagaaaccgaaaatgccgaaaccaatcaatgtccgagttaccaccatggatgcagagctggagtttgcaatccagccaaatacaactggaaaacagctttttgatcaggtggtaaagactatcggcctccgggaagtgtggtactttggcctccactatgtggataataaaggatttcctacctggctgaagctggataagaaggtgtctgcccaggaggtcaggaaggagaatcccctccagttcaagttccgggccaagttctaccctgaagatgtggctgaggagctcatccaggacatcacccagaaacttttcttcctccaagtgaaggaaggaatccttagcgatgagatctactgcccccctgagactgccgtgctcttggggtcctacgctgtgcaggccaagtttggggactacaacaaagaagtgcacaagtctgggtacctcagctctgagcggctgatccctcaaagagtgatggaccagcacaaacttaccagggaccagtgggaggaccggatccaggtgtggcatgcggaacaccgtgggatgctcaaagataatgctatgttggaatacctgaagattgctcaggacctggaaatgtatggaatcaactatttcgagataaaaaacaagaaaggaacagacctttggcttggagttgatgcccttggactgaatatttatgagaaagatgataagttaaccccaaagattggctttccttggagtgaaatcaggaacatctctttcaatgacaaaaagtttgtcattaaacccatcgacaagaaggcacctgactttgtgttttatgccccacgtctgagaatcaacaagcggatcctgcagctctgcatgggcaaccatgagttgtatatgcgccgcaggaagcctgacaccatcgaggtgcagcagatgaaggcccaggcccgggaggagaagcatcagaagcagctggagcggcaacagctggaaacagagaagaaaaggagagaaaccgtggagagagagaaagagcagatgatgcgcgagaaggaggagttgatgctgcggctgcaggactatgaggagaagacaaagaaggcagagagagagctctcggagcagattcagagggccctgcagctggaggaggagaggaagcgggcacaggaggaggccgagcgcctagaggctgaccgtatggctgcactgcgggctaaggaggagctggagagacaggcggtggatcagataaagagccaggagcagctggctgcggagcttgcagaatacactgccaagattgccctcctggaagaggcgcggaggcgcaaggaggatgaagttgaagagtggcagcacagggccaaagaagcccaggatgacctggtgaagaccaaggaggagctgcacctggtgatgacagcacccccgcccccaccaccccccgtgtacgagccgaggagagcttgcaggcctctgcgagttgccacccctccgaagttggtctgggtcagatgcggccgtggaccctctagaa

SEQ ID NO: 406605 - DNA, 1547 bp, Homo sapiens
  misc_feature (1504)..(1504): n is a, c, g, or t
  misc_feature (1528)..(1528): n is a, c, g, or t
ggcttttgggagcccgggcagcgagcgcactcggcggacgcaagggcggcggggagcacacggagcactgcaggcgccgggttgggacagcgtcttcgctgctgctggatagtcgtgttttcggggatcgaggatactcaccagaaaccgaaaatgccgaaaccaatcaatgtccgagttaccaccatggatgcagagctggagtttgcaatccagccaaatacaactggaaaacagctttttgatcaggtggtaaagactatcggcctccgggaagtgtggtactttggcctccactatgtggataataaaggatttcctacctggctgaagctggataagaaggtgtctgcccaggaggtcaggaaggagaatcccctccagttcaagttccgggccaagttctaccctgaagatgtggctgaggagctcatccaggacatcacccagaaacttttcttcctccaagtgaaggaaggaatccttagcgatgagatctactgcccccctgagactgccgtgctcttggggtcctacgctgtgcaggccaagtttggggactacaacaaagaagtgcacaagtctgggtacctcagctctgagcggctgatccctcaaagagtgatggaccagcacaaacttaccagggaccagtgggaggaccggatccaggtgtggcatgcggaacaccgtgggatgctcaaagataatgctatgttggaatacctgaagattgctcaggacctggaaatgtatggaatcaactatttcgagataaaaaacaagaaaggaacagacctttggcttggagttgatgcccttggactgaatatttatgagaaagatgataagttaaccccaaagattggctttccttggagtgaaatcaggaacatctctttcaatgacaaaaagtttgtcattaaacccatcgacaagaaggcacctgactttgtgttttatgccccacgtctgagaatcaacaagcggatcctgcagctctgcatgggcaaccatgagttgtatatgcgccgcaggaagcctgacaccatcgaggtgcagcagatgaaggcccaggcccgggaggagaagcatcagaagcagctggagcggcaacagctggaaacagagaagaaaaggagagaaaccgtggagagagagaaagagcagatgatgcgcgagaaggaggagttgatgctgcggctgcaggactatgaggagaagacaaagaaggcagagagagagctctcggagcagattcagagggccctgcagctggaggaggagaggaagcgggcacaggaggaggccgagcgcctagaggctgaccgtatggctgcactgcgggctaaggaggagctggagagacaggcggtggatcagataaagagccaggagcagctggctgcggagcttgcagaatacactgccaagattgccctcctggaagaggcgcggaggcgcaaggaggatgaagttgaagagtggcagcacaggccaaganccagatactgtgaacaggagactnctgtgtacagacccgccca

SEQ ID NO: 406606 - DNA, 2368 bp, Homo sapiens
agatattttcacctatgctaaagtattggcactgatcacggtcagcgtcgcaggcattgttatacttggcaagaaaggaacagacctttggcttggagttgatgcccttggactgaatatttatgagaaagatgataagttaaccccaaagattggctttccttggagtgaaatcaggaacatctctttcaatgacaaaaagtttgtcattaaacccatcgacaagaaggcacctgactttgtgttttatgccccacgtctgagaatcaacaagcggatcctgcagctctgcatgggcaaccatgagttgtatatgcgccgcaggaagcctgacaccatcgaggtgcagcagatgaaggcccaggcccgggaggagaagcatcagaagcagctggagcggcaacagctggaaacagagaagaaaaggagagaaaccgtggagagagagaaagagcagatgatgcgcgagaaggaggagttgatgctgcggctgcaggactatgaggagaagacaaagaaggcagagagagagctctcggagcagattcagagggccctgcagctggaggaggagaggaagcgggcacaggaggaggccgagcgcctagaggctgaccgtatggctgcactgcgggctaaggaggagctggagagacaggcggtggatcagataaagagccaggagcagctggctgcggagcttgcagaatacactgccaagattgccctcctggaagaggcgcggaggcgcaaggaggatgaagttgaagagtggcagcacagggccaaagaagcccaggatgacctggtgaagaccaaggaggagctgcacctggtgatgacagcacccccgcccccaccaccccccgtgtacgagccggtgagctaccatgtccaggagagcttgcaggatgagggcgcagagcccacgggctacagcgcggagctgtctagtgagggcatccgggatgaccgcaatgaggagaagcgcatcactgaggcagagaagaacgagcgtgtgcagcggcagctgctgacgctgagcagcgagctgtcccaggcccgagatgagaataagaggacccacaatgacatcatccacaacgagaacatgaggcaaggccgggacaagtacaagacgctgcggcagatccggcagggcaacaccaagcagcgcatcgacgagttcgaggccctgtaacagccaggccaggaccaagggcagaggggtgctcatagcgggcgctgccagccccgccacgcttgtctttagtgctccaagtctaggaactccctcagatcccagttcctttagaaagcagttacccaacagaaacattctgggctgggaaccagggaggcgccctggtttgttttccccagttgtaatagtgccaagcaggcctgattctcgcgattattctcgaatcacctcctgtgttgtgctgggagcaggactgattgaattacggaaaatgcctgtaaagtctgagtaagaaacttcatgctggcctgtgtgatacaagagtcagcatcattaaaggaaacgtggcaggacttccatctgtgccatacttgttctgtattcgaaatgagctcaaattgattttttaatttctatgaaggatccatctttgtatatttacatgcttagaggggtgaaaattattttggaaattgagtctgaagcactctcgcacacacagtgattccctcctcccgtcactccacgcagctggcagagagcacagtgatcaccagcgtgagtggtggaggaggacacttggatttttttttagtttttttttttttggcttaacagttttagaatacattgtacttatacaccttattaatgatcagctatatactatttatatacaagtgataatacagatttgtaacattagttttaaaaagggaaagttttgttctgtatattttgttaccttttacagaataaaagaattacatatgaaaaaccctctaaaccatggcacttgatgtgatgtggcaggagggcagtggtggagctggacctgcctgctgcagtcacgtgtaaacaggattattattagtgttttatgcatgtaatggactatgcacacttttaattttgtcagattcacacatgccactatgagctttcagactccagctgtgaagagactctgtttgcttgtgttgtttgtttgcagtctctctctgccatggccttggcaggctgctggaaggcagcttgtggaggccgttggttccgcccactcattccttctcgtgcactgctttctccttcacagctaagatgccatgtgcaggtggattccatgccgcagacatgaaataaaagctttgcaaaggcacgaag

SEQ ID NO: 406607 - DNA, 2410 bp, Homo sapiens
agttcagtatcttataaacaaaaataagcgtcacccctctgacaaagtatgaaccagtcttctaaataaaattaatggcttctttaagaaaagcctcagccaccttgcagagatgacttgggaaatcttaaggaagaatgtgtctccttctggagacaccagacaaacaactctgaggcgatgattggctttccttggagtgaaatcaggaacatctctttcaatgacaaaaagtttgtcattaaacccatcgacaagaaggcacctgactttgtgtgactttgtgttttatgccccacgtctgagaatcaacaagcggatcctgcagctctgcatgggcaaccatgagttgtatatgcgccgcaggaagcctgacaccatcgaggtgcagcagatgaaggcccaggcccgggaggagaagcatcagaagcagctggagcggcaacagctggaaacagagaagaaaaggagagaaaccgtggagagagagaaagagcagatgatgcgcgagaaggaggagttgatgctgcggctgcaggactatgaggagaagacaaagaaggcagagagagagctctcggagcagattcagagggccctgcagctggaggaggagaggaagcgggcacaggaggaggccgagcgcctagaggctgaccgtatggctgcactgcgggctaaggaggagctggagagacaggcggtggatcagataaagagccaggagcagctggctgcggagcttgcagaatacactgccaagattgccctcctggaagaggcgcggaggcgcaaggaggatgaagttgaagagtggcagcacagggccaaagaagcccaggatgacctggtgaagaccaaggaggagctgcacctggtgatgacagcacccccgcccccaccaccccccgtgtacgagccggtgagctaccatgtccaggagagcttgcaggatgagggcgcagagcccacgggctacagcgcggagctgtctagtgagggcatccgggatgaccgcaatgaggagaagcgcatcactgaggcagagaagaacgagcgtgtgcagcggcagctgctgacgctgagcagcgagctgtcccaggcccgagatgagaataagaggacccacaatgacatcatccacaacgagaacatgaggcaaggccgggacaagtacaagacgctgcggcagatccggcagggcaacaccaagcagcgcatcgacgagttcgaggccctgtaacagccaggccaggaccaagggcagaggggtgctcatagcgggcgctgccagccccgccacgcttgtctttagtgctccaagtctaggaactccctcagatcccagttcctttagaaagcagttacccaacagaaacattctgggctgggaaccagggaggcgccctggtttgttttccccagttgtaatagtgccaagcaggcctgattctcgcgattattctcgaatcacctcctgtgttgtgctgggagcaggactgattgaattacggaaaatgcctgtaaagtctgagtaagaaacttcatgctggcctgtgtgatacaagagtcagcatcattaaaggaaacgtggcaggacttccatctgtgccatacttgttctgtattcgaaatgagctcaaattgattttttaatttctatgaaggatccatctttgtatatttacatgcttagaggggtgaaaattattttggaaattgagtctgaagcactctcgcacacacagtgattccctcctcccgtcactccacgcagctggcagagagcacagtgatcaccagcgtgagtggtggaggaggacacttggatttttttttagtttttttttttttggcttaacagttttagaatacattgtacttatacaccttattaatgatcagctatatactatttatatacaagtgataatacagatttgtaacattagttttaaaaagggaaagttttgttctgtatattttgttaccttttacagaataaaagaattacatatgaaaaaccctctaaaccatggcacttgatgtgatgtggcaggagggcagtggtggagctggacctgcctgctgcagtcacgtgtaaacaggattattattagtgttttatgcatgtaatggactatgcacacttttaattttgtcagattcacacatgccactatgagctttcagactccagctgtgaagagactctgtttgcttgtgttgtttgtttgcagtctctctctgccatggccttggcaggctgctggaaggcagcttgtggaggccgttggttccgcccactcattccttctcgtgcactgctttctccttcacagctaagatgccatgtgcaggtggattccatgccgcagacatgaaataaaagctttgcaaaggcacgaag

SEQ ID NO: 406608 - DNA, 2160 bp, Homo sapiens
tccaggtggccctgttctgttttgtaggactttgtgttttatgccccacgtctgagaatcaacaagcggatcctgcagctctgcatgggcaaccatgagttgtatatgcgccgcaggaagcctgacaccatcgaggtgcagcagatgaaggcccaggcccgggaggagaagcatcagaagcagctggagcggcaacagctggaaacagagaagaaaaggagagaaaccgtggagagagagaaagagcagatgatgcgcgagaaggaggagttgatgctgcggctgcaggactatgaggagaagacaaagaaggcagagagagagctctcggagcagattcagagggccctgcagctggaggaggagaggaagcgggcacaggaggaggccgagcgcctagaggctgaccgtatggctgcactgcgggctaaggaggagctggagagacaggcggtggatcagataaagagccaggagcagctggctgcggagcttgcagaatacactgccaagattgccctcctggaagaggcgcggaggcgcaaggaggatgaagttgaagagtggcagcacagggccaaagaagcccaggatgacctggtgaagaccaaggaggagctgcacctggtgatgacagcacccccgcccccaccaccccccgtgtacgagccggtgagctaccatgtccaggagagcttgcaggatgagggcgcagagcccacgggctacagcgcggagctgtctagtgagggcatccgggatgaccgcaatgaggagaagcgcatcactgaggcagagaagaacgagcgtgtgcagcggcagctgctgacgctgagcagcgagctgtcccaggcccgagatgagaataagaggacccacaatgacatcatccacaacgagaacatgaggcaaggccgggacaagtacaagacgctgcggcagatccggcagggcaacaccaagcagcgcatcgacgagttcgaggccctgtaacagccaggccaggaccaagggcagaggggtgctcatagcgggcgctgccagccccgccacgcttgtctttagtgctccaagtctaggaactccctcagatcccagttcctttagaaagcagttacccaacagaaacattctgggctgggaaccagggaggcgccctggtttgttttccccagttgtaatagtgccaagcaggcctgattctcgcgattattctcgaatcacctcctgtgttgtgctgggagcaggactgattgaattacggaaaatgcctgtaaagtctgagtaagaaacttcatgctggcctgtgtgatacaagagtcagcatcattaaaggaaacgtggcaggacttccatctgtgccatacttgttctgtattcgaaatgagctcaaattgattttttaatttctatgaaggatccatctttgtatatttacatgcttagaggggtgaaaattattttggaaattgagtctgaagcactctcgcacacacagtgattccctcctcccgtcactccacgcagctggcagagagcacagtgatcaccagcgtgagtggtggaggaggacacttggatttttttttagtttttttttttttggcttaacagttttagaatacattgtacttatacaccttattaatgatcagctatatactatttatatacaagtgataatacagatttgtaacattagttttaaaaagggaaagttttgttctgtatattttgttaccttttacagaataaaagaattacatatgaaaaaccctctaaaccatggcacttgatgtgatgtggcaggagggcagtggtggagctggacctgcctgctgcagtcacgtgtaaacaggattattattagtgttttatgcatgtaatggactatgcacacttttaattttgtcagattcacacatgccactatgagctttcagactccagctgtgaagagactctgtttgcttgtgttgtttgtttgcagtctctctctgccatggccttggcaggctgctggaaggcagcttgtggaggccgttggttccgcccactcattccttctcgtgcactgctttctccttcacagctaagatgccatgtgcaggtggattccatgccgcagacatgaaataaaagctttgcaaaggcacgaag

SEQ ID NO: 406609 - DNA, 2008 bp, Homo sapiens
ccgtatgggagagatgaatggcaagaactgggccaagctgtgcaaggactgcaaggtggctgacggaaagcccgtgacagggaccgatgtggacatcgtcttctccaaagtcaaggggaagtctgctcgggtcatcaactatgaggagaagacaaagaaggcagagagagagctctcggagcagattcagagggccctgcagctggaggaggagaggaagcgggcacaggaggaggccgagcgcctagaggctgaccgtatggctgcactgcgggctaaggaggagctggagagacaggcggtggatcagataaagagccaggagcagctggctgcggagcttgcagaatacactgccaagattgccctcctggaagaggcgcggaggcgcaaggaggatgaagttgaagagtggcagcacagggccaaagaagcccaggatgacctggtgaagaccaaggaggagctgcacctggtgatgacagcacccccgcccccaccaccccccgtgtacgagccggtgagctaccatgtccaggagagcttgcaggatgagggcgcagagcccacgggctacagcgcggagctgtctagtgagggcatccgggatgaccgcaatgaggagaagcgcatcactgaggcagagaagaacgagcgtgtgcagcggcagctgctgacgctgagcagcgagctgtcccaggcccgagatgagaataagaggacccacaatgacatcatccacaacgagaacatgaggcaaggccgggacaagtacaagacgctgcggcagatccggcagggcaacaccaagcagcgcatcgacgagttcgaggccctgtaacagccaggccaggaccaagggcagaggggtgctcatagcgggcgctgccagccccgccacgcttgtctttagtgctccaagtctaggaactccctcagatcccagttcctttagaaagcagttacccaacagaaacattctgggctgggaaccagggaggcgccctggtttgttttccccagttgtaatagtgccaagcaggcctgattctcgcgattattctcgaatcacctcctgtgttgtgctgggagcaggactgattgaattacggaaaatgcctgtaaagtctgagtaagaaacttcatgctggcctgtgtgatacaagagtcagcatcattaaaggaaacgtggcaggacttccatctgtgccatacttgttctgtattcgaaatgagctcaaattgattttttaatttctatgaaggatccatctttgtatatttacatgcttagaggggtgaaaattattttggaaattgagtctgaagcactctcgcacacacagtgattccctcctcccgtcactccacgcagctggcagagagcacagtgatcaccagcgtgagtggtggaggaggacacttggatttttttttagtttttttttttttggcttaacagttttagaatacattgtacttatacaccttattaatgatcagctatatactatttatatacaagtgataatacagatttgtaacattagttttaaaaagggaaagttttgttctgtatattttgttaccttttacagaataaaagaattacatatgaaaaaccctctaaaccatggcacttgatgtgatgtggcaggagggcagtggtggagctggacctgcctgctgcagtcacgtgtaaacaggattattattagtgttttatgcatgtaatggactatgcacacttttaattttgtcagattcacacatgccactatgagctttcagactccagctgtgaagagactctgtttgcttgtgttgtttgtttgcagtctctctctgccatggccttggcaggctgctggaaggcagcttgtggaggccgttggttccgcccactcattccttctcgtgcactgctttctccttcacagctaagatgccatgtgcaggtggattccatgccgcagacatgaaataaaagctttgcaaaggcacgaag

SEQ ID NO: 406610 - DNA, 3312 bp, Homo sapiens
gttgggggagaggtctggctcaagctgccacatcccactggaagcttctgggatgtctcatgatcctctgccaataccagctgtactactgaagtagacatccccaaagagatgggtttgactttgtacacgagtcagtgcagctgctggattcatagagggaggacctctgattgactttcacccactttgctccctccaccccgaactgttcagtgctgatctgacagcccccggtcaggaactggttttaaatctaattatatatgtgccccttgcaatggggtcgcagtgcctgaaacacgacctcctgcagctagtatatacagcgggcaccatggaaagatccagctccttggacgtctccaggctggagtgagagctgggctctgctgctcatcagctatttgggggctagtagcatcacttcttcaagcctcattttcctcattgtagaatgggggcaatacccaactcataaggttgctctgcagatgcgaggtcccatgcccaggacctagcacagaggtttagtcagctgtagctctcattgtgggacgcacacagagcttgtcgctccgtctgggatcccctgtgccctccaggaaggcacagcccctgagaagctctggggatggttcccactggagactgcacaccaggctttaagcagctcctctccttcacagacccgctggcgcgtccttcccccactgtggcttctccatctgtggaggtgccttctggggacgtgtctcccggctgtccagggctgctgctgcctagtacctccttgcctctgttccagcccccattcccgctgccgatctgtattaggctgttctcacaacggctataaagaacaagctgagactgggtagttaaagaaaagaggtttaattgactcacagtcccacatggctgggggaggcctcaggaaatttacaatcgtggcagaaggcgaaggggaagcaggcacctcttacatgagggcagaagagagaaaagcaaaggggggtaatgccaaacactgaaaccatcagctcttgctcagaacccacccactagcacgagaacagcataggggaaaccaccccgtaatccagtcacctcccaccaggtaatgccccccacccccagcatggggggattacaggtggagatgagatttgggtggggacacagccatatcaccatcccaagttgcaagcggaagactttggttcttaggtttttggagaaagtacctgttaagtgaggagagctggctacaaagcagatccacactaagctcaactctagggctggctgggatggaggcgggcgggactgggtgtgtgtgaagctgttggaaggactgcaagtggcgagcaggagagcacttgataatgactgtggcatgaagggaggctaggaacagagcccgttactcatgctaacaggattttttttctaaaaattatataatgtctagagttacaggtaaaaaaagaaatggtagttttaaaactgcccaggttccggcatcacagttcctcttcctgtcttggacgcagagggttgtaaaccccccatgcaccctgagggtgctcctcttcgaagccacagcccagcacagttcagtgctgccttagcctgccaggacagagggaggtgacagtctgttctcatagccaggaggataggacttctgggtgagaagtcctcttattaatttgctttccaaaggccaaagaagcccaggatgacctggtgaagaccaaggaggagctgcacctggtgatgacagcacccccgcccccaccaccccccgtgtacgagccggtgagctaccatgtccaggagagcttgcaggatgagggcgcagagcccacgggctacagcgcggagctgtctagtgagggcatccgggatgaccgcaatgaggagaagcgcatcactgaggcagagaagaacgagcgtgtgcagcggcagctgctgacgctgagcagcgagctgtcccaggcccgagatgagaataagaggacccacaatgacatcatccacaacgagaacatgaggcaaggccgggacaagtacaagacgctgcggcagatccggcagggcaacaccaagcagcgcatcgacgagttcgaggccctgtaacagccaggccaggaccaagggcagaggggtgctcatagcgggcgctgccagccccgccacgcttgtctttagtgctccaagtctaggaactccctcagatcccagttcctttagaaagcagttacccaacagaaacattctgggctgggaaccagggaggcgccctggtttgttttccccagttgtaatagtgccaagcaggcctgattctcgcgattattctcgaatcacctcctgtgttgtgctgggagcaggactgattgaattacggaaaatgcctgtaaagtctgagtaagaaacttcatgctggcctgtgtgatacaagagtcagcatcattaaaggaaacgtggcaggacttccatctgtgccatacttgttctgtattcgaaatgagctcaaattgattttttaatttctatgaaggatccatctttgtatatttacatgcttagaggggtgaaaattattttggaaattgagtctgaagcactctcgcacacacagtgattccctcctcccgtcactccacgcagctggcagagagcacagtgatcaccagcgtgagtggtggaggaggacacttggatttttttttagtttttttttttttggcttaacagttttagaatacattgtacttatacaccttattaatgatcagctatatactatttatatacaagtgataatacagatttgtaacattagttttaaaaagggaaagttttgttctgtatattttgttaccttttacagaataaaagaattacatatgaaaaaccctctaaaccatggcacttgatgtgatgtggcaggagggcagtggtggagctggacctgcctgctgcagtcacgtgtaaacaggattattattagtgttttatgcatgtaatggactatgcacacttttaattttgtcagattcacacatgccactatgagctttcagactccagctgtgaagagactctgtttgcttgtgttgtttgtttgcagtctctctctgccatggccttggcaggctgctggaaggcagcttgtggaggccgttggttccgcccactcattccttctcgtgcactgctttctccttcacagctaagatgccatgtgcaggtggattccatgccgcagacatgaaataaaagctttgcaaaggcacgaag

SEQ ID NO: 406611 - DNA, 1676 bp, Homo sapiens
  misc_feature (80)..(81): n is a, c, g, or t
  misc_feature (88)..(88): n is a, c, g, or t
gcctgagagtctggagaaatcccctgccaagttgcccctctgaaagaggcgcgaaggcgcaagaagtataatttaaaganngccagcncggggccaaagaagcccaggatgacctggtgaagaccaaggaggagctgcacctggtgatgacagcacccccgcccccaccaccccccgtgtacgagccggtgagctaccatgtccaggagagcttgcaggatgagggcgcagagcccacgggctacagcgcggagctgtctagtgagggcatccgggatgaccgcaatgaggagaagcgcatcactgaggcagagaagaacgagcgtgtgcagcggcagctgctgacgctgagcagcgagctgtcccaggcccgagatgagaataagaggacccacaatgacatcatccacaacgagaacatgaggcaaggccgggacaagtacaagacgctgcggcagatccggcagggcaacaccaagcagcgcatcgacgagttcgaggccctgtaacagccaggccaggaccaagggcagaggggtgctcatagcgggcgctgccagccccgccacgcttgtctttagtgctccaagtctaggaactccctcagatcccagttcctttagaaagcagttacccaacagaaacattctgggctgggaaccagggaggcgccctggtttgttttccccagttgtaatagtgccaagcaggcctgattctcgcgattattctcgaatcacctcctgtgttgtgctgggagcaggactgattgaattacggaaaatgcctgtaaagtctgagtaagaaacttcatgctggcctgtgtgatacaagagtcagcatcattaaaggaaacgtggcaggacttccatctgtgccatacttgttctgtattcgaaatgagctcaaattgattttttaatttctatgaaggatccatctttgtatatttacatgcttagaggggtgaaaattattttggaaattgagtctgaagcactctcgcacacacagtgattccctcctcccgtcactccacgcagctggcagagagcacagtgatcaccagcgtgagtggtggaggaggacacttggatttttttttagtttttttttttttggcttaacagttttagaatacattgtacttatacaccttattaatgatcagctatatactatttatatacaagtgataatacagatttgtaacattagttttaaaaagggaaagttttgttctgtatattttgttaccttttacagaataaaagaattacatatgaaaaaccctctaaaccatggcacttgatgtgatgtggcaggagggcagtggtggagctggacctgcctgctgcagtcacgtgtaaacaggattattattagtgttttatgcatgtaatggactatgcacacttttaattttgtcagattcacacatgccactatgagctttcagactccagctgtgaagagactctgtttgcttgtgttgtttgtttgcagtctctctctgccatggccttggcaggctgctggaaggcagcttgtggaggccgttggttccgcccactcattccttctcgtgcactgctttctccttcacagctaagatgccatgtgcaggtggattccatgccgcagacatgaaataaaagctttgcaaaggcacgaag

SEQ ID NO: 406612 - DNA, 1277 bp, Homo sapiens
ggcttttgggagcccgggcagcgagcgcactcggcggacgcaagggcggcggggagcacacggagcactgcaggcgccgggttgggacagcgtcttcgctgctgctggatagtcgtgttttcggggatcgaggatactcaccagaaaccgaaaatgccgaaaccaatcaatgtccgagttaccaccatggatgcagagctggagtttgcaatccagccaaatacaactggaaaacagctttttgatcaggtggtaaagactatcggcctccgggaagtgtggtactttggcctccactatgtggataataaaggatttcctacctggctgaagctggataagaaggtgtctgcccaggaggtcaggaaggagaatcccctccagttcaagttccgggccaagttctaccctgaagatgtggctgaggagctcatccaggacatcacccagaaacttttcttcctccaagtgaaggaaggaatccttagcgatgagatctactgcccccctgagactgccgtgctcttggggtcctacgctgtgcaggccaagtttggggactacaacaaagaagtgcacaagtctgggtacctcagctctgagcggctgatccctcaaagagtgatggaccagcacaaacttaccagggaccagtgggaggaccggatccaggtgtggcatgcggaacaccgtgggatgctcaaagataatgctatgttggaatacctgaagattgctcaggacctggaaatgtatggaatcaactatttcgagataaaaaacaagaaaggaacagacctttggcttggagttgatgcccttggactgaatatttatgagaaagatgataagttaaccccaaagattggctttccttggagtgaaatcaggaacatctctttcaatgacaaaaagtttgtcattaaacccatcgacaagaaggcacctgactttgtgttttatgccccacgtctgagaatcaacaagcggatcctgcagctctgcatgggcaaccatgagttgtatatgcgccgcaggaagcctgacaccatcgaggtgcagcacagctgtgaagagactctgtttgcttgtgttgtttgtttgcagtctctctctgccatggccttggcaggctgctggaaggcagcttgtggaggccgttggttccgcccactcattccttctcgtgcactgctttctccttcacagctaagatgccatgtgcaggtggattccatgccgcagacatgaaataaaagctttgcaaaggcacgaag

SEQ ID NO: 406613 - DNA, 914 bp, Homo sapiens
ggcttttgggagcccgggcagcgagcgcactcggcggacgcaagggcggcggggagcacacggagcactgcaggcgccgggttgggacagcgtcttcgctgctgctggatagtcgtgttttcggggatcgaggatactcaccagaaaccgaaaatgccgaaaccaatcaatgtccgagttaccaccatggatgcagagctggagtttgcaatccagccaaatacaactggaaaacagctttttgatcaggtggtaaagactatcggcctccgggaagtgtggtactttggcctccactatgtggataataaaggatttcctacctggctgaagctggataagaaggtgtctgcccaggaggtcaggaaggagaatcccctccagttcaagttccgggccaagttctaccctgaagatgtggctgaggagctcatccaggacatcacccagaaacttttcttcctccaagtgaaggaaggaatccttagcgatgagatctactgcccccctgagactgccgtgctcttggggtcctacgctgtgcaggccaagtttggggactacaacaaagaagtgcacaagtctgggtacctcagctctgagcggctgatccctcaaagagtgatggaccagcacaaacttaccagggaccagtgggaggaccggatccaggtgtggcatgcggaacaccgtgggatgctcaaagataatgctatgttggaatacctgaagattgctcaggacctggaaatgtatggaatcaactatttcgagataaaaaacaagaaaggaacagacctttggcttggagttgatgcccttggactgaatatttatgagaaagatgataagcttaaccccaacttttcttccgacccctaaaaaccccctctaatataaatactgattctacc

SEQ ID NO: 406614 - DNA, 871 bp, Homo sapiens
ggcttttgggagcccgggcagcgagcgcactcggcggacgcaagggcggcggggagcacacggagcactgcaggcgccgggttgggacagcgtcttcgctgctgctggatagtcgtgttttcggggatcgaggatactcaccagaaaccgaaaatgccgaaaccaatcaatgtccgagttaccaccatggatgcagagctggagtttgcaatccagccaaatacaactggaaaacagctttttgatcaggtggtaaagactatcggcctccgggaagtgtggtactttggcctccactatgtggataataaaggatttcctacctggctgaagctggataagaaggtgtctgcccaggaggtcaggaaggagaatcccctccagttcaagttccgggccaagttctaccctgaagatgtggctgaggagctcatccaggacatcacccagaaacttttcttcctccaagtgaaggaaggaatccttagcgatgagatctactgcccccctgagactgccgtgctcttggggtcctacgctgtgcaggccaagtttggggactacaacaaagaagtgcacaagtctgggtacctcagctctgagcggctgatccctcaaagagtgatggaccagcacaaacttaccagggaccagtgggaggaccggatccaggtgtggcatgcggaacaccgtgggatgctcaaagataatgctatgttggaatacctgaagattgctcaggacctggaaatgtatggaatcaactatttcgagataaaaaacaagaaaggagtggtaaacgtcataacaatgaaaaacaaaacagaagactggtccccagggcgttgggaagaggcttggtagcatacgc

SEQ ID NO: 406615 - DNA, 750 bp, Homo sapiens
ggacgtgaaatctttacttagagaaaagcgacagagtcagagacccacgggggcgggcgccgagtgtcgggcgcggcaggaggacgaggcagggcgggcgggcgctctaagggttctgctctgactccaggttgggacagcgtcttcgctgctgctggatagtcgtgttttcggggatcgaggatactcaccagaaaccgaaaatgccgaaaccaatcaatgtccgagttaccaccatggatgcagagctggagtttgcaatccagccaaatacaactggaaaacagctttttgatcaggtggtaaagactatcggcctccgggaagtgtggtactttggcctccactatgtggataataaaggatttcctacctggctgaagctggataagaaggtgtctgcccaggaggtcaggaaggagaatcccctccagttcaagttccgggccaagttctaccctgaagatgtggctgaggagctcatccaggacatcacccagaaacttttcttcctccaagtgaaggaaggaatccttagcgatgagatctactgcccccctgagactgccgtgctcttggggtcctacgctgtgcaggccaagtttggggactacaacaaagaagtgcacaagtctgggtacctcagctctgagcggctgatccctcaaggtttgttccaaggtaaccggacccttggatttctacaggccaagtacactaggactaccagcaatctccggatcgacatat

SEQ ID NO: 406616 - DNA, 648 bp, Homo sapiens
ggcttttgggagcccgggcagcgagcgcactcggcggacgcaagggcggcggggagcacacggagcactgcaggcgccgggttgggacagcgtcttcgctgctgctggatagtcgtgttttcggggatcgaggatactcaccagaaaccgaaaatgccgaaaccaatcaatgtccgagttaccaccatggatgcagagctggagtttgcaatccagccaaatacaactggaaaacagctttttgatcaggtggtaaagactatcggcctccgggaagtgtggtactttggcctccactatgtggataataaaggatttcctacctggctgaagctggataagaaggtgtctgcccaggaggtcaggaaggagaatcccctccagttcaagttccgggccaagttctaccctgaagatgtggctgaggagctcatccaggacatcacccagaaacttttcttcctccaagtgaaggaaggaatccttagcgatgagatctactgcccccctgagactgccgtgctcttggggtcctacgctgtgcaggccaagtgtgcacacgccgagtaccctgacactcgctgacctgctgcagcctccccgggcacctcaggcatagaaaatgagctcagggatctgcccaacctg

SEQ ID NO: 406617 - DNA, 1349 bp, Homo sapiens
caaaaaggttgcaggtttccagtaaatggagatatcgattggaaatcagatctggcatttctccatagtgctcactcattggagcatatgatggttaattgcatagcttttagttgaccttagttttttcaatgagattgttaatcttataaactgtgaatcatccaccatcttgtaagaacctgttattgctttgtttgaacctgtgacagattatcttccaactttaaagagtggataattccattaaccaaccaaaaagaaaagtagtaagataaacattttcttcaaactctgaaaattatcctttttttttttgaaacccccactgtcctcccaagtcacagcaacaagttaaaaagatgatgggaggtggggaagagtggaggagcaggaggaattcttaacagtaagtttcggggtccagggcccgattggcatgtggccccattccaggtcactggggtcatttccaaatttgagttctccaggattgatagcatcatcccatgaggactggggcttagtgaggcagtagctttgatttccagctgagcacaagagtgtgatagtacttgtttgttttttgttgttgttgttttgagatggagtcttgctctgtcgcccaggctggggtgcagtggcacgatcttggctcaccacttttgactaacctttttttgtctggagtgctaaaaagatgactttaagaataaatatctcctgaaaactggcttgagggccccattgagtcttggttagaagcctgtgttggggacagtgggccttcgtcttccggatttgtgtggagagtgtggcttgtttcgtgcaggtgtctgcccaggaggtcaggaaggagaatcccctccagttcaagttccgggccaagttctaccctgaagatgtggctgaggagctcatccaggacatcacccagaaacttttcttcctccaagtgaaggaaggaatccttagcgatgagatctactgcccccctgagactgccgtgctcttggggtcctacgctgtgcaggccaagtttggggactacaacaaagaagtgcacaagtctgggtacctcagctctgagcggctgatccctcaaagagtgatggaccagcacaaacttaccagggaccagtgggaggaccggatccaggtgtggcatgcggaacaccgtgggatgctcaagtgagtgctgtgccctgctgttgggatcttgccatctccgtgcgctccagcatgtcttttcctgtgactctagttagtgctttaaagggctctgtgtcaggccttgtgaagaccttgagggaaccgagttaaaagtggggttttcttagggaagaggt

SEQ ID NO: 406618 - DNA, 587 bp, Homo sapiens
  misc_feature (484)..(484): n is a, c, g, or t
  misc_feature (511)..(511): n is a, c, g, or t
agttcagtatcttataaacaaaaataagcgtcacccctctgacaaagtatgaaccagtcttctaaataaaattaatggcttctttaagaaaagcctcagccaccttgcagagatgacttgggaaatcttaaggaagaatgtgtctccttctggagacaccagacaaacaactctgaggcgatgattggctttccttggagtgaaatcaggaacatctctttcaatgacaaaaagtttgtcattaaacccatcgacaagaaggcacctgactttgtgtgactttgtgttttatgccccacgtctgagaatcaacaagcggatcctgcagctctgcatgggcaaccatgagttgtatatgcgccgcaggaagcctgacaccatcgaggtgcagcagatgaaggcccaggcccgggaggagaagcatcagaagcagctggagcggcaacagctggaaacagagaagaaaaggagagaaaccgagganccaggagacctgagcaagccagggganctgagcaagccaggggacctgagcaagccaggagacctgagctagccaggagacctgtgcatgccaggagacctgt

SEQ ID NO: 406619 - DNA, 298 bp, Homo sapiens
cagagcccacgggctacagcgcggagctgtctagtgagggcatccgggatgaccgcaatgaggagaagcgcatcactgaggcagagaagaacgagcgtgtgcagcggcagctgctgggtgaggcccaaggggctctgtctccagggagcctgcctcgcttttggagcagacaggcttggggagggcagtgatgtgagccagccccacccagcacccctcttgcccttcctgttttcctaggggacgggccgggccatatggggaggaagggactagaccaacgctgcttaatgttaca

SEQ ID NO: 406620 - DNA, 540 bp, Homo sapiens
cagccaaaagctgttgcccttttgagtgagtttctcatgagtgttgagcctctctctctctcacgcaggtggtaaagactatcggcctccgggaagtgtggtactttggcctccactatgtggataataaaggatttcctacctggctgaagctggataagaaggcaagtcaggattaactatttacaggctgtggattgggtgttggtctgcttcatcgataaggaaactggagcaactcaccctgtcttttgttttctgttcctttttgtttgtgtaaaagtttttacagacaaaaaggttgcaggtttccagtaaatggagatatcgattggaaatcagatctggcatttctccatagtgctcactcattggagcatatgatggttaattgcatagcttttagttgaccttagttttttcaatgagattgttaatcttataaactgtgaatcatccaccatcttgtaagaacctgttattgctttgtttgaacctgtgacagattatcttccaactttaaagagtggataattccat

SEQ ID NO: 406621 - DNA, 3081 bp, Homo sapiens
ggcttttgggagcccgggcagcgagcgcactcggcggacgcaagggcggcggggagcacacggagcactgcaggcgccgggttgggacagcgtcttcgctgctgctggatagtcgtgttttcggggatcgaggatactcaccagaaaccgaaaatgccgaaaccaatcaatgtccgagttaccaccatggatgcagagctggagtttgcaatccagccaaatacaactggaaaacagctttttgatcaggtggtaaagactatcggcctccgggaagtgtggtactttggcctccactatgtggataataaaggatttcctacctggctgaagctggataagaaggtgtctgcccaggaggtcaggaaggagaatcccctccagttcaagttccgggccaagttctaccctgaagatgtggctgaggagctcatccaggacatcacccagaaacttttcttcctccaagtgaaggaaggaatccttagcgatgagatctactgcccccctgagactgccgtgctcttggggtcctacgctgtgcaggccaagtttggggactacaacaaagaagtgcacaagtctgggtacctcagctctgagcggctgatccctcaaagagtgatggaccagcacaaacttaccagggaccagtgggaggaccggatccaggtgtggcatgcggaacaccgtgggatgctcaaagataatgctatgttggaatacctgaagattgctcaggacctggaaatgtatggaatcaactatttcgagataaaaaacaagaaaggaacagacctttggcttggagttgatgcccttggactgaatatttatgagaaagatgataagttaaccccaaagattggctttccttggagtgaaatcaggaacatctctttcaatgacaaaaagtttgtcattaaacccatcgacaagaaggcacctgactttgtgttttatgccccacgtctgagaatcaacaagcggatcctgcagctctgcatgggcaaccatgagttgtatatgcgccgcaggaagcctgacaccatcgaggtgcagcagatgaaggcccaggcccgggaggagaagcatcagaagcagctggagcggcaacagctggaaacagagaagaaaaggagagaaaccgtggagagagagaaagagcagatgatgcgcgagaaggaggagttgatgctgcggctgcaggactatgaggagaagacaaagaaggcagagagagagctctcggagcagattcagagggccctgcagctggaggaggagaggaagcgggcacaggaggaggccgagcgcctagaggctgaccgtatggctgcactgcgggctaaggaggagctggagagacaggcggtggatcagataaagagccaggagcagctggctgcggagcttgcagaatacactgccaagattgccctcctggaagaggcgcggaggcgcaaggaggatgaagttgaagagtggcagcacagggccaaagaagcccaggatgacctggtgaagaccaaggaggagctgcacctggtgatgacagcacccccgcccccaccaccccccgtgtacgagccggtgagctaccatgtccaggagagcttgcaggatgagggcgcagagcccacgggctacagcgcggagctgtctagtgagggcatccgggatgaccgcaatgaggagaagcgcatcactgaggcagagaagaacgagcgtgtgcagcggcagctgctgacgctgagcagcgagctgtcccaggcccgagatgagaataagaggacccacaatgacatcatccacaacgagaacatgaggcaaggccgggacaagtacaagacgctgcggcagatccggcagggcaacaccaagcagcgcatcgacgagttcgaggccctgtaacagccaggccaggaccaagggcagaggggtgctcatagcgggcgctgccagccccgccacgcttgtctttagtgctccaagtctaggaactccctcagatcccagttcctttagaaagcagttacccaacagaaacattctgggctgggaaccagggaggcgccctggtttgttttccccagttgtaatagtgccaagcaggcctgattctcgcgattattctcgaatcacctcctgtgttgtgctgggagcaggactgattgaattacggaaaatgcctgtaaagtctgagtaagaaacttcatgctggcctgtgtgatacaagagtcagcatcattaaaggaaacgtggcaggacttccatctgtgccatacttgttctgtattcgaaatgagctcaaattgattttttaatttctatgaaggatccatctttgtatatttacatgcttagaggggtgaaaattattttggaaattgagtctgaagcactctcgcacacacagtgattccctcctcccgtcactccacgcagctggcagagagcacagtgatcaccagcgtgagtggtggaggaggacacttggatttttttttagtttttttttttttggcttaacagttttagaatacattgtacttatacaccttattaatgatcagctatatactatttatatacaagtgataatacagatttgtaacattagttttaaaaagggaaagttttgttctgtatattttgttaccttttacagaataaaagaattacatatgaaaaaccctctaaaccatggcacttgatgtgatgtggcaggagggcagtggtggagctggacctgcctgctgcagtcacgtgtaaacaggattattattagtgttttatgcatgtaatggactatgcacacttttaattttgtcagattcacacatgccactatgagctttcagactccagctgtgaagagactctgtttgcttgtgttgtttgtttgcagtctctctctgccatggccttggcaggctgctggaaggcagcttgtggaggccgttggttccgcccactcattccttctcgtgcactgctttctccttcacagctaagatgccatgtgcaggtggattccatgccgcagacatgaaataaaagctttgcaaaggcacgaag

SEQ ID NO: 406622 - DNA, 3131 bp, Homo sapiens
ggacgtgaaatctttacttagagaaaagcgacagagtcagagacccacgggggcgggcgccgagtgtcgggcgcggcaggaggacgaggcagggcgggcgggcgctctaagggttctgctctgactccaggttgggacagcgtcttcgctgctgctggatagtcgtgttttcggggatcgaggatactcaccagaaaccgaaaatgccgaaaccaatcaatgtccgagttaccaccatggatgcagagctggagtttgcaatccagccaaatacaactggaaaacagctttttgatcaggtggtaaagactatcggcctccgggaagtgtggtactttggcctccactatgtggataataaaggatttcctacctggctgaagctggataagaaggtgtctgcccaggaggtcaggaaggagaatcccctccagttcaagttccgggccaagttctaccctgaagatgtggctgaggagctcatccaggacatcacccagaaacttttcttcctccaagtgaaggaaggaatccttagcgatgagatctactgcccccctgagactgccgtgctcttggggtcctacgctgtgcaggccaagtttggggactacaacaaagaagtgcacaagtctgggtacctcagctctgagcggctgatccctcaaagagtgatggaccagcacaaacttaccagggaccagtgggaggaccggatccaggtgtggcatgcggaacaccgtgggatgctcaaagataatgctatgttggaatacctgaagattgctcaggacctggaaatgtatggaatcaactatttcgagataaaaaacaagaaaggaacagacctttggcttggagttgatgcccttggactgaatatttatgagaaagatgataagttaaccccaaagattggctttccttggagtgaaatcaggaacatctctttcaatgacaaaaagtttgtcattaaacccatcgacaagaaggcacctgactttgtgttttatgccccacgtctgagaatcaacaagcggatcctgcagctctgcatgggcaaccatgagttgtatatgcgccgcaggaagcctgacaccatcgaggtgcagcagatgaaggcccaggcccgggaggagaagcatcagaagcagctggagcggcaacagctggaaacagagaagaaaaggagagaaaccgtggagagagagaaagagcagatgatgcgcgagaaggaggagttgatgctgcggctgcaggactatgaggagaagacaaagaaggcagagagagagctctcggagcagattcagagggccctgcagctggaggaggagaggaagcgggcacaggaggaggccgagcgcctagaggctgaccgtatggctgcactgcgggctaaggaggagctggagagacaggcggtggatcagataaagagccaggagcagctggctgcggagcttgcagaatacactgccaagattgccctcctggaagaggcgcggaggcgcaaggaggatgaagttgaagagtggcagcacagggccaaagaagcccaggatgacctggtgaagaccaaggaggagctgcacctggtgatgacagcacccccgcccccaccaccccccgtgtacgagccggtgagctaccatgtccaggagagcttgcaggatgagggcgcagagcccacgggctacagcgcggagctgtctagtgagggcatccgggatgaccgcaatgaggagaagcgcatcactgaggcagagaagaacgagcgtgtgcagcggcagctgctgacgctgagcagcgagctgtcccaggcccgagatgagaataagaggacccacaatgacatcatccacaacgagaacatgaggcaaggccgggacaagtacaagacgctgcggcagatccggcagggcaacaccaagcagcgcatcgacgagttcgaggccctgtaacagccaggccaggaccaagggcagaggggtgctcatagcgggcgctgccagccccgccacgcttgtctttagtgctccaagtctaggaactccctcagatcccagttcctttagaaagcagttacccaacagaaacattctgggctgggaaccagggaggcgccctggtttgttttccccagttgtaatagtgccaagcaggcctgattctcgcgattattctcgaatcacctcctgtgttgtgctgggagcaggactgattgaattacggaaaatgcctgtaaagtctgagtaagaaacttcatgctggcctgtgtgatacaagagtcagcatcattaaaggaaacgtggcaggacttccatctgtgccatacttgttctgtattcgaaatgagctcaaattgattttttaatttctatgaaggatccatctttgtatatttacatgcttagaggggtgaaaattattttggaaattgagtctgaagcactctcgcacacacagtgattccctcctcccgtcactccacgcagctggcagagagcacagtgatcaccagcgtgagtggtggaggaggacacttggatttttttttagtttttttttttttggcttaacagttttagaatacattgtacttatacaccttattaatgatcagctatatactatttatatacaagtgataatacagatttgtaacattagttttaaaaagggaaagttttgttctgtatattttgttaccttttacagaataaaagaattacatatgaaaaaccctctaaaccatggcacttgatgtgatgtggcaggagggcagtggtggagctggacctgcctgctgcagtcacgtgtaaacaggattattattagtgttttatgcatgtaatggactatgcacacttttaattttgtcagattcacacatgccactatgagctttcagactccagctgtgaagagactctgtttgcttgtgttgtttgtttgcagtctctctctgccatggccttggcaggctgctggaaggcagcttgtggaggccgttggttccgcccactcattccttctcgtgcactgctttctccttcacagctaagatgccatgtgcaggtggattccatgccgcagacatgaaataaaagctttgcaaaggcacgaag

SEQ ID NO: 406623 - DNA, 4081 bp, Homo sapiens
  misc_feature (3117)..(3117): n is a, c, g, or t
  misc_feature (3121)..(3121): n is a, c, g, or t
  misc_feature (3130)..(3130): n is a, c, g, or t
ggcttttgggagcccgggcagcgagcgcactcggcggacgcaagggcggcggggagcacacggagcactgcaggcgccgggttgggacagcgtcttcgctgctgctggatagtcgtgttttcggggatcgaggatactcaccagaaaccgaaaatgccgaaaccaatcaatgtccgagttaccaccatggatgcagagctggagtttgcaatccagccaaatacaactggaaaacagctttttgatcaggtggtaaagactatcggcctccgggaagtgtggtactttggcctccactatgtggataataaaggatttcctacctggctgaagctggataagaaggtgtctgcccaggaggtcaggaaggagaatcccctccagttcaagttccgggccaagttctaccctgaagatgtggctgaggagctcatccaggacatcacccagaaacttttcttcctccaagtgaaggaaggaatccttagcgatgagatctactgcccccctgagactgccgtgctcttggggtcctacgctgtgcaggccaagtttggggactacaacaaagaagtgcacaagtctgggtacctcagctctgagcggctgatccctcaaagagtgatggaccagcacaaacttaccagggaccagtgggaggaccggatccaggtgtggcatgcggaacaccgtgggatgctcaaagataatgctatgttggaatacctgaagattgctcaggacctggaaatgtatggaatcaactatttcgagataaaaaacaagaaaggaacagacctttggcttggagttgatgcccttggactgaatatttatgagaaagatgataagttaaccccaaagattggctttccttggagtgaaatcaggaacatctctttcaatgacaaaaagtttgtcattaaacccatcgacaagaaggcacctgactttgtgttttatgccccacgtctgagaatcaacaagcggatcctgcagctctgcatgggcaaccatgagttgtatatgcgccgcaggaagcctgacaccatcgaggtgcagcagatgaaggcccaggcccgggaggagaagcatcagaagcagctggagcggcaacagctggaaacagagaagaaaaggagagaaaccgtggagagagagaaagagcagatgatgcgcgagaaggaggagttgatgctgcggctgcaggactatgaggagaagacaaagaaggcagagagagagctctcggagcagattcagagggccctgcagctggaggaggagaggaagcgggcacaggaggaggccgagcgcctagaggctgaccgtatggctgcactgcgggctaaggaggagctggagagacaggcggtggatcagataaagagccaggagcagctggctgcggagcttgcagaatacactgccaagattgccctcctggaagaggcgcggaggcgcaaggaggatgaagttgaagagtggcagcacagggccaaagaagcccaggatgacctggtgaagaccaaggaggagctgcacctggtgatgacagcacccccgcccccaccaccccccgtgtacgagccggtgagctaccatgtccaggagagcttgcaggatgagggcgcagagcccacgggctacagcgcggagctgtctagtgagggcatccgggatgaccgcaatgaggagaagcgcatcactgaggcagagaagaacgagcgtgtgcagcggcagctgctgacgctgagcagcgagctgtcccaggcccgagatgagaataagaggacccacaatgacatcatccacaacgagaacatgaggcaaggccgggacaagtacaagacgctgcggcagatccggcagggcaacaccaagcagcgcatcgacgagttcgaggccctgtaacagccaggccaggaccaagggcagaggggtgctcatagcgggcgctgccagccccgccacgcttgtctttagtgctccaagtctaggaactccctcagatcccagttcctttagaaagcagttacccaacagaaacattctgggctgggaaccagggaggcgccctggtttgttttccccagttgtaatagtgccaagcaggcctgattctcgcgattattctcgaatcacctcctgtgttgtgctgggagcaggactgattgaattacggaaaatgcctgtaaagtctgagtaagaaacttcatgctggcctgtgtgatacaagagtcagcatcattaaaggaaacgtggcaggacttccatctgtgccatacttgttctgtattcgaaatgagctcaaattgattttttaatttctatgaaggatccatctttgtatatttacatgcttagaggggtgaaaattattttggaaattgagtctgaagcactctcgcacacacagtgattccctcctcccgtcactccacgcagctggcagagagcacagtgatcaccagcgtgagtggtggaggaggacacttggatttttttttagtttttttttttttggcttaacagttttagaatacattgtacttatacaccttattaatgatcagctatatactatttatatacaagtgataatacagatttgtaacattagttttaaaaagggaaagttttgttctgtatattttgttaccttttacagaataaaagaattacatatgaaaaaccctctaaaccatggcacttgatgtgatgtggcaggagggcagtggtggagctggacctgcctgctgcagtcacgtgtaaacaggattattattagtgttttatgcatgtaatggactatgcacacttttaattttgtcagattcacacatgccactatgagctttcagactccagctgtgaagagactctgtttgcttgtgttgtttgtttgcagtctctctctgccatggccttggcaggctgctggaaggcagcttgtggaggccgttggttccgcccactcattccttctcgtgcactgctttctccttcacagctaagatgccatgtgcaggtggattccatgccgcagacatgaaataaaagctttgcaaaggcacgaagaaaaaaaaaaaaaaaaaaaaaaaaaaaaaaaaaaanaaanaaaaaaaanaaaaaaaaaaaaaaaaaaaaaaaaaaaaaaaaaaaaaaaaaaaaaaaaaaagttggccacggacacaacagagacaaaaaaacaaaaagaaaaagcaatcgagagggcgacggccaccaacaagagaactaagagagacagagcaaggggacgacgaaaggagaaaacgggagccaaacacagaggcggcgcacccacccaaagacaaaaaaacgacgggcgggcagacaaacaaggaggtagaggagacacaaaaaaacaaaaaaagaagcagagcaggagaacgacagtcagaggaggtacaataaacaaacagagggaggcgcacacagagagcacgcgagtcacatcatacttcttctaacccacacgccaggcgcgggacgaaaaaacaaacagaaagaaatataaaagacaacacgacaaaagggaggaagaagagaaagaaagagaaaacgagcaacacaagaaacaacaaacaaaaaaaaaagagacaaaaacaaagaagaaaagacacacaaacaacaacgaagagaaaaaacccagcaaaccacaaaacaaaaagaaaacaacaaagaacaaagagacaacaaaacaaaaaggaagaaaaagacaacgaggaaccaaacaaagcagacacagagagaaaaagaaacaagaaacatcagaacaaaaaaaaaaaaaaaaacagacaaaaaaaaaagcaaaaaagaaaaccacaaacaaaaaaacaaaccaagcgagggacgggagagagagaagcaggcacaacagcgcaagaggaagaacggacgaaagacagaaggaacgagagaaaagagacaaagaaagagcagaagagaaagaaaagacaacaagagacaagaaaaggaaagaaaaaaaaaagacacacacaaaaagaaagaagaagaaaaggaaaagaaagaagaccgggaggaggagacgcgacac

SEQ ID NO: 406624 - DNA, 3584 bp, Homo sapiens
  misc_feature (3117)..(3117): n is a, c, g, or t
  misc_feature (3121)..(3121): n is a, c, g, or t
  misc_feature (3130)..(3130): n is a, c, g, or t
  misc_feature (3584)..(3584): n is a, c, g, or t
ggcttttgggagcccgggcagcgagcgcactcggcggacgcaagggcggcggggagcacacggagcactgcaggcgccgggttgggacagcgtcttcgctgctgctggatagtcgtgttttcggggatcgaggatactcaccagaaaccgaaaatgccgaaaccaatcaatgtccgagttaccaccatggatgcagagctggagtttgcaatccagccaaatacaactggaaaacagctttttgatcaggtggtaaagactatcggcctccgggaagtgtggtactttggcctccactatgtggataataaaggatttcctacctggctgaagctggataagaaggtgtctgcccaggaggtcaggaaggagaatcccctccagttcaagttccgggccaagttctaccctgaagatgtggctgaggagctcatccaggacatcacccagaaacttttcttcctccaagtgaaggaaggaatccttagcgatgagatctactgcccccctgagactgccgtgctcttggggtcctacgctgtgcaggccaagtttggggactacaacaaagaagtgcacaagtctgggtacctcagctctgagcggctgatccctcaaagagtgatggaccagcacaaacttaccagggaccagtgggaggaccggatccaggtgtggcatgcggaacaccgtgggatgctcaaagataatgctatgttggaatacctgaagattgctcaggacctggaaatgtatggaatcaactatttcgagataaaaaacaagaaaggaacagacctttggcttggagttgatgcccttggactgaatatttatgagaaagatgataagttaaccccaaagattggctttccttggagtgaaatcaggaacatctctttcaatgacaaaaagtttgtcattaaacccatcgacaagaaggcacctgactttgtgttttatgccccacgtctgagaatcaacaagcggatcctgcagctctgcatgggcaaccatgagttgtatatgcgccgcaggaagcctgacaccatcgaggtgcagcagatgaaggcccaggcccgggaggagaagcatcagaagcagctggagcggcaacagctggaaacagagaagaaaaggagagaaaccgtggagagagagaaagagcagatgatgcgcgagaaggaggagttgatgctgcggctgcaggactatgaggagaagacaaagaaggcagagagagagctctcggagcagattcagagggccctgcagctggaggaggagaggaagcgggcacaggaggaggccgagcgcctagaggctgaccgtatggctgcactgcgggctaaggaggagctggagagacaggcggtggatcagataaagagccaggagcagctggctgcggagcttgcagaatacactgccaagattgccctcctggaagaggcgcggaggcgcaaggaggatgaagttgaagagtggcagcacagggccaaagaagcccaggatgacctggtgaagaccaaggaggagctgcacctggtgatgacagcacccccgcccccaccaccccccgtgtacgagccggtgagctaccatgtccaggagagcttgcaggatgagggcgcagagcccacgggctacagcgcggagctgtctagtgagggcatccgggatgaccgcaatgaggagaagcgcatcactgaggcagagaagaacgagcgtgtgcagcggcagctgctgacgctgagcagcgagctgtcccaggcccgagatgagaataagaggacccacaatgacatcatccacaacgagaacatgaggcaaggccgggacaagtacaagacgctgcggcagatccggcagggcaacaccaagcagcgcatcgacgagttcgaggccctgtaacagccaggccaggaccaagggcagaggggtgctcatagcgggcgctgccagccccgccacgcttgtctttagtgctccaagtctaggaactccctcagatcccagttcctttagaaagcagttacccaacagaaacattctgggctgggaaccagggaggcgccctggtttgttttccccagttgtaatagtgccaagcaggcctgattctcgcgattattctcgaatcacctcctgtgttgtgctgggagcaggactgattgaattacggaaaatgcctgtaaagtctgagtaagaaacttcatgctggcctgtgtgatacaagagtcagcatcattaaaggaaacgtggcaggacttccatctgtgccatacttgttctgtattcgaaatgagctcaaattgattttttaatttctatgaaggatccatctttgtatatttacatgcttagaggggtgaaaattattttggaaattgagtctgaagcactctcgcacacacagtgattccctcctcccgtcactccacgcagctggcagagagcacagtgatcaccagcgtgagtggtggaggaggacacttggatttttttttagtttttttttttttggcttaacagttttagaatacattgtacttatacaccttattaatgatcagctatatactatttatatacaagtgataatacagatttgtaacattagttttaaaaagggaaagttttgttctgtatattttgttaccttttacagaataaaagaattacatatgaaaaaccctctaaaccatggcacttgatgtgatgtggcaggagggcagtggtggagctggacctgcctgctgcagtcacgtgtaaacaggattattattagtgttttatgcatgtaatggactatgcacacttttaattttgtcagattcacacatgccactatgagctttcagactccagctgtgaagagactctgtttgcttgtgttgtttgtttgcagtctctctctgccatggccttggcaggctgctggaaggcagcttgtggaggccgttggttccgcccactcattccttctcgtgcactgctttctccttcacagctaagatgccatgtgcaggtggattccatgccgcagacatgaaataaaagctttgcaaaggcacgaagaaaaaaaaaaaaaaaaaaaaaaaaaaaaaaaaaaanaaanaaaaaaaanaaaaaaacagggggcggcgcgcggcgataaaaaatactactccccggagagggggcgccgaaatttgacgagcatcccccaagttttcttggtgaacacagggggccgccctactagagggaggcgggcggataataaaagaggcaaagagaacggcggccgcgggctttataaaccaaaggtgtggagcgcgtggggaaaaaacgtgtgctgcatcggggagattttggggaaaagaggaccacttaatttcggggggggcgggagacatattttgtggggaacaacttcctacaaaggaaaattttagcaggcagagggggacaataatcaacactttgatggtgtattaatggttgtaaccccaacgcaatatatgttgggcgaagaaaaatttggcaaccggggtaatattataaggaaattttaatgcgagtgtatatattaaaaaggn

SEQ ID NO: 406625 - DNA, 2925 bp, Homo sapiens
ggcttttgggagcccgggcagcgagcgcactcggcggacgcaagggcggcggggagcacacggagcactgcaggcgccgggttgggacagcgtcttcgctgctgctggatagtcgtgttttcggggatcgaggatactcaccagaaaccgaaaatgccgaaaccaatcaatgtccgagttaccaccatggatgcagagctggagtttgcaatccagccaaatacaactggaaaacagctttttgatcaggtggtaaagactatcggcctccgggaagtgtggtactttggcctccactatgtggataataaaggatttcctacctggctgaagctggataagaaggtgtctgcccaggaggtcaggaaggagaatcccctccagttcaagttccgggccaagttctaccctgaagatgtggctgaggagctcatccaggacatcacccagaaacttttcttcctccaagtgaaggaaggaatccttagcgatgagatctactgcccccctgagactgccgtgctcttggggtcctacgctgtgcaggccaagtttggggactacaacaaagaagtgcacaagtctgggtacctcagctctgagcggctgatccctcaaagagtgatggaccagcacaaacttaccagggaccagtgggaggaccggatccaggtgtggcatgcggaacaccgtgggatgctcaaagataatgctatgttggaatacctgaagattgctcaggacctggaaatgtatggaatcaactatttcgagataaaaaacaagaaaggaacagacctttggcttggagttgatgcccttggactgaatatttatgagaaagatgataagttaaccccaaagattggctttccttggagtgaaatcaggaacatctctttcaatgacaaaaagtttgtcattaaacccatcgacaagaaggcacctgactttgtgttttatgccccacgtctgagaatcaacaagcggatcctgcagctctgcatgggcaaccatgagttgtatatgcgccgcaggaagcctgacaccatcgaggtgcagcagatgaaggcccaggcccgggaggagaagcatcagaagcagctggagcggcaacagctggaaacagagaagaaaaggagagaaaccgtggagagagagaaagagcagatgatgcgcgagaaggaggagttgatgctgcggctgcaggactatgaggagaagacaaagaaggcagagagagagctctcggagcagattcagagggccctgcagctggaggaggagaggaagcgggcacaggaggaggccgagcgcctagaggctgaccgtatggctgcactgcgggctaaggaggagctggagagacaggcggtggatcagataaagagccaggagcagctggctgcggagcttgcagaatacactgccaagattgccctcctggaagaggcgcggaggcgcaaggaggatgaagttgaagagtggcagcacagggccaaagaagcccaggatgacctggtgaagaccaaggaggagctgcacctggtgatgacagcacccccgcccccaccaccccccgtgtacgagccgacgctgagcagcgagctgtcccaggcccgagatgagaataagaggacccacaatgacatcatccacaacgagaacatgaggcaaggccgggacaagtacaagacgctgcggcagatccggcagggcaacaccaagcagcgcatcgacgagttcgaggccctgtaacagccaggccaggaccaagggcagaggggtgctcatagcgggcgctgccagccccgccacgcttgtctttagtgctccaagtctaggaactccctcagatcccagttcctttagaaagcagttacccaacagaaacattctgggctgggaaccagggaggcgccctggtttgttttccccagttgtaatagtgccaagcaggcctgattctcgcgattattctcgaatcacctcctgtgttgtgctgggagcaggactgattgaattacggaaaatgcctgtaaagtctgagtaagaaacttcatgctggcctgtgtgatacaagagtcagcatcattaaaggaaacgtggcaggacttccatctgtgccatacttgttctgtattcgaaatgagctcaaattgattttttaatttctatgaaggatccatctttgtatatttacatgcttagaggggtgaaaattattttggaaattgagtctgaagcactctcgcacacacagtgattccctcctcccgtcactccacgcagctggcagagagcacagtgatcaccagcgtgagtggtggaggaggacacttggatttttttttagtttttttttttttggcttaacagttttagaatacattgtacttatacaccttattaatgatcagctatatactatttatatacaagtgataatacagatttgtaacattagttttaaaaagggaaagttttgttctgtatattttgttaccttttacagaataaaagaattacatatgaaaaaccctctaaaccatggcacttgatgtgatgtggcaggagggcagtggtggagctggacctgcctgctgcagtcacgtgtaaacaggattattattagtgttttatgcatgtaatggactatgcacacttttaattttgtcagattcacacatgccactatgagctttcagactccagctgtgaagagactctgtttgcttgtgttgtttgtttgcagtctctctctgccatggccttggcaggctgctggaaggcagcttgtggaggccgttggttccgcccactcattccttctcgtgcactgctttctccttcacagctaagatgccatgtgcaggtggattccatgccgcagacatgaaataaaagctttgcaaaggcacgaag

SEQ ID NO: 406626 - DNA, 3093 bp, Homo sapiens
  misc_feature (253)..(253): n is a, c, g, or t
gagattgcgtggagcatacgctttggggcgcgtgcccggcgtccggtgatggtgaacagtggtcttcgctgttgtccttaagtagactccgtgttccgtgagatatcgtagcgtatgtgctcactcagaacaatcgaaaatgccgcggagcgaatcacagtgtcgctacgtgtaccacactctggatgcgagatctggaggtcagttactcgcgtgtctatctacaaggtggtacacaacgacggcatgctcngatctacggtggtaaagactatcggcctccgggaagtgtggtactttggcctccactatgtggataataaaggatttcctacctggctgaagctggataagaaggtgtctgcccaggaggtcaggaaggagaatcccctccagttcaagttccgggccaagttctaccctgaagatgtggctgaggagctcatccaggacatcacccagaaacttttcttcctccaagtgaaggaaggaatccttagcgatgagatctactgcccccctgagactgccgtgctcttggggtcctacgctgtgcaggccaagtttggggactacaacaaagaagtgcacaagtctgggtacctcagctctgagcggctgatccctcaaagagtgatggaccagcacaaacttaccagggaccagtgggaggaccggatccaggtgtggcatgcggaacaccgtgggatgctcaaagataatgctatgttggaatacctgaagattgctcaggacctggaaatgtatggaatcaactatttcgagataaaaaacaagaaaggaacagacctttggcttggagttgatgcccttggactgaatatttatgagaaagatgataagttaaccccaaagattggctttccttggagtgaaatcaggaacatctctttcaatgacaaaaagtttgtcattaaacccatcgacaagaaggcacctgactttgtgttttatgccccacgtctgagaatcaacaagcggatcctgcagctctgcatgggcaaccatgagttgtatatgcgccgcaggaagcctgacaccatcgaggtgcagcagatgaaggcccaggcccgggaggagaagcatcagaagcagctggagcggcaacagctggaaacagagaagaaaaggagagaaaccgtggagagagagaaagagcagatgatgcgcgagaaggaggagttgatgctgcggctgcaggactatgaggagaagacaaagaaggcagagagagagctctcggagcagattcagagggccctgcagctggaggaggagaggaagcgggcacaggaggaggccgagcgcctagaggctgaccgtatggctgcactgcgggctaaggaggagctggagagacaggcggtggatcagataaagagccaggagcagctggctgcggagcttgcagaatacactgccaagattgccctcctggaagaggcgcggaggcgcaaggaggatgaagttgaagagtggcagcacagggccaaagaagcccaggatgacctggtgaagaccaaggaggagctgcacctggtgatgacagcacccccgcccccaccaccccccgtgtacgagccggtgagctaccatgtccaggagagcttgcaggatgagggcgcagagcccacgggctacagcgcggagctgtctagtgagggcatccgggatgaccgcaatgaggagaagcgcatcactgaggcagagaagaacgagcgtgtgcagcggcagctgctgacgctgagcagcgagctgtcccaggcccgagatgagaataagaggacccacaatgacatcatccacaacgagaacatgaggcaaggccgggacaagtacaagacgctgcggcagatccggcagggcaacaccaagcagcgcatcgacgagttcgaggccctgtaacagccaggccaggaccaagggcagaggggtgctcatagcgggcgctgccagccccgccacgcttgtctttagtgctccaagtctaggaactccctcagatcccagttcctttagaaagcagttacccaacagaaacattctgggctgggaaccagggaggcgccctggtttgttttccccagttgtaatagtgccaagcaggcctgattctcgcgattattctcgaatcacctcctgtgttgtgctgggagcaggactgattgaattacggaaaatgcctgtaaagtctgagtaagaaacttcatgctggcctgtgtgatacaagagtcagcatcattaaaggaaacgtggcaggacttccatctgtgccatacttgttctgtattcgaaatgagctcaaattgattttttaatttctatgaaggatccatctttgtatatttacatgcttagaggggtgaaaattattttggaaattgagtctgaagcactctcgcacacacagtgattccctcctcccgtcactccacgcagctggcagagagcacagtgatcaccagcgtgagtggtggaggaggacacttggatttttttttagtttttttttttttggcttaacagttttagaatacattgtacttatacaccttattaatgatcagctatatactatttatatacaagtgataatacagatttgtaacattagttttaaaaagggaaagttttgttctgtatattttgttaccttttacagaataaaagaattacatatgaaaaaccctctaaaccatggcacttgatgtgatgtggcaggagggcagtggtggagctggacctgcctgctgcagtcacgtgtaaacaggattattattagtgttttatgcatgtaatggactatgcacacttttaattttgtcagattcacacatgccactatgagctttcagactccagctgtgaagagactctgtttgcttgtgttgtttgtttgcagtctctctctgccatggccttggcaggctgctggaaggcagcttgtggaggccgttggttccgcccactcattccttctcgtgcactgctttctccttcacagctaagatgccatgtgcaggtggattccatgccgcagacatgaaataaaagctttgcaaaggcacgaag

SEQ ID NO: 406627 - DNA, 3568 bp, Homo sapiens
caaaaaggttgcaggtttccagtaaatggagatatcgattggaaatcagatctggcatttctccatagtgctcactcattggagcatatgatggttaattgcatagcttttagttgaccttagttttttcaatgagattgttaatcttataaactgtgaatcatccaccatcttgtaagaacctgttattgctttgtttgaacctgtgacagattatcttccaactttaaagagtggataattccattaaccaaccaaaaagaaaagtagtaagataaacattttcttcaaactctgaaaattatcctttttttttttgaaacccccactgtcctcccaagtcacagcaacaagttaaaaagatgatgggaggtggggaagagtggaggagcaggaggaattcttaacagtaagtttcggggtccagggcccgattggcatgtggccccattccaggtcactggggtcatttccaaatttgagttctccaggattgatagcatcatcccatgaggactggggcttagtgaggcagtagctttgatttccagctgagcacaagagtgtgatagtacttgtttgttttttgttgttgttgttttgagatggagtcttgctctgtcgcccaggctggggtgcagtggcacgatcttggctcaccacttttgactaacctttttttgtctggagtgctaaaaagatgactttaagaataaatatctcctgaaaactggcttgagggccccattgagtcttggttagaagcctgtgttggggacagtgggccttcgtcttccggatttgtgtggagagtgtggcttgtttcgtgcaggtgtctgcccaggaggtcaggaaggagaatcccctccagttcaagttccgggccaagttctaccctgaagatgtggctgaggagctcatccaggacatcacccagaaacttttcttcctccaagtgaaggaaggaatccttagcgatgagatctactgcccccctgagactgccgtgctcttggggtcctacgctgtgcaggccaagtttggggactacaacaaagaagtgcacaagtctgggtacctcagctctgagcggctgatccctcaaagagtgatggaccagcacaaacttaccagggaccagtgggaggaccggatccaggtgtggcatgcggaacaccgtgggatgctcaaagataatgctatgttggaatacctgaagattgctcaggacctggaaatgtatggaatcaactatttcgagataaaaaacaagaaaggaacagacctttggcttggagttgatgcccttggactgaatatttatgagaaagatgataagttaaccccaaagattggctttccttggagtgaaatcaggaacatctctttcaatgacaaaaagtttgtcattaaacccatcgacaagaaggcacctgactttgtgttttatgccccacgtctgagaatcaacaagcggatcctgcagctctgcatgggcaaccatgagttgtatatgcgccgcaggaagcctgacaccatcgaggtgcagcagatgaaggcccaggcccgggaggagaagcatcagaagcagctggagcggcaacagctggaaacagagaagaaaaggagagaaaccgtggagagagagaaagagcagatgatgcgcgagaaggaggagttgatgctgcggctgcaggactatgaggagaagacaaagaaggcagagagagagctctcggagcagattcagagggccctgcagctggaggaggagaggaagcgggcacaggaggaggccgagcgcctagaggctgaccgtatggctgcactgcgggctaaggaggagctggagagacaggcggtggatcagataaagagccaggagcagctggctgcggagcttgcagaatacactgccaagattgccctcctggaagaggcgcggaggcgcaaggaggatgaagttgaagagtggcagcacagggccaaagaagcccaggatgacctggtgaagaccaaggaggagctgcacctggtgatgacagcacccccgcccccaccaccccccgtgtacgagccggtgagctaccatgtccaggagagcttgcaggatgagggcgcagagcccacgggctacagcgcggagctgtctagtgagggcatccgggatgaccgcaatgaggagaagcgcatcactgaggcagagaagaacgagcgtgtgcagcggcagctgctgacgctgagcagcgagctgtcccaggcccgagatgagaataagaggacccacaatgacatcatccacaacgagaacatgaggcaaggccgggacaagtacaagacgctgcggcagatccggcagggcaacaccaagcagcgcatcgacgagttcgaggccctgtaacagccaggccaggaccaagggcagaggggtgctcatagcgggcgctgccagccccgccacgcttgtctttagtgctccaagtctaggaactccctcagatcccagttcctttagaaagcagttacccaacagaaacattctgggctgggaaccagggaggcgccctggtttgttttccccagttgtaatagtgccaagcaggcctgattctcgcgattattctcgaatcacctcctgtgttgtgctgggagcaggactgattgaattacggaaaatgcctgtaaagtctgagtaagaaacttcatgctggcctgtgtgatacaagagtcagcatcattaaaggaaacgtggcaggacttccatctgtgccatacttgttctgtattcgaaatgagctcaaattgattttttaatttctatgaaggatccatctttgtatatttacatgcttagaggggtgaaaattattttggaaattgagtctgaagcactctcgcacacacagtgattccctcctcccgtcactccacgcagctggcagagagcacagtgatcaccagcgtgagtggtggaggaggacacttggatttttttttagtttttttttttttggcttaacagttttagaatacattgtacttatacaccttattaatgatcagctatatactatttatatacaagtgataatacagatttgtaacattagttttaaaaagggaaagttttgttctgtatattttgttaccttttacagaataaaagaattacatatgaaaaaccctctaaaccatggcacttgatgtgatgtggcaggagggcagtggtggagctggacctgcctgctgcagtcacgtgtaaacaggattattattagtgttttatgcatgtaatggactatgcacacttttaattttgtcagattcacacatgccactatgagctttcagactccagctgtgaagagactctgtttgcttgtgttgtttgtttgcagtctctctctgccatggccttggcaggctgctggaaggcagcttgtggaggccgttggttccgcccactcattccttctcgtgcactgctttctccttcacagctaagatgccatgtgcaggtggattccatgccgcagacatgaaataaaagctttgcaaaggcacgaag

SEQ ID NO: 406628 - DNA, 3027 bp, Homo sapiens
ggcttttgggagcccgggcagcgagcgcactcggcggacgcaagggcggcggggagcacacggagcactgcaggcgccgggttgggacagcgtcttcgctgctgctggatagtcgtgttttcggggatcgaggatactcaccagaaaccgaaaatgccgaaaccaatcaatgtccgagttaccaccatggatgcagagctggagtttgcaatccagccaaatacaactggaaaacagctttttgatcaggtggtaaagactatcggcctccgggaagtgtggtactttggcctccactatgtggataataaaggatttcctacctggctgaagctggataagaaggtgtctgcccaggaggtcaggaaggagaatcccctccagttcaagttccgggccaagttctaccctgaagatgtggctgaggagctcatccaggacatcacccagaaacttttcttcctccaagtgaaggaaggaatccttagcgatgagatctactgcccccctgagactgccgtgctcttggggtcctacgctgtgcaggccaagtttggggactacaacaaagaagtgcacaagtctgggtacctcagctctgagcggctgatccctcaaagagtgatggaccagcacaaacttaccagggaccagtgggaggaccggatccaggtgtggcatgcggaacaccgtgggatgctcaaagataatgctatgttggaatacctgaagattgctcaggacctggaaatgtatggaatcaactatttcgagataaaaaacaagaaaggaacagacctttggcttggagttgatgcccttggactgaatatttatgagaaagatgataagttaaccccaaagattggctttccttggagtgaaatcaggaacatctctttcaatgacaaaaagtttgtcattaaacccatcgacaagaaggcacctgactttgtgttttatgccccacgtctgagaatcaacaagcggatcctgcagctctgcatgggcaaccatgagttgtatatgcgccgcaggaagcctgacaccatcgaggtgcagcagatgaaggcccaggcccgggaggagaagcatcagaagcagctggagcggcaacagctggaaacagagaagaaaaggagagaaaccgtggagagagagaaagagcagatgatgcgcgagaaggaggagttgatgctgcggctgcaggactatgaggagaagacaaagaaggcagagagagagctctcggagcagattcagagggccctgcagctggaggaggagaggaagcgggcacaggaggaggccgagcgcctagaggctgaccgtatggctgcactgcgggctaaggaggagctggagagacaggcggtggatcagataaagagccaggagcagctggctgcggagcttgcagaatacactgccaagattgccctcctggaagaggcgcggaggcgcaaggaggatgaagttgaagagtggcagcacagggccaaagaagcccaggatgacctggtgaagaccaaggaggagctgcacctggtgatgacagcacccccgcccccaccaccccccgtgtacgagccggtgagctaccatgtccaggagagcttgcaggatgagggcgcagagcccacgggctacagcgcggagctgtctagtgagggcatccgggatgaccgcaatgaggagaagcgcatcactgaggcagagaagaacgagcgtgtgcagcggcagctgctgacgctgagcagcgagctgtcccaggcccgagatgagaataagaggacccacaatgacatcatccacaacgagaacatgaggcaaggccgggacaagtacaagacgctgcggcagatccggcagggcaacaccaagcagcgcatcgacgagttcgaggccctgtaacagccaggccaggaccaagggcagaggggtgctcatagcgggcgctgccagccccgccacgcttgtctttagtgctccaagtctaggaactccctcagatcccagttcctttagaaagcagttacccaacagaaacattctgggctgggaaccagggaggcgccctggtttgttttccccagttgtaatagtgccaagcaggcctgattctcgcgattattctcgaatcacctcctgtgttgtgctgggagcaggactgattgaattacggaaaatgcctgtaaagtctgagtaagaaacttcatgctggcctgtgtgatacaagagtcagcatcattaaaggaaacgtggcaggacttccatctgtgccatacttgttctgtattcgaaatgagctcaaattgattttttaatttctatgaaggatccatctttgtatatttacatgcttagaggggtgaaaattattttggaaattgagtctgaagcactctcgcacacacagtgattccctcctcccgtcactccacgcagctggcagagagcacagtgatcaccagcgtgagtggtggaggaggacacttggatttttttttagtttttttttttttggcttaacagttttagaatacattgtacttatacaccttattaatgatcagctatatactatttatatacaagtgataatacagatttgtaacattagttttaaaaagggaaagttttgttctgtatattttgttaccttttacagaataaaagaattacatatgagctggacctgcctgctgcagtcacgtgtaaacaggattattattagtgttttatgcatgtaatggactatgcacacttttaattttgtcagattcacacatgccactatgagctttcagactccagctgtgaagagactctgtttgcttgtgttgtttgtttgcagtctctctctgccatggccttggcaggctgctggaaggcagcttgtggaggccgttggttccgcccactcattccttctcgtgcactgctttctccttcacagctaagatgccatgtgcaggtggattccatgccgcagacatgaaataaaagctttgcaaaggcacgaag

SEQ ID NO: 406629 - DNA, 2708 bp, Homo sapiens
ggcttttgggagcccgggcagcgagcgcactcggcggacgcaagggcggcggggagcacacggagcactgcaggcgccgggttgggacagcgtcttcgctgctgctggatagtcgtgttttcggggatcgaggatactcaccagaaaccgaaaatgccgaaaccaatcaatgtccgagttaccaccatggatgcagagctggagtttgcaatccagccaaatacaactggaaaacagctttttgatcaggtggtaaagactatcggcctccgggaagtgtggtactttggcctccactatgtggataataaaggatttcctacctggctgaagctggataagaaggtgtctgcccaggaggtcaggaaggagaatcccctccagttcaagttccgggccaagttctaccctgaagatgtggctgaggagctcatccaggacatcacccagaaacttttcttcctccaagtgaaggaaggaatccttagcgatgagatctactgcccccctgagactgccgtgctcttggggtcctacgctgtgcaggccaagtttggggactacaacaaagaagtgcacaagtctgggtacctcagctctgagcggctgatccctcaaagagtgatggaccagcacaaacttaccagggaccagtgggaggaccggatccaggtgtggcatgcggaacaccgtgggatgctcaaagataatgctatgttggaatacctgaagattgctcaggacctggaaatgtatggaatcaactatttcgagataaaaaacaagaaaggaacagacctttggcttggagttgatgcccttggactgaatatttatgagaaagatgataagttaaccccaaagattggctttccttggagtgaaatcaggaacatctctttcaatgacaaaaagtttgtcattaaacccatcgacaagaaggcacctgactttgtgttttatgccccacgtctgagaatcaacaagcggatcctgcagctctgcatgggcaaccatgagttgtatatgcgccgcaggaagcctgacaccatcgaggtgcagcagatgaaggcccaggcccgggaggagaagcatcagaagcagctggagcggcaacagctggaaacagagaagaaaaggagagaaaccgtggagagagagaaagagcagatgatgcgcgagaaggaggagttgatgctgcggctgcaggactatgaggagaagacaaagaaggcagagagagagctctcggagcagattcagagggccctgcagctggaggaggagaggaagcgggcacaggaggaggccgagcgcctagaggctgaccgtatggctgcactgcgggctaaggaggagctggagagacaggcggtggatcagataaagagccaggagcagctggctgcggagcttgcagaatacactgccaagattgccctcctggaagaggcgcggaggcgcaaggaggatgaagttgaagagtggcagcacagggccaaagaagcccaggatgacctggtgaagaccaaggaggagctgcacctggtgatgacagcacccccgcccccaccaccccccgtgtacgagccggtgagctaccatgtccaggagagcttgcaggatgagggcgcagagcccacgggctacagcgcggagctgtctagtgagggcatccgggatgaccgcaatgaggagaagcgcatcactgaggcagagaagaacgagcgtgtgcagcggcagctgctgacgctgagcagcgagctgtcccaggcccgagatgagaataagaggacccacaatgacatcatccacaacgagaacatgaggcaaggccgggacaagtacaagacgctgcggcagatccggcagggcaacaccaagcagcgcatcgacgagttcgaggccctgtaacagccaggccaggaccaagggcagaggggtgctcatagcgggcgctgccagccccgccacgcttgtctttagtgctccaagtctaggaactccctcagatcccagttcctttagaaagcagttacccaacagaaacattctgggctgggaaccagggaggcgccctggtttgttttccccagttgtaatagtgccaagcaggcctgattctcgcgattattctcgaatcacctcctgtgttgtgctgggagcaggactgattgaattacggaaaatgcctgtaaagtctgagtaagaaacttcatgctggcctgtgtgatacaagagtcagcatcattaaaggaaacgtggcaggacttccatctgtgccatacttgttctgtattcgaaatgagctcaaattgattttttaatttctatgaaggatccatctttgtatatttacatgcttagaggggtgaaaattattttggaaattgagtctgaagcactctcgcacacacagtgattccctcctcccgtcactccacgcagctggcagagagcacagtgatcaccagcgtgagtggtggaggaggacacttggatttttttttagtttttttttttttggcttaacagttttagaatacattgtacttatacaccttattaatgatcagctatatactatttatataccaagttggataatactagatttgtcaccattaggttttaacaaaggggtaacgttttttgatctggtataatttttgttaacccttttaccagtaatcggtttaccactatgt

SEQ ID NO: 406630 - DNA, 2111 bp, Homo sapiens
ggcttttgggagcccgggcagcgagcgcactcggcggacgcaagggcggcggggagcacacggagcactgcaggcgccgggttgggacagcgtcttcgctgctgctggatagtcgtgttttcggggatcgaggatactcaccagaaaccgaaaatgccgaaaccaatcaatgtccgagttaccaccatggatgcagagctggagtttgcaatccagccaaatacaactggaaaacagctttttgatcaggtggtaaagactatcggcctccgggaagtgtggtactttggcctccactatgtggataataaaggatttcctacctggctgaagctggataagaaggtgtctgcccaggaggtcaggaaggagaatcccctccagttcaagttccgggccaagttctaccctgaagatgtggctgaggagctcatccaggacatcacccagaaacttttcttcctccaagtgaaggaaggaatccttagcgatgagatctactgcccccctgagactgccgtgctcttggggtcctacgctgtgcaggccaagtttggggactacaacaaagaagtgcacaagtctgggtacctcagctctgagcggctgatccctcaaagagtgatggaccagcacaaacttaccagggaccagtgggaggaccggatccaggtgtggcatgcggaacaccgtgggatgctcaaagataatgctatgttggaatacctgaagattgctcaggacctggaaatgtatggaatcaactatttcgagataaaaaacaagaaaggaacagacctttggcttggagttgatgcccttggactgaatatttatgagaaagatgataagttaaccccaaagattggctttccttggagtgaaatcaggaacatctctttcaatgacaaaaagtttgtcattaaacccatcgacaagaaggcacctgactttgtgttttatgccccacgtctgagaatcaacaagcggatcctgcagctctgcatgggcaaccatgagttgtatatgcgccgcaggaagcctgacaccatcgaggtgcagcagttacccaacagaaacattctgggctgggaaccagggaggcgccctggtttgttttccccagttgtaatagtgccaagcaggcctgattctcgcgattattctcgaatcacctcctgtgttgtgctgggagcaggactgattgaattacggaaaatgcctgtaaagtctgagtaagaaacttcatgctggcctgtgtgatacaagagtcagcatcattaaaggaaacgtggcaggacttccatctgtgccatacttgttctgtattcgaaatgagctcaaattgattttttaatttctatgaaggatccatctttgtatatttacatgcttagaggggtgaaaattattttggaaattgagtctgaagcactctcgcacacacagtgattccctcctcccgtcactccacgcagctggcagagagcacagtgatcaccagcgtgagtggtggaggaggacacttggatttttttttagtttttttttttttggcttaacagttttagaatacattgtacttatacaccttattaatgatcagctatatactatttatatacaagtgataatacagatttgtaacattagttttaaaaagggaaagttttgttctgtatattttgttaccttttacagaataaaagaattacatatgaaaaaccctctaaaccatggcacttgatgtgatgtggcaggagggcagtggtggagctggacctgcctgctgcagtcacgtgtaaacaggattattattagtgttttatgcatgtaatggactatgcacacttttaattttgtcagattcacacatgccactatgagctttcagactccagctgtgaagagactctgtttgcttgtgttgtttgtttgcagtctctctctgccatggccttggcaggctgctggaaggcagcttgtggaggccgttggttccgcccactcattccttctcgtgcactgctttctccttcacagctaagatgccatgtgcaggtggattccatgccgcagacatgaaataaaagctttgcaaaggcacgaag

SEQ ID NO: 406631 - DNA, 1756 bp, Homo sapiens
ggcttttgggagcccgggcagcgagcgcactcggcggacgcaagggcggcggggagcacacggagcactgcaggcgccgggttgggacagcgtcttcgctgctgctggatagtcgtgttttcggggatcgaggatactcaccagaaaccgaaaatgccgaaaccaatcaatgtccgagttaccaccatggatgcagagctggagtttgcaatccagccaaatacaactggaaaacagctttttgatcaggtggtaaagactatcggcctccgggaagtgtggtactttggcctccactatgtggataataaaggatttcctacctggctgaagctggataagaaggtgtctgcccaggaggtcaggaaggagaatcccctccagttcaagttccgggccaagttctaccctgaagatgtggctgaggagctcatccaggacatcacccagaaacttttcttcctccaagtgaaggaaggaatccttagcgatgagatctactgcccccctgagactgccgtgctcttggggtcctacgctgtgcaggccaagtttggggactacaacaaagaagtgcacaagtctgggtacctcagctctgagcggctgatccctcaaagagtgatggaccagcacaaacttaccagggaccagtgggaggaccggatccaggtgtggcatgcggaacaccgtgggatgctcaaagataatgctatgttggaatacctgaagattgctcaggacctggaaatgtatggaatcaactatttcgagataaaaaacaagaaaggaacagacctttggcttggagttgatgcccttggactgaatatttatgagaaagatgataagttaaccccaaagattggctttccttggagtgaaatcaggaacatctctttcaatgacaaaaagtttgtcattaaacccatcgacaagaaggcacctgactttgtgttttatgccccacgtctgagaatcaacaagcggatcctgcagctctgcatgggcaaccatgagttgtatatgcgccgcaggaagcctgacaccatcgaggtgcagcagatgaaggcccaggcccgggaggagaagcatcagaagcagctggagcggcaacagctggaaacagagaagaaaaggagagaaaccgtggagagagagaaagagcagatgatgcgcgagaaggaggagttgatgctgcggctgcaggactatgaggagaagacaaagaaggcagagagagagctctcggagcagattcagagggccctgcagctggaggaggagaggaagcgggcacaggaggaggccgagcgcctagaggctgaccgtatggctgcactgcgggctaaggaggagctggagagacaggcggtggatcagataaagagccaggagcagctggctgcggagcttgcagaatacactgccaagattgccctcctggaagaggcgcggaggcgcaaggaggatgaagttgaagagtggcagcacaggtgtggttatgcatctgagtgtggcggacatactctcctccagtccaatcctgagcatcttcatcttattaattagcctgtacgtttctttgtgcactcattcttgtatatagactgctttacaatgtcagtggtatccagttgtttccagtagccagtttcttgaacttcggacctgtaacataactaagtgcagacctccagagtcacgtggcctttctgtgctctacattattatttgagggcccacatcagttgcc

SEQ ID NO: 406632 - DNA, 2595 bp, Homo sapiens
cagagattggccccatatcctgagctgacgtttccattctttggggaggtggccgggcagggacgggaggaaagatgaggcagaggtgaaagcacatggaacaccaccggggggactggctaaccttggcacacaagcagcacagcaggccccgggaaagggtgggggcaataaccctccctaatcctagctcagtgagtagagggagtgacctccctacccaggaagtcccccttttggttgccatggcccaggtcctgaccatccccctctgtacttccctgctccatctccccacccatgtaaacagacctttggcttggagttgatgcccttggactgaatatttatgagaaagatgataagttaaccccaaagattggctttccttggagtgaaatcaggaacatctctttcaatgacaaaaagtttgtcattaaacccatcgacaagaaggcacctgactttgtgttttatgccccacgtctgagaatcaacaagcggatcctgcagctctgcatgggcaaccatgagttgtatatgcgccgcaggaagcctgacaccatcgaggtgcagcagatgaaggcccaggcccgggaggagaagcatcagaagcagctggagcggcaacagctggaaacagagaagaaaaggagagaaaccgtggagagagagaaagagcagatgatgcgcgagaaggaggagttgatgctgcggctgcaggactatgaggagaagacaaagaaggcagagagagagctctcggagcagattcagagggccctgcagctggaggaggagaggaagcgggcacaggaggaggccgagcgcctagaggctgaccgtatggctgcactgcgggctaaggaggagctggagagacaggcggtggatcagataaagagccaggagcagctggctgcggagcttgcagaatacactgccaagattgccctcctggaagaggcgcggaggcgcaaggaggatgaagttgaagagtggcagcacagggccaaagaagcccaggatgacctggtgaagaccaaggaggagctgcacctggtgatgacagcacccccgcccccaccaccccccgtgtacgagccggtgagctaccatgtccaggagagcttgcaggatgagggcgcagagcccacgggctacagcgcggagctgtctagtgagggcatccgggatgaccgcaatgaggagaagcgcatcactgaggcagagaagaacgagcgtgtgcagcggcagctgctgacgctgagcagcgagctgtcccaggcccgagatgagaataagaggacccacaatgacatcatccacaacgagaacatgaggcaaggccgggacaagtacaagacgctgcggcagatccggcagggcaacaccaagcagcgcatcgacgagttcgaggccctgtaacagccaggccaggaccaagggcagaggggtgctcatagcgggcgctgccagccccgccacgcttgtctttagtgctccaagtctaggaactccctcagatcccagttcctttagaaagcagttacccaacagaaacattctgggctgggaaccagggaggcgccctggtttgttttccccagttgtaatagtgccaagcaggcctgattctcgcgattattctcgaatcacctcctgtgttgtgctgggagcaggactgattgaattacggaaaatgcctgtaaagtctgagtaagaaacttcatgctggcctgtgtgatacaagagtcagcatcattaaaggaaacgtggcaggacttccatctgtgccatacttgttctgtattcgaaatgagctcaaattgattttttaatttctatgaaggatccatctttgtatatttacatgcttagaggggtgaaaattattttggaaattgagtctgaagcactctcgcacacacagtgattccctcctcccgtcactccacgcagctggcagagagcacagtgatcaccagcgtgagtggtggaggaggacacttggatttttttttagtttttttttttttggcttaacagttttagaatacattgtacttatacaccttattaatgatcagctatatactatttatatacaagtgataatacagatttgtaacattagttttaaaaagggaaagttttgttctgtatattttgttaccttttacagaataaaagaattacatatgaaaaaccctctaaaccatggcacttgatgtgatgtggcaggagggcagtggtggagctggacctgcctgctgcagtcacgtgtaaacaggattattattagtgttttatgcatgtaatggactatgcacacttttaattttgtcagattcacacatgccactatgagctttcagactccagctgtgaagagactctgtttgcttgtgttgtttgtttgcagtctctctctgccatggccttggcaggctgctggaaggcagcttgtggaggccgttggttccgcccactcattccttctcgtgcactgctttctccttcacagctaagatgccatgtgcaggtggattccatgccgcagacatgaaataaaagctttgcaaaggcacgaag

SEQ ID NO: 406633 - DNA, 2442 bp, Homo sapiens
atcaaaaagctcagttcgagcggccttagtatagccgttcatattcgcaagaatatgagttccatcgtgatggatgcggtccgttgcttcctgattgctcaggatctggaaatgtatggaatcaactatttcgagataaaaaacaagaaaggaacagacctttggcttggagttgatgcccttggactgaatatttatgagaaagatgataagttaaccccaaagattggctttccttggagtgaaatcaggaacatctctttcaatgacaaaaagtttgtcattaaacccatcgacaagaaggcacctgactttgtgttttatgccccacgtctgagaatcaacaagcggatcctgcagctctgcatgggcaaccatgagttgtatatgcgccgcaggaagcctgacaccatcgaggtgcagcagatgaaggcccaggcccgggaggagaagcatcagaagcagctggagcggcaacagctggaaacagagaagaaaaggagagaaaccgtggagagagagaaagagcagatgatgcgcgagaaggaggagttgatgctgcggctgcaggactatgaggagaagacaaagaaggcagagagagagctctcggagcagattcagagggccctgcagctggaggaggagaggaagcgggcacaggaggaggccgagcgcctagaggctgaccgtatggctgcactgcgggctaaggaggagctggagagacaggcggtggatcagataaagagccaggagcagctggctgcggagcttgcagaatacactgccaagattgccctcctggaagaggcgcggaggcgcaaggaggatgaagttgaagagtggcagcacagggccaaagaagcccaggatgacctggtgaagaccaaggaggagctgcacctggtgatgacagcacccccgcccccaccaccccccgtgtacgagccggtgagctaccatgtccaggagagcttgcaggatgagggcgcagagcccacgggctacagcgcggagctgtctagtgagggcatccgggatgaccgcaatgaggagaagcgcatcactgaggcagagaagaacgagcgtgtgcagcggcagctgctgacgctgagcagcgagctgtcccaggcccgagatgagaataagaggacccacaatgacatcatccacaacgagaacatgaggcaaggccgggacaagtacaagacgctgcggcagatccggcagggcaacaccaagcagcgcatcgacgagttcgaggccctgtaacagccaggccaggaccaagggcagaggggtgctcatagcgggcgctgccagccccgccacgcttgtctttagtgctccaagtctaggaactccctcagatcccagttcctttagaaagcagttacccaacagaaacattctgggctgggaaccagggaggcgccctggtttgttttccccagttgtaatagtgccaagcaggcctgattctcgcgattattctcgaatcacctcctgtgttgtgctgggagcaggactgattgaattacggaaaatgcctgtaaagtctgagtaagaaacttcatgctggcctgtgtgatacaagagtcagcatcattaaaggaaacgtggcaggacttccatctgtgccatacttgttctgtattcgaaatgagctcaaattgattttttaatttctatgaaggatccatctttgtatatttacatgcttagaggggtgaaaattattttggaaattgagtctgaagcactctcgcacacacagtgattccctcctcccgtcactccacgcagctggcagagagcacagtgatcaccagcgtgagtggtggaggaggacacttggatttttttttagtttttttttttttggcttaacagttttagaatacattgtacttatacaccttattaatgatcagctatatactatttatatacaagtgataatacagatttgtaacattagttttaaaaagggaaagttttgttctgtatattttgttaccttttacagaataaaagaattacatatgaaaaaccctctaaaccatggcacttgatgtgatgtggcaggagggcagtggtggagctggacctgcctgctgcagtcacgtgtaaacaggattattattagtgttttatgcatgtaatggactatgcacacttttaattttgtcagattcacacatgccactatgagctttcagactccagctgtgaagagactctgtttgcttgtgttgtttgtttgcagtctctctctgccatggccttggcaggctgctggaaggcagcttgtggaggccgttggttccgcccactcattccttctcgtgcactgctttctccttcacagctaagatgccatgtgcaggtggattccatgccgcagacatgaaataaaagctttgcaaaggcacgaag

SEQ ID NO: 406634 - DNA, 1454 bp, Homo sapiens
ggcttttgggagcccgggcagcgagcgcactcggcggacgcaagggcggcggggagcacacggagcactgcaggcgccgggttgggacagcgtcttcgctgctgctggatagtcgtgttttcggggatcgaggatactcaccagaaaccgaaaatgccgaaaccaatcaatgtccgagttaccaccatggatgcagagctggagtttgcaatccagccaaatacaactggaaaacagctttttgatcaggtggtaaagactatcggcctccgggaagtgtggtactttggcctccactatgtggataataaaggatttcctacctggctgaagctggataagaaggtgtctgcccaggaggtcaggaaggagaatcccctccagttcaagttccgggccaagttctaccctgaagatgtggctgaggagctcatccaggacatcacccagaaacttttcttcctccaagtgaaggaaggaatccttagcgatgagatctactgcccccctgagactgccgtgctcttggggtcctacgctgtgcaggccaagtttggggactacaacaaagaagtgcacaagtctgggtacctcagctctgagcggctgatccctcaaagagtgatggaccagcacaaacttaccagggaccagtgggaggaccggatccaggtgtggcatgcggaacaccgtgggatgctcaaagataatgctatgttggaatacctgaagattgctcaggacctggaaatgtatggaatcaactatttcgagataaaaaacaagaaaggaacagacctttggcttggagttgatgcccttggactgaatatttatgagaaagatgataagttaaccccaaagattggctttccttggagtgaaatcaggaacatctctttcaatgacaaaaagtttgtcattaaacccatcgacaagaaggcacctgactttgtgttttatgccccacgtctgagaatcaacaagcggatcctgcagctctgcatgggcaaccatgagttgtatatgcgccgcaggaagcctgacaccatcgaggtgcagcagatgaaggcccaggcccgggaggagaagcatcagaagcagctggagcggcaacagctggaaacagagaagaaaaggagagaaaccgtggagagagagaaagagcagatgatgcgcgagaaggaggagttgatgctgcggctgcaggactatgaggagaagacaaagaaggcagagagagagctctcggagcagattcagagggccctgcagctggaggaggagaggaagcgggcacaggaggagaagcatcagaagcagcaggagcagcaacagctggaaacagagaagaaaaggagagcaaccgtggagagagagaaagagcagatgatgcgcgagaaggaggagttaaccacgcatcagacatatgaggagtcgaagccgtctgaggt

SEQ ID NO: 406635 - DNA, 1910 bp, Homo sapiens
gggaatggaaagcgagggctcctaggtccctgggctgagggtttgaatggctctggctttgtgtctttgcagagctctcggagcagattcagagggccctgcagctggaggaggagaggaagcgggcacaggaggaggccgagcgcctagaggctgaccgtatggctgcactgcgggctaaggaggagctggagagacaggcggtggatcagataaagagccaggagcagctggctgcggagcttgcagaatacactgccaagattgccctcctggaagaggcgcggaggcgcaaggaggatgaagttgaagagtggcagcacagggccaaagaagcccaggatgacctggtgaagaccaaggaggagctgcacctggtgatgacagcacccccgcccccaccaccccccgtgtacgagccggtgagctaccatgtccaggagagcttgcaggatgagggcgcagagcccacgggctacagcgcggagctgtctagtgagggcatccgggatgaccgcaatgaggagaagcgcatcactgaggcagagaagaacgagcgtgtgcagcggcagctgctgacgctgagcagcgagctgtcccaggcccgagatgagaataagaggacccacaatgacatcatccacaacgagaacatgaggcaaggccgggacaagtacaagacgctgcggcagatccggcagggcaacaccaagcagcgcatcgacgagttcgaggccctgtaacagccaggccaggaccaagggcagaggggtgctcatagcgggcgctgccagccccgccacgcttgtctttagtgctccaagtctaggaactccctcagatcccagttcctttagaaagcagttacccaacagaaacattctgggctgggaaccagggaggcgccctggtttgttttccccagttgtaatagtgccaagcaggcctgattctcgcgattattctcgaatcacctcctgtgttgtgctgggagcaggactgattgaattacggaaaatgcctgtaaagtctgagtaagaaacttcatgctggcctgtgtgatacaagagtcagcatcattaaaggaaacgtggcaggacttccatctgtgccatacttgttctgtattcgaaatgagctcaaattgattttttaatttctatgaaggatccatctttgtatatttacatgcttagaggggtgaaaattattttggaaattgagtctgaagcactctcgcacacacagtgattccctcctcccgtcactccacgcagctggcagagagcacagtgatcaccagcgtgagtggtggaggaggacacttggatttttttttagtttttttttttttggcttaacagttttagaatacattgtacttatacaccttattaatgatcagctatatactatttatatacaagtgataatacagatttgtaacattagttttaaaaagggaaagttttgttctgtatattttgttaccttttacagaataaaagaattacatatgaaaaaccctctaaaccatggcacttgatgtgatgtggcaggagggcagtggtggagctggacctgcctgctgcagtcacgtgtaaacaggattattattagtgttttatgcatgtaatggactatgcacacttttaattttgtcagattcacacatgccactatgagctttcagactccagctgtgaagagactctgtttgcttgtgttgtttgtttgcagtctctctctgccatggccttggcaggctgctggaaggcagcttgtggaggccgttggttccgcccactcattccttctcgtgcactgctttctccttcacagctaagatgccatgtgcaggtggattccatgccgcagacatgaaataaaagctttgcaaaggcacgaag

SEQ ID NO: 406636 - DNA, 1240 bp, Homo sapiens
ggcttttgggagcccgggcagcgagcgcactcggcggacgcaagggcggcggggagcacacggagcactgcaggcgccgggttgggacagcgtcttcgctgctgctggatagtcgtgttttcggggatcgaggatactcaccagaaaccgaaaatgccgaaaccaatcaatgtccgagttaccaccatggatgcagagctggagtttgcaatccagccaaatacaactggaaaacagctttttgatcaggtggtaaagactatcggcctccgggaagtgtggtactttggcctccactatgtggataataaaggatttcctacctggctgaagctggataagaaggtgtctgcccaggaggtcaggaaggagaatcccctccagttcaagttccgggccaagttctaccctgaagatgtggctgaggagctcatccaggacatcacccagaaacttttcttcctccaagtgaaggaaggaatccttagcgatgagatctactgcccccctgagactgccgtgctcttggggtcctacgctgtgcaggccaagtttggggactacaacaaagaagtgcacaagtctgggtacctcagctctgagcggctgatccctcaaagagtgatggaccagcacaaacttaccagggaccagtgggaggaccggatccaggtgtggcatgcggaacaccgtgggatgctcaaagataatgctatgttggaatacctgaagattgctcaggacctggaaatgtatggaatcaactatttcgagataaaaaacaagaaaggaacagacctttggcttggagttgatgcccttggactgaatatttatgagaaagatgataagttaaccccaaagattggctttccttggagtgaaatcaggaacatctctttcaatgacaaaaagtttgtcattaaacccatcgacaagaaggcacctgactttgtgttttatgccccacgtctgagaatcaacaagcggatcctgcagctctgcatgggcaaccatgagttgtatatgcgccgcaggaagcctgacaccatcgaggtgcagcagatgaaggcccaggcccgggaggagaagcatcagaagcagctggagcggcaacagctggaaacagagaagaaaaggagagaaaccgtgcactgctttctccttcacagctaagatgccatgtgcaggtggattccatgccgcagacatgaaataaaagctttgcaaaggcacgaag

SEQ ID NO: 406637 - DNA, 1633 bp, Homo sapiens
gggaatggaaagcgagggctcctaggtccctgggctgagggtttgaatggctctggctttgtgtctttgcagagctctcggagcagattcagagggccctgcagctggaggaggagaggaagcgggcacaggaggaggccgagcgcctagaggctgaccgtatggctgcactgcgggctaaggaggagctggagagacaggcggtggatcagataaagagccaggagcagctggctgcggagcttgcagaatacactgccaagattgccctcctggaagaggcgcggaggcgcaaggaggatgaagttgaagagtggcagcacagggccaaagaagcccaggatgacctggtgaagaccaaggaggagctgcacctggtgatgacagcacccccgcccccaccaccccccgtgtacgagccgagggcaacaccaagcagcgcatcgacgagttcgaggccctgtaacagccaggccaggaccaagggcagaggggtgctcatagcgggcgctgccagccccgccacgcttgtctttagtgctccaagtctaggaactccctcagatcccagttcctttagaaagcagttacccaacagaaacattctgggctgggaaccagggaggcgccctggtttgttttccccagttgtaatagtgccaagcaggcctgattctcgcgattattctcgaatcacctcctgtgttgtgctgggagcaggactgattgaattacggaaaatgcctgtaaagtctgagtaagaaacttcatgctggcctgtgtgatacaagagtcagcatcattaaaggaaacgtggcaggacttccatctgtgccatacttgttctgtattcgaaatgagctcaaattgattttttaatttctatgaaggatccatctttgtatatttacatgcttagaggggtgaaaattattttggaaattgagtctgaagcactctcgcacacacagtgattccctcctcccgtcactccacgcagctggcagagagcacagtgatcaccagcgtgagtggtggaggaggacacttggatttttttttagtttttttttttttggcttaacagttttagaatacattgtacttatacaccttattaatgatcagctatatactatttatatacaagtgataatacagatttgtaacattagttttaaaaagggaaagttttgttctgtatattttgttaccttttacagaataaaagaattacatatgaaaaaccctctaaaccatggcacttgatgtgatgtggcaggagggcagtggtggagctggacctgcctgctgcagtcacgtgtaaacaggattattattagtgttttatgcatgtaatggactatgcacacttttaattttgtcagattcacacatgccactatgagctttcagactccagctgtgaagagactctgtttgcttgtgttgtttgtttgcagtctctctctgccatggccttggcaggctgctggaaggcagcttgtggaggccgttggttccgcccactcattccttctcgtgcactgctttctccttcacagctaagatgccatgtgcaggtggattccatgccgcagacatgaaataaaagctttgcaaaggcacgaag

SEQ ID NO: 406638 - DNA, 938 bp, Homo sapiens
ggcttttgggagcccgggcagcgagcgcactcggcggacgcaagggcggcggggagcacacggagcactgcaggcgccgggttgggacagcgtcttcgctgctgctggatagtcgtgttttcggggatcgaggatactcaccagaaaccgaaaatgccgaaaccaatcaatgtccgagttaccaccatggatgcagagctggagtttgcaatccagccaaatacaactggaaaacagctttttgatcaggtggtaaagactatcggcctccgggaagtgtggtactttggcctccactatgtggataataaaggatttcctacctggctgaagctggataagaaggtgtctgcccaggaggtcaggaaggagaatcccctccagttcaagttccgggccaagttctaccctgaagatgtggctgaggagctcatccaggacatcacccagaaacttttcttcctccaagtgaaggaaggaatccttagcgatgagatctactgcccccctgagactgccgtgctcttggggtcctacgctgtgcaggccaagtttggggactacaacaaagaagtgcacaagtctgggtacctcagctctgagcggctgatccctcaaagagtgatggaccagcacaaacttaccagggaccagtgggaggaccggatccaggtgtggcatgcggaacaccgtgggatgctcaaagataatgctatgttggaatacctgaagattgctcaggacctggaaatgtatggaatcaactatttcgagataaaaaacaagaaaggaacagacctttggcttggagttgatgcccttggccttgccatatgcaaatggcaaggccaaggtcagaagatgaaccacgtgacgaaatagaaaaagctacctatggagtgtgcccctacgcaggtacttggccttgccatatgcaa

SEQ ID NO: 406639 - DNA, 960 bp, Homo sapiens
  misc_feature (755)..(755): n is a, c, g, or t
ggcttttgggagcccgggcagcgagcgcactcggcggacgcaagggcggcggggagcacacggagcactgcaggcgccgggttgggacagcgtcttcgctgctgctggatagtcgtgttttcggggatcgaggatactcaccagaaaccgaaaatgccgaaaccaatcaatgtccgagttaccaccatggatgcagagctggagtttgcaatccagccaaatacaactggaaaacagctttttgatcaggtggtaaagactatcggcctccgggaagtgtggtactttggcctccactatgtggataataaaggatttcctacctggctgaagctggataagaaggtgtctgcccaggaggtcaggaaggagaatcccctccagttcaagttccgggccaagttctaccctgaagatgtggctgaggagctcatccaggacatcacccagaaacttttcttcctccaagtgaaggaaggaatccttagcgatgagatctactgcccccctgagactgccgtgctcttggggtcctacgctgtgcaggccaagtttggggactacaacaaagaagtgcacaagtctgggtacctcagctctgagcggctgatccctcaaagagtgatggaccagcacaaacttaccagggaccagtgggaggaccggatccaggtgtggcatgcggaacaccgtgggatgctcaaagataatgctatgttggaatacctgaagattgctcaggacctggaaatgtntggaagccaccgactcaggtagaaaagcaggaaagcacagacctataggatgcagcaggagccccacatgcacatccgagatgaaaccatctaggcagtgagggcagcatgtcctcactgcacagtcgagtaagcacagtcgagtaagactgctgccaatttctttctttttttttttacagatacaatcttctctgacattgat

SEQ ID NO: 406640 - DNA, 522 bp, Homo sapiens
agttcagtatcttataaacaaaaataagcgtcacccctctgacaaagtatgaaccagtcttctaaataaaattaatggcttctttaagaaaagcctcagccaccttgcagagatgacttgggaaatcttaaggaagaatgtgtctccttctggagacaccagacaaacaactctgaggcgatgattggctttccttggagtgaaatcaggaacatctctttcaatgacaaaaagtttgtcattaaacccatcgacaagaaggcacctgactttgtgtgactttgtgttttatgccccacgtctgagaatcaacaagcggatcctgcagctctgcatgggcaaccatgagttgtatatgcgccgcaggaagcctgacaccatcgaggtgcagcagatgaaggcccaggcccgggaggagaagcatcagaagcagctggagcggcaacagctggaaacagagaagaaaaggagagaaaccgtggagggagagggagagcctgtttctaataaatatacaaaatc

SEQ ID NO: 406641 - DNA, 577 bp, Homo sapiens
atcaaaaagctcagttcgagcggccttagtatagccgttcatattcgcaagaatatgagttccatcgtgatggatgcggtccgttgcttcctgattgctcaggatctggaaatgtatggaatcaactatttcgagataaaaaacaagaaaggaacagacctttggcttggagttgatgcccttggactgaatatttatgagaaagatgataagattggctttccttggagtgaaatcaggaacatctctttcaatgacaaaaagtttgtcattaaacccatcgacaagaaggcacctgactttgtgttgtatgccccacgtctgagaatcaacaagcggatcctgcagctctgcatgggcaaccatgagttgtatatgcgccgcaggaacctgacacggagcactgcaggcgccgggttgggacagcgtcttcgctgctgctggatagtcgtgttttcggggatcgaggatactcaccagaaaccgaaaatgccgaaaccaatcaatgtccgagttaccacctgatcaaaaagctgttttccagttgtatttggctggattgcaaactccagctctg

SEQ ID NO: 406642 - DNA, 3735 bp, Homo sapiens
ctgcccgccagaccccgtcgcccggccggatcccctgagctgcccgccatcccacgtgaccgcgccgccccccagctccaccgctgagcccgctcgccatggccctcttcggggccctcttcctagcgctgctggcaggcgcacatgcagagttcccaggctgcaagatccgcgtcacctccaaggcgctggagctggtgaagcaggaggggctgcgctttctggagcaagagctggagactatcaccattccggacctgcggggcaaagaaggccacttctactacaacatctctgaggtgaaggtcacagagctgcaactgacatcttccgagctcgatttccagccacagcaggagctgatgcttcaaatcaccaatgcctccttggggctgcgcttccggagacagctgctctactggttcttctatgatgggggctacatcaacgcctcagctgagggtgtgtccatccgcactggtctggagctctcccgggatcccgctggacggatgaaagtgtccaatgtctcctgccaggcctctgtctccagaatgcacgcggccttcgggggaaccttcaagaaggtgtatgattttctctccacgttcatcacctcagggatgcgcttcctcctcaaccagcagatctgccctgtcctctaccacgcagggacggtcctgctcaactccctcctggacaccgtgcctgtgcgcagttctgtggacgagcttgttggcattgactattccctcatgaaggatcctgtggcttccaccagcaacctggacatggacttccggggggccttcttccccctgactgagaggaactggagcctccccaaccgggcagtggagccccagctgcaggaggaagagcggatggtgtatgtggccttctctgagttcttcttcgactctgccatggagagctacttccgggcgggggccctgcagctgttgctggtgggggacaaggtgccccacgacctggacatgctgctgagggccacctactttgggagcattgtcctgctgagcccagcagtgattgactccccattgaagctggagctgcgggtcctggccccaccgcgctgcaccatcaagccctctggcaccaccatctctgtcactgctagcgtcaccattgccctggtcccaccagaccagcctgaggtccagctgtccagcatgactatggacgcccgtctcagcgccaagatggctctccgggggaaggccctgcgcacgcagctggacctgcgcaggttccgaatctattccaaccattctgcactggagtcgctggctctgatcccattacaggcccctctgaagaccatgctgcagattggggtgatgcccatgctcaatgagcggacctggcgtggggtgcagatcccactacctgagggcatcaactttgtgcatgaggtggtgacgaaccatgcgggattcctcaccatcggggctgatctccactttgccaaagggctgcgagaggtgattgagaagaaccggcctgctgatgtcagggcgtccactgcccccacaccgtccacagcagctgtctgagccctcaatccccaagctggcagctgtcattcaggaccccaacccctctcagcccctcttttcccacattcatagcctgtagtgccccctctaacccccagtgccacagagaagacgggatttgaagctgtacccaatttaattccataatcaatctatcaattacagtccgtccaccacctccctgtgggctgtcctgagctctgttgggttcctgggatggaatcagtgcatcataaagggcattctttaagcagagaaggggccaggccaccccattcaggaactgctgcgggaataaagtgctaacttgcccccaggctgtctatgggagaccctgggcccagtctgggatgtacagggctctgggaagggggcagtcctggcggcagaacccggcctgcaggggcactttgcttagaagaggactctcctagcgggagaggctgggaggggctgcatcaggccgtggagctggttgctgtggtcatcagtatggctgcttgttcaggaagcgggagaacatggtgaaggcagcgaggggcttgtcggtgggaaccatgtggccggcgcccttgatcgtgagaaaggcgatgtgggagaactcttcacgaagccggcaatctgctccccgctgtccccgtacttcactaaccagggccggcgctgcacctccatctgccccaccaggaaagacatcagcctacagcagctgcatccttgctcacagctaccagcaagaccttagggctgggaattcctccacacttgccctctgtgggccagagccaggcagccagctggccactcccaggcatacccgctcccaatcctccacagcagcccctatcccagggccaggaatctctaccttaccttctggttgagggaatccacaaaccactcatcccccatgaaattgcaggccatgtctacatctccattatataataggatctggtatttctaaagcaggatggggtaaaaatgaggggtgtggaacaagcccagtccccagcccttccctagttcaaggcctacccctcaggaaattcaaggggccaagctagataacacgaaccagggaattttcatgttttctaacgacttactgcatgtccagtattctactaaatgttttatctgtgaaggtagatatcattattatccccattttacagatggagaacctgaggctcatatttaagaaatttgcccaagattatgtggctagtacagggacttgcacccaggccatgtgactccagagcccatgctattaaccactgtgctggacagaacctagtcctaacttggccctgccagtgcttcctatatcaccttgtgcaaggtctcctcccaccctggacctctgctggcccatttttggcatgaatgaagctcttctcacccttaagactccgtggctgatgcagacccctaggcctcctatagcaggacagcatgggtggggacaaacccaggttcaaattctgaccccaccaatcacaggaccctgggcttcgcctttcggagtttcagcttcccttgtcctgacaggaagtctcaagggcccccagcttgctgtgctactctggggtcctaaggctgctggtgatccagctgtgctctccccactcacctgtgagctaagcagcttcagatactgggagttcatgcttcggtagagacggcggtactgtaagtttaccagaaagctgccgggaacatacgagcaggccccaggaagaccaggtcggggcgaaaagtagtcaacagatcagaccttctctcctatctccaagctccaacccagaaggcagacagctgggttccactcccctttttgggggggggccacctctctaggactgacttggatgttgggctggatgggctgggattcagacagcctcaactcaccaccatttagaaaggtacagggatgctgggcgtggtggctcacgccttaatagttattaaccaatgtgatggccgggtgtggggaccctcgcctgtaatcccagcactttgggaggccaaggagggaggattgcttgagaccaagagtttgagaccaacctggacaacatagtgagaccctgtctctacaaaaaaattttttaaaaattagccaggaatggtggcatgtgcc

SEQ ID NO: 406643 - DNA, 3453 bp, Homo sapiens
ctgcccgccagaccccgtcgcccggccggatcccctgagctgcccgccatcccacgtgaccgcgccgccccccagctccaccgctgagcccgctcgccatggccctcttcggggccctcttcctagcgctgctggcaggcgcacatgcagagttcccaggctgcaagatccgcgtcacctccaaggcgctggagctggtgaagcaggaggggctgcgctttctggagcaagagctggagactatcaccattccggacctgcggggcaaagaaggccacttctactacaacatctctgaggtgaaggtcacagagctgcaactgacatcttccgagctcgatttccagccacagcaggagctgatgcttcaaatcaccaatgcctccttggggctgcgcttccggagacagctgctctactggttcttctatgatgggggctacatcaacgcctcagctgagggtgtgtccatccgcactggtctggagctctcccgggatcccgctggacggatgaaagtgtccaatgtctcctgccaggcctctgtctccagaatgcacgcggccttcgggggaaccttcaagaaggtgtatgattttctctccacgttcatcacctcagggatgcgcttcctcctcaaccagcagatctgccctgtcctctaccacgcagggacggtcctgctcaactccctcctggacaccgtgcctgtgcgcagttctgtggacgagcttgttggcattgactattccctcatgaaggatcctgtggcttccaccagcaacctggacatggacttccggggggccttcttccccctgactgagaggaactggagcctccccaaccgggcagtggagccccagctgcaggaggaagagcggatggtgtatgtggccttctctgagttcttcttcgactctgccatggagagctacttccgggcgggggccctgcagctgttgctggtgggggacaaggtgccccacgacctggacatgctgctgagggccacctactttgggagcattgtcctgctgagcccagcagtgattgactccccattgaagctggagctgcgggtcctggccccaccgcgctgcaccatcaagccctctggcaccaccatctctgtcactgctagcgtcaccattgccctggtcccaccagaccagcctgaggtccagctgtccagcatgactatggacgcccgtctcagcgccaagatggctctccgggggaaggccctgcgcacgcagctggacctgcgcaggttccgaatctattccaaccattctgcactggagtcgctggctctgatcccattacaggcccctctgaagaccatgctgcagattggggtgatgcccatgctcaatgagcggacctggcgtggggtgcagatcccactacctgagggcatcaactttgtgcatgaggtggtgacgaaccatgcgggattcctcaccatcggggctgatctccactttgccaaagggctgcgagaggtgattgagaagaaccggcctgctgatgtcagggcgtccactgcccccacaccgtccacagcagctgtctgagccctcaatccccaagctggcagctgtcattcaggaccccaacccctctcagcccctcttttcccacattcatagcctgtagtgccccctctaacccccagtgccacagagaagacgggatttgaagctgtacccaatttaattccataatcaatctatcaattacagtccgtccaccacctccctgtgggctgtcctgagctctgttgggttcctgggatggaatcagtgcatcataaagggcattctttaagcagagaaggggccaggccaccccattcaggaactgctgcgggaataaagtgctaacttgcccccaggctgtctatgggagaccctgggcccagtctgggatgtacagggctctgggaagggggcagtcctggcggcagaacccggcctgcaggggcactttgcttagaagaggactctcctagcgggagaggctgggaggggctgcatcaggccgtggagctggttgctgtggtcatcagtatggctgcttgttcaggaagcgggagaacatggtgaaggcagcgaggggcttgtcggtgggaaccatgtggccggcgcccttgatcgtgagaaaggcgatgtgggagaactcttcacgaagccggcaatctgctccccgctgtccccgtacttcactaaccagggccggcgctgcacctccatcttctggttgagggaatccacaaaccactcatcccccatgaaattgcaggccatgtctacatctccattatataataggatctggtatttctaaagcaggatggggtaaaaatgaggggtgtggaacaagcccagtccccagcccttccctagttcaaggcctacccctcaggaaattcaaggggccaagctagataacacgaaccagggaattttcatgttttctaacgacttactgcatgtccagtattctactaaatgttttatctgtgaaggtagatatcattattatccccattttacagatggagaacctgaggctcatatttaagaaatttgcccaagattatgtggctagtacagggacttgcacccaggccatgtgactccagagcccatgctattaaccactgtgctggacagaacctagtcctaacttggccctgccagtgcttcctatatcaccttgtgcaaggtctcctcccaccctggacctctgctggcccatttttggcatgaatgaagctcttctcacccttaagactccgtggctgatgcagacccctaggcctcctatagcaggacagcatgggtggggacaaacccaggttcaaattctgaccccaccaatcacaggaccctgggcttcgcctttcggagtttcagcttcccttgtcctgacaggaagtctcaagggcccccagcttgctgtgctactctggggtcctaaggctgctggtgatccagctgtgctctccccactcacctgtgagctaagcagcttcagatactgggagttcatgcttcggtagagacggcggtactgtaagtttaccagaaagctgccgggaacatacgagcaggccccaggaagaccaggtcggggcgaaaagtagtcaacagatcagaccttctctcctatctccaagctccaacccagaaggcagacagctgggttccactcccctttttgggggggggccacctctctaggactgacttggatgttgggctggatgggctgggattcagacagcctcaactcaccaccatttagaaaggtacagggatgctgggcgtggtggctcacgcctgtaatcctagcactttgggagaccgaggtgagtggatcacgaggtcaggagttcgagaccagcctgaccaacatggtgaaaccccgtctctactaaaaaaa

SEQ ID NO: 406644 - DNA, 2788 bp, Homo sapiens
ctgcccgccagaccccgtcgcccggccggatcccctgagctgcccgccatcccacgtgaccgcgccgccccccagctccaccgctgagcccgctcgccatggccctcttcggggccctcttcctagcgctgctggcaggcgcacatgcagagttcccaggctgcaagatccgcgtcacctccaaggcgctggagctggtgaagcaggaggggctgcgctttctggagcaagagctggagactatcaccattccggacctgcggggcaaagaaggccacttctactacaacatctctgaggtgaaggtcacagagctgcaactgacatcttccgagctcgatttccagccacagcaggagctgatgcttcaaatcaccaatgcctccttggggctgcgcttccggagacagctgctctactggttcttctatgatgggggctacatcaacgcctcagctgagggtgtgtccatccgcactggtctggagctctcccgggatcccgctggacggatgaaagtgtccaatgtctcctgccaggcctctgtctccagaatgcacgcggccttcgggggaaccttcaagaaggtgtatgattttctctccacgttcatcacctcagggatgcgcttcctcctcaaccagcagatctgccctgtcctctaccacgcagggacggtcctgctcaactccctcctggacaccgtgcctgtgcgcagttctgtggacgagcttgttggcattgactattccctcatgaaggatcctgtggcttccaccagcaacctggacatggacttccggggggccttcttccccctgactgagaggaactggagcctccccaaccgggcagtggagccccagctgcaggaggaagagcggatggtgtatgtggccttctctgagttcttcttcgactctgccatggagagctacttccgggcgggggccctgcagctgttgctggtgggggacaaggtgccccacgacctggacatgctgctgagggccacctactttgggagcattgtcctgctgagcccagcagtgattgactccccattgaagctggagctgcgggtcctggccccaccgcgctgcaccatcaagccctctggcaccaccatctctgtcactgctagcgtcaccattgccctggtcccaccagaccagcctgaggtccagctgtccagcatgactatggacgcccgtctcagcgccaagatggctctccgggggaaggccctgcgcacgcagctggacctgcgcaggttccgaatctattccaaccattctgcactggagtcgctggctctgatcccattacaggcccctctgaagaccatgctgcagattggggtgatgcccatgctcaatgagcggacctggcgtggggtgcagatcccactacctgagggcatcaactttgtgcatgaggtggtgacgaaccatgcgggattcctcaccatcggggctgatctccactttgccaaagggctgcgagaggtgattgagaagaaccggcctgctgatgtcagggcgtccactgcccccacaccgtccacagcagctgtctgagccctcaatccccaagctggcagctgtcattcaggaccccaacccctctcagcccctcttttcccacattcatagcctgtagtgccccctctaacccccagtgccacagagaagacgggatttgaagctgtacccaatttaattccataatcaatctatcaattacagtccgtccaccacctccctgtgggctgtcctgagctctgttgggttcctgggatggaatcagtgcatcataaagggcattctttaagcagagaaggggccaggccaccccattcaggaactgctgcgggaataaagtgctaacttgcccccaggctgtctatgggagaccctgggcccagtctgggatgtacagggctctgggaagggggcagtcctggcggcagaacccggcctgcaggggcactttgcttagaagaggactctcctagcgggagaggctgggaggggctgcatcaggccgtggagctggttgctgtggtcatcagtatggctgcttgttcaggaagcgggagaacatggtgaaggcagcgaggggcttgtcggtgggaaccatgtggccggcgcccttgatcgtgagaaaggcgatgtgggagaactcttcacgaagccggcaatctgctccccgctgtccccgtacttcactaaccagggccggcgctgcacctccatctgccccaccaggaaagacatcagcctacagcagctgcatccttgctcacagctaccagcaagaccttagggctgggaattcctccacacttgccctctgtgggccagagccaggcagccagctggccactcccaggcatacccgctcccaatcctccacagcagcccctatcccagggccaggaatctctaccttaccttctggttgagggaatccacaaaccactcatcccccatgaaattgcaggccatgtctacatctccattatataataggatctggtatttctaaagcaggatggggtaaaaatgaggggtgtggaacaagcccagtccccagcccttccctagttcaaggcctacccctcaggaaattcaaggggccaagctagataacacgaaccagggaattttcatgttttctaacgacttactgcatgtccagcacagtggttaatagcatgggctctggagtcacatggcctgggtgcaagtcctgtactagccacataatctggtacgagctgata

SEQ ID NO: 406645 - DNA, 2955 bp, Homo sapiens
ctgcccgccagaccccgtcgcccggccggatcccctgagctgcccgccatcccacgtgaccgcgccgccccccagctccaccgctgagcccgctcgccatggccctcttcggggccctcttcctagcgctgctggcaggcgcacatgcagagttcccaggctgcaagatccgcgtcacctccaaggcgctggagctggtgaagcaggaggggctgcgctttctggagcaagagctggagactatcaccattccggacctgcggggcaaagaaggccacttctactacaacatctctgaggtgaaggtcacagagctgcaactgacatcttccgagctcgatttccagccacagcaggagctgatgcttcaaatcaccaatgcctccttggggctgcgcttccggagacagctgctctactggttcttctatgatgggggctacatcaacgcctcagctgagggtgtgtccatccgcactggtctggagctctcccgggatcccgctggacggatgaaagtgtccaatgtctcctgccaggcctctgtctccagaatgcacgcggccttcgggggaaccttcaagaaggtgtatgattttctctccacgttcatcacctcagggatgcgcttcctcctcaaccagcagatctgccctgtcctctaccacgcagggacggtcctgctcaactccctcctggacaccgtgcctgtgcgcagttctgtggacgagcttgttggcattgactattccctcatgaaggatcctgtggcttccaccagcaacctggacatggacttccggggggccttcttccccctgactgagaggaactggagcctccccaaccgggcagtggagccccagctgcaggaggaagagcggatggtgtatgtggccttctctgagttcttcttcgactctgccatggagagctacttccgggcgggggccctgcagctgttgctggtgggggacaaggtgccccacgacctggacatgctgctgagggccacctactttgggagcattgtcctgctgagcccagcagtgattgactccccattgaagctggagctgcgggtcctggccccaccgcgctgcaccatcaagccctctggcaccaccatctctgtcactgctagcgtcaccattgccctggtcccaccagaccagcctgaggtccagctgtccagcatgactatggacgcccgtctcagcgccaagatggctctccgggggaaggccctgcgcacgcagctggacctgcgcaggttccgaatctattccaaccattctgcactggagtcgctggctctgatcccattacaggcccctctgaagaccatgctgcagattggggtgatgcccatgctcaatgagcggacctggcgtggggtgcagatcccactacctgagggcatcaactttgtgcatgaggtggtgacgaaccatgcgggattcctcaccatcggggctgatctccactttgccaaagggctgcgagaggtgattgagaagaaccggcctgctgatgtcagggcgtccactgcccccacaccgtccacagcagctgtctgagccctcaatccccaagctggcagctgtcattcaggaccccaacccctctcagcccctcttttcccacattcatagcctgtagtgccccctctaacccccagtgccacagagaagacgggatttgaagctgtacccaatttaattccataatcaatctatcaattacagtccgtccaccacctccctgtgggctgtcctgagctctgttgggttcctgggatggaatcagtgcatcataaagggcattctttaagcagagaaggggccaggccaccccattcaggaactgctgcgggaataaagtgctaacttgcccccaggctgtctatgggagaccctgggcccagtctgggatgtacagggctctgggaagggggcagtcctggcggcagaacccggcctgcaggggcactttgcttagaagaggactctcctagcgggagaggctgggaggggctgcatcaggccgtggagctggttgctgtggtcatcagtatggctgcttgttcaggaagcgggagaacatggtgaaggcagcgaggggcttgtcggtgggaaccatgtggccggcgcccttgatcgtgagaaaggcgatgtgggagaactcttcacgaagccggcaatctgctccccgctgtccccgtacttcactaaccagggccggcgctgcacctccatctgccccaccaggaaagacatcagcctacagcagctgcatccttgctcacagctaccagcaagaccttagggctgggaattcctccacacttgccctctgtgggccagagccaggcagccagctggccactcccaggcatacccgctcccaatcctccacagcagcccctatcccagggccaggaatctctaccttaccttctggttgagggaatccacaaaccactcatcccccatgaaattgcaggccatgtctacatctccattatataataggatctggtatttctgtgagctaagcagcttcagatactgggagttcatgcttcggtagagacggcggtactgtaagtttaccagaaagttgcacatgtcccattgtggcagctgctccgggatgttgagggccttccgcacgtacgggttgttgaggtaggtggaagcagctgttgtgttggtgcagggggggtccatgcgcactttgcttagaagaggactctcctagcgggagaggctgggaggggctgcatcaggccgtggagctggttgctgtggtcatcagtatggctgcttgttcaggaagcgggagaacatggtgaaggcagcgaggggcttgtcggtgggaaccatgtggccggcgcccttgatcgtgagaaaggcgatgtgggagaacgccttcacgagctgcaatctgtcc

SEQ ID NO: 406646 - DNA, 1789 bp, Homo sapiens
ctgcccgccagaccccgtcgcccggccggatcccctgagctgcccgccatcccacgtgaccgcgccgccccccagctccaccgctgagcccgctcgccatggccctcttcggggccctcttcctagcgctgctggcaggcgcacatgcagagttcccaggctgcaagatccgcgtcacctccaaggcgctggagctggtgaagcaggaggggctgcgctttctggagcaagagctggagactatcaccattccggacctgcggggcaaagaaggccacttctactacaacatctctgaggtgaaggtcacagagctgcaactgacatcttccgagctcgatttccagccacagcaggagctgatgcttcaaatcaccaatgcctccttggggctgcgcttccggagacagctgctctactggttcttctatgatgggggctacatcaacgcctcagctgagggtgtgtccatccgcactggtctggagctctcccgggatcccgctggacggatgaaagtgtccaatgtctcctgccaggcctctgtctccagaatgcacgcggccttcgggggaaccttcaagaaggtgtatgattttctctccacgttcatcacctcagggatgcgcttcctcctcaaccagcagatctgccctgtcctctaccacgcagggacggtcctgctcaactccctcctggacaccgtgcctgtgcgcagttctgtggacgagcttgttggcattgactattccctcatgaaggatcctgtggcttccaccagcaacctggacatggacttccggggggccttcttccccctgactgagaggaactggagcctccccaaccgggcagtggagccccagctgcaggaggaagagcggatggtgtatgtggccttctctgagttcttcttcgactctgccatggagagctacttccgggcgggggccctgcagctgttgctggtgggggacaaggtgccccacgacctggacatgctgctgagggccacctactttgggagcattgtcctgctgagcccagcagtgattgactccccattgaagctggagctgcgggtcctggccccaccgcgctgcaccatcaagccctctggcaccaccatctctgtcactgctagcgtcaccattgccctggtcccaccagaccagcctgaggtccagctgtccagcatgactatggacgcccgtctcagcgccaagatggctctccgggggaaggccctgcgcacgcagctggacctgcgcaggttccgaatctattccaaccattctgcactggagtcgctggctctgatcccattacaggcccctctgaagaccatgctgcagattggggtgatgcccatgctcaatgagcggacctggcgtggggtgcagatcccactacctgagggcatcaactttgtgcatgaggtggtgacgaaccatgcgggattcctcaccatcggggctgatctccactttgccaaagggctgcgagaggtgattgagaagaaccggcctgctgatgtcagggcgtccactgcccccacaccgtccacagcagctgtctgagccctcaatccccaagctggcagctgtcattcaggaccccaacccctctcagcccctcttttcccacattcatagcctgtagtgccccctctaacccccagtgccacagagaagacgggatttgaagctgtacccaatttaattccataatcaatctatcaattacagtccgtccaccacctccctgtgggctgtcctgagctctgttg

SEQ ID NO: 406647 - DNA, 2212 bp, Homo sapiens
ctgcccgccagaccccgtcgcccggccggatcccctgagctgcccgccatcccacgtgaccgcgccgccccccagctccaccgctgagcccgctcgccatggccctcttcggggccctcttcctagcgctgctggcaggcgcacatgcagagttcccaggctgcaagatccgcgtcacctccaaggcgctggagctggtgaagcaggaggggctgcgctttctggagcaagagctggagactatcaccattccggacctgcggggcaaagaaggccacttctactacaacatctctgaggtgaaggtcacagagctgcaactgacatcttccgagctcgatttccagccacagcaggagctgatgcttcaaatcaccaatgcctccttggggctgcgcttccggagacagctgctctactggttcttctatgatgggggctacatcaacgcctcagctgagggtgtgtccatccgcactggtctggagctctcccgggatcccgctggacggatgaaagtgtccaatgtctcctgccaggcctctgtctccagaatgcacgcggccttcgggggaaccttcaagaaggtgtatgattttctctccacgttcatcacctcagggatgcgcttcctcctcaaccagcagatctgccctgtcctctaccacgcagggacggtcctgctcaactccctcctggacaccgtgcctgtgcgcagttctgtggacgagcttgttggcattgactattccctcatgaaggatcctgtggcttccaccagcaacctggacatggacttccggggggccttcttccccctgactgagaggaactggagcctccccaaccgggcagtggagccccagctgcaggaggaagagcggatggtgtatgtggccttctctgagttcttcttcgactctgccatggagagctacttccgggcgggggccctgcagctgttgctggtgggggacaaggtgccccacgacctggacatgctgctgagggccacctactttgggagcattgtcctgctgagcccagcagtgattgactccccattgaagctggagctgcgggtcctggccccaccgcgctgcaccatcaagccctctggcaccaccatctctgtcactgctagcgtcaccattgccctggtcccaccagaccagcctgaggtccagctgtccagcatgactatggacgcccgtctcagcgccaagatggctctccgggggaaggccctgcgcacgcagctggacctgcgcaggttccgaatctattccaaccattctgcactggagtcgctggctctgatcccattacaggcccctctgaagaccatgctgcagattggggtgatgcccatgctcaatgagcggacctggcgtggggtgcagatcccactacctgagggcatcaactttgtgcatgaggtggtgacgaaccatgcgggattcctcaccatcggggctgatctccactttgccaaagggctgcgagaggtgattgagaagaaccggcctgctgatgtcagggcgtccactgcccccacaccgtccacagcagctgtctgagccctcaatccccaagctggcagctgtcattcaggaccccaacccctctcagcccctcttttcccacattcatagcctgtagtgccccctctaacccccagtgccacagagaagacgggatttgaagctgtacccaatttaattccataatcaatctatcaattacagtccgtccaccacctccctgtgggctgtcctgagctctgttgggttcctgggatggaatcagtgcatcataaagggcattctttaagcagagaaggggccaggccaccccattcaggaactgctgcgggaataaagtgctaacttgcccccaggctgtctatgggagaccctgggcccagtctgggatgtacagggctctgggaagggggcagtcctggcggcagaacccggcctgcaggggcactttgcttagaagaggactctcctagcgggagaggctgggaggggctgcatcaggccgtggagctggttgctgtggtcatcagtatggctgcttgttcaggaagcgggagaacatggtgaaggcagcgaggggcttgtcggtgggaaccatgtggccggcgcctgatcgtgagacaggcgatggtgggcagaacataagggtgggtcagagcatgcggtag

SEQ ID NO: 406648 - DNA, 4367 bp, Homo sapiens
ctgcccgccagaccccgtcgcccggccggatcccctgagctgcccgccatcccacgtgaccgcgccgccccccagctccaccgctgagtgagttggggcgcgtccctatcccgttcccagtccctcgccgagccgcgtggtgcactgaagccggcgtggggaggagagccgatgaaggagaacgctaacatgggggctccaggcagaatctctaatgggagagatttaggacctgagggagccgggagacccgggagcccacggtctggtcggccacctcctctcctccccgggcgcgaggcctaggagaccgcaagccaccctccaagaatgcgcgtgcagtcgttgccgtggcaacgtgcaagcctgcatgggcccaccgctaaaggaaaggggaggttgttgggggtgtgggggctggtcccctggaggtccaaactcatcacgcggcggtagcacgagggaactgggaacgtcccctcccccgtgtcccaaatcctctgggagccagaacgcaagtcgcatcgcctctctgagcctcagtttccacatctgccatatggaggcaagattattggttccaagttccccgaagagttatctggagggtaacgatccaggctagttcccacttatggttggacgtccaaggaatgggtttaagcggctcagataactcctgcgaccccaccccacccccaggcccgctcgccatggccctcttcggggccctcttcctagcgctgctggcaggcgcacatgcagagttcccaggctgcaagatccgcgtcacctccaaggcgctggagctgggtaaggcgcaggggcagacagggacggacgggagcggacggggttggggtcgccccaacagtgggcacgggagctaagtaagggtttctctgctgcttcagtgaagcaggaggggctgcgctttctggagcaagagctggagactatcaccattccggacctgcggggcaaagaaggccacttctactacaacatctctgaggtgaaggtcacagagctgcaactgacatcttccgagctcgatttccagccacagcaggagctgatgcttcaaatcaccaatgcctccttggggctgcgcttccggagacagctgctctactggttcttctatgatgggggctacatcaacgcctcagctgagggtgtgtccatccgcactggtctggagctctcccgggatcccgctggacggatgaaagtgtccaatgtctcctgccaggcctctgtctccagaatgcacgcggccttcgggggaaccttcaagaaggtgtatgattttctctccacgttcatcacctcagggatgcgcttcctcctcaaccagcagatctgccctgtcctctaccacgcagggacggtcctgctcaactccctcctggacaccgtgcctgtgcgcagttctgtggacgagcttgttggcattgactattccctcatgaaggatcctgtggcttccaccagcaacctggacatggacttccggggggccttcttccccctgactgagaggaactggagcctccccaaccgggcagtggagccccagctgcaggaggaagagcggatggtgtatgtggccttctctgagttcttcttcgactctgccatggagagctacttccgggcgggggccctgcagctgttgctggtgggggacaaggtgccccacgacctggacatgctgctgagggccacctactttgggagcattgtcctgctgagcccagcagtgattgactccccattgaagctggagctgcgggtcctggccccaccgcgctgcaccatcaagccctctggcaccaccatctctgtcactgctagcgtcaccattgccctggtcccaccagaccagcctgaggtccagctgtccagcatgactatggacgcccgtctcagcgccaagatggctctccgggggaaggccctgcgcacgcagctggacctgcgcaggttccgaatctattccaaccattctgcactggagtcgctggctctgatcccattacaggcccctctgaagaccatgctgcagattggggtgatgcccatgctcaatgagcggacctggcgtggggtgcagatcccactacctgagggcatcaactttgtgcatgaggtggtgacgaaccatgcgggattcctcaccatcggggctgatctccactttgccaaagggctgcgagaggtgattgagaagaaccggcctgctgatgtcagggcgtccactgcccccacaccgtccacagcagctgtctgagccctcaatccccaagctggcagctgtcattcaggaccccaacccctctcagcccctcttttcccacattcatagcctgtagtgccccctctaacccccagtgccacagagaagacgggatttgaagctgtacccaatttaattccataatcaatctatcaattacagtccgtccaccacctccctgtgggctgtcctgagctctgttgggttcctgggatggaatcagtgcatcataaagggcattctttaagcagagaaggggccaggccaccccattcaggaactgctgcgggaataaagtgctaacttgcccccaggctgtctatgggagaccctgggcccagtctgggatgtacagggctctgggaagggggcagtcctggcggcagaacccggcctgcaggggcactttgcttagaagaggactctcctagcgggagaggctgggaggggctgcatcaggccgtggagctggttgctgtggtcatcagtatggctgcttgttcaggaagcgggagaacatggtgaaggcagcgaggggcttgtcggtgggaaccatgtggccggcgcccttgatcgtgagaaaggcgatgtgggagaactcttcacgaagccggcaatctgctccccgctgtccccgtacttcactaaccagggccggcgctgcacctccatctgccccaccaggaaagacatcagcctacagcagctgcatccttgctcacagctaccagcaagaccttagggctgggaattcctccacacttgccctctgtgggccagagccaggcagccagctggccactcccaggcatacccgctcccaatcctccacagcagcccctatcccagggccaggaatctctaccttaccttctggttgagggaatccacaaaccactcatcccccatgaaattgcaggccatgtctacatctccattatataataggatctggtatttctaaagcaggatggggtaaaaatgaggggtgtggaacaagcccagtccccagcccttccctagttcaaggcctacccctcaggaaattcaaggggccaagctagataacacgaaccagggaattttcatgttttctaacgacttactgcatgtccagtattctactaaatgttttatctgtgaaggtagatatcattattatccccattttacagatggagaacctgaggctcatatttaagaaatttgcccaagattatgtggctagtacagggacttgcacccaggccatgtgactccagagcccatgctattaaccactgtgctggacagaacctagtcctaacttggccctgccagtgcttcctatatcaccttgtgcaaggtctcctcccaccctggacctctgctggcccatttttggcatgaatgaagctcttctcacccttaagactccgtggctgatgcagacccctaggcctcctatagcaggacagcatgggtggggacaaacccaggttcaaattctgaccccaccaatcacaggaccctgggcttcgcctttcggagtttcagcttcccttgtcctgacaggaagtctcaagggcccccagcttgctgtgctactctggggtcctaaggctgctggtgatccagctgtgctctccccactcacctgtgagctaagcagcttcagatactgggagttcatgcttcggtagagacggcggtactgtaagtttaccagaaagctgccgggaacatacgagcaggccccaggaagaccaggtcggggcgaaaagtagtcaacagatcagaccttctctcctatctccaagctccaacccagaaggcagacagctgggttccactcccctttttgggggggggccacctctctaggactgacttggatgttgggctggatgggctgggattcagacagcctcaactcaccaccatttagaaaggtacagggatgctgggcgtggtggctcacgcctgtaatcctagcactttgggagaccgaggtgagtggatcacgaggtcaggagttcgagaccagcctgaccaacatggtgaaaccccgtctctactaaaaaaa

SEQ ID NO: 406649 - DNA, 1842 bp, Homo sapiens
ctgcccgccagaccccgtcgcccggccggatcccctgagctgcccgccatcccacgtgaccgcgccgccccccagctccaccgctgagcccgctcgccatggccctcttcggggccctcttcctagcgctgctggcaggcgcacatgcagagttcccaggctgcaagatccgcgtcacctccaaggcgctggagctggtgaagcaggaggggctgcgctttctggagcaagagctggagactatcaccattccggacctgcggggcaaagaaggccacttctactacaacatctctgaggtgaaggtcacagagctgcaactgacatcttccgagctcgatttccagccacagcaggagctgatgcttcaaatcaccaatgcctccttggggctgcgcttccggagacagctgctctactggttcttctatgatgggggctacatcaacgcctcagctgagggtgtgtccatccgcactggtctggagctctcccgggatcccgctggacggatgaaagtgtccaatgtctcctgccaggcctctgtctccagaatgcacgcggccttcgggggaaccttcaagaaggtgtatgattttctctccacgttcatcacctcagggatgcgcttcctcctcaaccagcagatctgccctgtcctctaccacgcagggacggtcctgctcaactccctcctggacaccgtgcctgtgcgcagttctgtggacgagcttgttggcattgactattccctcatgaaggatcctgtggcttccaccagcaacctggacatggacttccggggggccttcttccccctgactgagaggaactggagcctccccaaccgggcagtggagccccagctgcaggaggaagagcggatggtgtatgtggccttctctgagttcttcttcgactctgccatggagagctacttccgggcgggggccctgcagctgttgctggtgggggacaaggtgccccacgacctggacatgctgctgagggccacctactttgggagcattgtcctgctgagcccagcagtgattgactccccattgaagctggagctgcgggtcctggccccaccgcgctgcaccatcaagccctctggcaccaccatctctgtcactgctagcgtcaccattgccctggtcccaccagaccagcctgaggtccagctgtccagcatgactatggacgcccgtctcagcgccaagatggctctccgggggaaggccctgcgcacgcagctggacctgcgcaggttccgaatctattccaaccattctgcactggagtcgctggctctgatcccattacaggcccctctgaagaccatgctgcagattggggtgatgcccatgctcaatgagcggacctggcgtggggtgcagatcccactacctgagggcatcaactttgtgcatgaggtggtgacgaaccatgcgggattcctcaccatcggggctgatctccactttgccaaagggctgcgagaggtgattgagaagaaccggcctgctgatgtcagggcgtccactgcccccacaccgtccacagcagctgtctgagccctcaatccccaagctggcagctgtcattcaggaccccaacccctctcagcccctcttttcccacattcatagcctgtagtgccccctctaacccccagtgccacagagaagacgggatttgaagctgtacccaatttaattccataatcaatctatcaattacagtccgtccaccacctccctgtgggctgtcctgagctctgttgagggcagctctcatgccgggatcctgctatggatcgtctatatatacaggctt

SEQ ID NO: 406650 - DNA, 3487 bp, Homo sapiens
ggacaatggaagaattcattccacccactcccgcttccccaggcctggacttgaaaggggagcagacaaatttcctgtcgttgggggaagttccctcttcttggccctggatctgaccctgaggcctcctgtagggtgaaggtcacagagctgcaactgacatcttccgagctcgatttccagccacagcaggagctgatgcttcaaatcaccaatgcctccttggggctgcgcttccggagacagctgctctactggttcttctatgatgggggctacatcaacgcctcagctgagggtgtgtccatccgcactggtctggagctctcccgggatcccgctggacggatgaaagtgtccaatgtctcctgccaggcctctgtctccagaatgcacgcggccttcgggggaaccttcaagaaggtgtatgattttctctccacgttcatcacctcagggatgcgcttcctcctcaaccagcagatctgccctgtcctctaccacgcagggacggtcctgctcaactccctcctggacaccgtgcctgtgcgcagttctgtggacgagcttgttggcattgactattccctcatgaaggatcctgtggcttccaccagcaacctggacatggacttccggggggccttcttccccctgactgagaggaactggagcctccccaaccgggcagtggagccccagctgcaggaggaagagcggatggtgtatgtggccttctctgagttcttcttcgactctgccatggagagctacttccgggcgggggccctgcagctgttgctggtgggggacaaggtgccccacgacctggacatgctgctgagggccacctactttgggagcattgtcctgctgagcccagcagtgattgactccccattgaagctggagctgcgggtcctggccccaccgcgctgcaccatcaagccctctggcaccaccatctctgtcactgctagcgtcaccattgccctggtcccaccagaccagcctgaggtccagctgtccagcatgactatggacgcccgtctcagcgccaagatggctctccgggggaaggccctgcgcacgcagctggacctgcgcaggttccgaatctattccaaccattctgcactggagtcgctggctctgatcccattacaggcccctctgaagaccatgctgcagattggggtgatgcccatgctcaatgagcggacctggcgtggggtgcagatcccactacctgagggcatcaactttgtgcatgaggtggtgacgaaccatgcgggattcctcaccatcggggctgatctccactttgccaaagggctgcgagaggtgattgagaagaaccggcctgctgatgtcagggcgtccactgcccccacaccgtccacagcagctgtctgagccctcaatccccaagctggcagctgtcattcaggaccccaacccctctcagcccctcttttcccacattcatagcctgtagtgccccctctaacccccagtgccacagagaagacgggatttgaagctgtacccaatttaattccataatcaatctatcaattacagtccgtccaccacctccctgtgggctgtcctgagctctgttgggttcctgggatggaatcagtgcatcataaagggcattctttaagcagagaaggggccaggccaccccattcaggaactgctgcgggaataaagtgctaacttgcccccaggctgtctatgggagaccctgggcccagtctgggatgtacagggctctgggaagggggcagtcctggcggcagaacccggcctgcaggggcactttgcttagaagaggactctcctagcgggagaggctgggaggggctgcatcaggccgtggagctggttgctgtggtcatcagtatggctgcttgttcaggaagcgggagaacatggtgaaggcagcgaggggcttgtcggtgggaaccatgtggccggcgcccttgatcgtgagaaaggcgatgtgggagaactcttcacgaagccggcaatctgctccccgctgtccccgtacttcactaaccagggccggcgctgcacctccatctgccccaccaggaaagacatcagcctacagcagctgcatccttgctcacagctaccagcaagaccttagggctgggaattcctccacacttgccctctgtgggccagagccaggcagccagctggccactcccaggcatacccgctcccaatcctccacagcagcccctatcccagggccaggaatctctaccttaccttctggttgagggaatccacaaaccactcatcccccatgaaattgcaggccatgtctacatctccattatataataggatctggtatttctaaagcaggatggggtaaaaatgaggggtgtggaacaagcccagtccccagcccttccctagttcaaggcctacccctcaggaaattcaaggggccaagctagataacacgaaccagggaattttcatgttttctaacgacttactgcatgtccagtattctactaaatgttttatctgtgaaggtagatatcattattatccccattttacagatggagaacctgaggctcatatttaagaaatttgcccaagattatgtggctagtacagggacttgcacccaggccatgtgactccagagcccatgctattaaccactgtgctggacagaacctagtcctaacttggccctgccagtgcttcctatatcaccttgtgcaaggtctcctcccaccctggacctctgctggcccatttttggcatgaatgaagctcttctcacccttaagactccgtggctgatgcagacccctaggcctcctatagcaggacagcatgggtggggacaaacccaggttcaaattctgaccccaccaatcacaggaccctgggcttcgcctttcggagtttcagcttcccttgtcctgacaggaagtctcaagggcccccagcttgctgtgctactctggggtcctaaggctgctggtgatccagctgtgctctccccactcacctgtgagctaagcagcttcagatactgggagttcatgcttcggtagagacggcggtactgtaagtttaccagaaagctgccgggaacatacgagcaggccccaggaagaccaggtcggggcgaaaagtagtcaacagatcagaccttctctcctatctccaagctccaacccagaaggcagacagctgggttccactcccctttttgggggggggccacctctctaggactgacttggatgttgggctggatgggctgggattcagacagcctcaactcaccaccatttagaaaggtacagggatgctgggcgtggtggctcacgcctgtaatcctagcactttgggagaccgaggtgagtggatcacgaggtcaggagttcgagaccagcctgaccaacatggtgaaaccccgtctctactaaaaaaa

SEQ ID NO: 406651 - DNA, 3069 bp, Homo sapiens
cagggtggcaagggtgggcatgctctcactttgagaaggccctgactctggctcccacctcgcagatctgccctgtcctctaccacgcagggacggtcctgctcaactccctcctggacaccgtgcctgtgcgcagttctgtggacgagcttgttggcattgactattccctcatgaaggatcctgtggcttccaccagcaacctggacatggacttccggggggccttcttccccctgactgagaggaactggagcctccccaaccgggcagtggagccccagctgcaggaggaagagcggatggtgtatgtggccttctctgagttcttcttcgactctgccatggagagctacttccgggcgggggccctgcagctgttgctggtgggggacaaggtgccccacgacctggacatgctgctgagggccacctactttgggagcattgtcctgctgagcccagcagtgattgactccccattgaagctggagctgcgggtcctggccccaccgcgctgcaccatcaagccctctggcaccaccatctctgtcactgctagcgtcaccattgccctggtcccaccagaccagcctgaggtccagctgtccagcatgactatggacgcccgtctcagcgccaagatggctctccgggggaaggccctgcgcacgcagctggacctgcgcaggttccgaatctattccaaccattctgcactggagtcgctggctctgatcccattacaggcccctctgaagaccatgctgcagattggggtgatgcccatgctcaatgagcggacctggcgtggggtgcagatcccactacctgagggcatcaactttgtgcatgaggtggtgacgaaccatgcgggattcctcaccatcggggctgatctccactttgccaaagggctgcgagaggtgattgagaagaaccggcctgctgatgtcagggcgtccactgcccccacaccgtccacagcagctgtctgagccctcaatccccaagctggcagctgtcattcaggaccccaacccctctcagcccctcttttcccacattcatagcctgtagtgccccctctaacccccagtgccacagagaagacgggatttgaagctgtacccaatttaattccataatcaatctatcaattacagtccgtccaccacctccctgtgggctgtcctgagctctgttgggttcctgggatggaatcagtgcatcataaagggcattctttaagcagagaaggggccaggccaccccattcaggaactgctgcgggaataaagtgctaacttgcccccaggctgtctatgggagaccctgggcccagtctgggatgtacagggctctgggaagggggcagtcctggcggcagaacccggcctgcaggggcactttgcttagaagaggactctcctagcgggagaggctgggaggggctgcatcaggccgtggagctggttgctgtggtcatcagtatggctgcttgttcaggaagcgggagaacatggtgaaggcagcgaggggcttgtcggtgggaaccatgtggccggcgcccttgatcgtgagaaaggcgatgtgggagaactcttcacgaagccggcaatctgctccccgctgtccccgtacttcactaaccagggccggcgctgcacctccatctgccccaccaggaaagacatcagcctacagcagctgcatccttgctcacagctaccagcaagaccttagggctgggaattcctccacacttgccctctgtgggccagagccaggcagccagctggccactcccaggcatacccgctcccaatcctccacagcagcccctatcccagggccaggaatctctaccttaccttctggttgagggaatccacaaaccactcatcccccatgaaattgcaggccatgtctacatctccattatataataggatctggtatttctaaagcaggatggggtaaaaatgaggggtgtggaacaagcccagtccccagcccttccctagttcaaggcctacccctcaggaaattcaaggggccaagctagataacacgaaccagggaattttcatgttttctaacgacttactgcatgtccagtattctactaaatgttttatctgtgaaggtagatatcattattatccccattttacagatggagaacctgaggctcatatttaagaaatttgcccaagattatgtggctagtacagggacttgcacccaggccatgtgactccagagcccatgctattaaccactgtgctggacagaacctagtcctaacttggccctgccagtgcttcctatatcaccttgtgcaaggtctcctcccaccctggacctctgctggcccatttttggcatgaatgaagctcttctcacccttaagactccgtggctgatgcagacccctaggcctcctatagcaggacagcatgggtggggacaaacccaggttcaaattctgaccccaccaatcacaggaccctgggcttcgcctttcggagtttcagcttcccttgtcctgacaggaagtctcaagggcccccagcttgctgtgctactctggggtcctaaggctgctggtgatccagctgtgctctccccactcacctgtgagctaagcagcttcagatactgggagttcatgcttcggtagagacggcggtactgtaagtttaccagaaagctgccgggaacatacgagcaggccccaggaagaccaggtcggggcgaaaagtagtcaacagatcagaccttctctcctatctccaagctccaacccagaaggcagacagctgggttccactcccctttttgggggggggccacctctctaggactgacttggatgttgggctggatgggctgggattcagacagcctcaactcaccaccatttagaaaggtacagggatgctgggcgtggtggctcacgcctgtaatcctagcactttgggagaccgaggtgagtggatcacgaggtcaggagttcgagaccagcctgaccaacatggtgaaaccccgtctctactaaaaaaa

SEQ ID NO: 406652 - DNA, 1633 bp, Homo sapiens
ctgcccgccagaccccgtcgcccggccggatcccctgagctgcccgccatcccacgtgaccgcgccgccccccagctccaccgctgagcccgctcgccatggccctcttcggggccctcttcctagcgctgctggcaggcgcacatgcagagttcccaggctgcaagatccgcgtcacctccaaggcgctggagctggtgaagcaggaggggctgcgctttctggagcaagagctggagactatcaccattccggacctgcggggcaaagaaggccacttctactacaacatctctgaggtgaaggtcacagagctgcaactgacatcttccgagctcgatttccagccacagcaggagctgatgcttcaaatcaccaatgcctccttggggctgcgcttccggagacagctgctctactggttcttgaaggtgtatgattttctctccacgttcatcacctcagggatgcgcttcctcctcaaccagcagatctgccctgtcctctaccacgcagggacggtcctgctcaactccctcctggacaccgtgcctgtgcgcagttctgtggacgagcttgttggcattgactattccctcatgaaggatcctgtggcttccaccagcaacctggacatggacttccggggggccttcttccccctgactgagaggaactggagcctccccaaccgggcagtggagccccagctgcaggaggaagagcggatggtgtatgtggccttctctgagttcttcttcgactctgccatggagagctacttccgggcgggggccctgcagctgttgctggtgggggacaaggtgccccacgacctggacatgctgctgagggccacctactttgggagcattgtcctgctgagcccagcagtgattgactccccattgaagctggagctgcgggtcctggccccaccgcgctgcaccatcaagccctctggcaccaccatctctgtcactgctagcgtcaccattgccctggtcccaccagaccagcctgaggtccagctgtccagcatgactatggacgcccgtctcagcgccaagatggctctccgggggaaggccctgcgcacgcagctggacctgcgcaggttccgaatctattccaaccattctgcactggagtcgctggctctgatcccattacaggcccctctgaagaccatgctgcagattggggtgatgcccatgctcaatgagcggacctggcgtggggtgcagatcccactacctgagggcatcaactttgtgcatgaggtggtgacgaaccatgcgggattcctcaccatcggggctgatctccactttgccaaagggctgcgagaggtgattgagaagaaccggcctgctgatgtcagggcgtccactgcccccacaccgtccacagcagctgtctgagccctcaatccccaagctggcagctgtcattcaggaccccaacccctctcagcccctcttttcccacattcatagcctgtagtgccccctctaacccccagtgccacagagaagacgggatttgaagctgtacccaatttaattccataatcaatctatcaattacagtccgtccaccacctccctgtgggctgtcctgagctctgttg

SEQ ID NO: 406653 - DNA, 3274 bp, Homo sapiens
cggagactctctgtttgccaactcaaatactgtatcgcctaatgattcctggtatctactaccttccacgacttctgcagaaagttgaagatggtcattatcttctccatgtttgccatctggatcataagagtctgtatgaaccaatgcaattccattttggacacttgaagcactacaagctcctggaatatactctccctcagagtgattatgaagatttgtactgcttcctaaggtatccctgccttcctcactgtgatgtactgcaacaaaggattgactgctctcagtggtttgattcaatgctgaaccacaagtgggaatttctgtttcacttttttcaaatataggttcactgggtaaagaagaatcaaaccactgagagtctccgtcgaactagttcgacggagactctcagtcaggggggccttcttccccctgactgagaggaactggagcctccccaaccgggcagtggagccccagctgcaggaggaagagcggatggtgtatgtggccttctctgagttcttcttcgactctgccatggagagctacttccgggcgggggccctgcagctgttgctggtgggggacaaggtgccccacgacctggacatgctgctgagggccacctactttgggagcattgtcctgctgagcccagcagtgattgactccccattgaagctggagctgcgggtcctggccccaccgcgctgcaccatcaagccctctggcaccaccatctctgtcactgctagcgtcaccattgccctggtcccaccagaccagcctgaggtccagctgtccagcatgactatggacgcccgtctcagcgccaagatggctctccgggggaaggccctgcgcacgcagctggacctgcgcaggttccgaatctattccaaccattctgcactggagtcgctggctctgatcccattacaggcccctctgaagaccatgctgcagattggggtgatgcccatgctcaatgagcggacctggcgtggggtgcagatcccactacctgagggcatcaactttgtgcatgaggtggtgacgaaccatgcgggattcctcaccatcggggctgatctccactttgccaaagggctgcgagaggtgattgagaagaaccggcctgctgatgtcagggcgtccactgcccccacaccgtccacagcagctgtctgagccctcaatccccaagctggcagctgtcattcaggaccccaacccctctcagcccctcttttcccacattcatagcctgtagtgccccctctaacccccagtgccacagagaagacgggatttgaagctgtacccaatttaattccataatcaatctatcaattacagtccgtccaccacctccctgtgggctgtcctgagctctgttgggttcctgggatggaatcagtgcatcataaagggcattctttaagcagagaaggggccaggccaccccattcaggaactgctgcgggaataaagtgctaacttgcccccaggctgtctatgggagaccctgggcccagtctgggatgtacagggctctgggaagggggcagtcctggcggcagaacccggcctgcaggggcactttgcttagaagaggactctcctagcgggagaggctgggaggggctgcatcaggccgtggagctggttgctgtggtcatcagtatggctgcttgttcaggaagcgggagaacatggtgaaggcagcgaggggcttgtcggtgggaaccatgtggccggcgcccttgatcgtgagaaaggcgatgtgggagaactcttcacgaagccggcaatctgctccccgctgtccccgtacttcactaaccagggccggcgctgcacctccatctgccccaccaggaaagacatcagcctacagcagctgcatccttgctcacagctaccagcaagaccttagggctgggaattcctccacacttgccctctgtgggccagagccaggcagccagctggccactcccaggcatacccgctcccaatcctccacagcagcccctatcccagggccaggaatctctaccttaccttctggttgagggaatccacaaaccactcatcccccatgaaattgcaggccatgtctacatctccattatataataggatctggtatttctaaagcaggatggggtaaaaatgaggggtgtggaacaagcccagtccccagcccttccctagttcaaggcctacccctcaggaaattcaaggggccaagctagataacacgaaccagggaattttcatgttttctaacgacttactgcatgtccagtattctactaaatgttttatctgtgaaggtagatatcattattatccccattttacagatggagaacctgaggctcatatttaagaaatttgcccaagattatgtggctagtacagggacttgcacccaggccatgtgactccagagcccatgctattaaccactgtgctggacagaacctagtcctaacttggccctgccagtgcttcctatatcaccttgtgcaaggtctcctcccaccctggacctctgctggcccatttttggcatgaatgaagctcttctcacccttaagactccgtggctgatgcagacccctaggcctcctatagcaggacagcatgggtggggacaaacccaggttcaaattctgaccccaccaatcacaggaccctgggcttcgcctttcggagtttcagcttcccttgtcctgacaggaagtctcaagggcccccagcttgctgtgctactctggggtcctaaggctgctggtgatccagctgtgctctccccactcacctgtgagctaagcagcttcagatactgggagttcatgcttcggtagagacggcggtactgtaagtttaccagaaagctgccgggaacatacgagcaggccccaggaagaccaggtcggggcgaaaagtagtcaacagatcagaccttctctcctatctccaagctccaacccagaaggcagacagctgggttccactcccctttttgggggggggccacctctctaggactgacttggatgttgggctggatgggctgggattcagacagcctcaactcaccaccatttagaaaggtacagggatgctgggcgtggtggctcacgcctgtaatcctagcactttgggagaccgaggtgagtggatcacgaggtcaggagttcgagaccagcctgaccaacatggtgaaaccccgtctctactaaaaaaa

SEQ ID NO: 406654 - DNA, 2946 bp, Homo sapiens
ctgcccgccagaccccgtcgcccggccggatcccctgagctgcccgccatcccacgtgaccgcgccgccccccagctccaccgctgagcccgctcgccatggccctcttcggggccctcttcctagcgctgctggcaggcgcacatgcagagttcccaggctgcaagatccgcgtcacctccaaggcgctggagctggtgaagcaggaggggctgcgctttctggagcaagagctggagactatcaccattccggacctgcggggcaaagaaggccacttctactacaacatctctgaggtgaaggtcacagagctgcaactgacatcttccgagctcgatttccagccacagcaggagctgatgcttcaaatcaccaatgcctccttggggctgcgcttccggagacagctgctctactggttcttctatgatgggggctacatcaacgcctcagctgagggtgtgtccatccgcactggtctggagctctcccgggatcccgctggacggatgaaagtgtccaatgtctcctgccaggcctctgtctccagaatgcacgcggccttcgggggaaccttcaagaaggtgtatgattttctctccacgttcatcacctcagggatgcgcttcctcctcaaccagcagatctgccctgtcctctaccacgcagggacggtcctgctcaactccctcctggacaccgtgcctgtgcgcagttctgtggacgagcttgttggcattgactattccctcatgaaggatcctgtggcttccaccagcaacctggacatggacttccggggggccttcttccccctgactgagaggaactggagctccactgcccccacaccgtccacagcagctgtctgagccctcaatccccaagctggcagctgtcattcaggaccccaacccctctcagcccctcttttcccacattcatagcctgtagtgccccctctaacccccagtgccacagagaagacgggatttgaagctgtacccaatttaattccataatcaatctatcaattacagtccgtccaccacctccctgtgggctgtcctgagctctgttgggttcctgggatggaatcagtgcatcataaagggcattctttaagcagagaaggggccaggccaccccattcaggaactgctgcgggaataaagtgctaacttgcccccaggctgtctatgggagaccctgggcccagtctgggatgtacagggctctgggaagggggcagtcctggcggcagaacccggcctgcaggggcactttgcttagaagaggactctcctagcgggagaggctgggaggggctgcatcaggccgtggagctggttgctgtggtcatcagtatggctgcttgttcaggaagcgggagaacatggtgaaggcagcgaggggcttgtcggtgggaaccatgtggccggcgcccttgatcgtgagaaaggcgatgtgggagaactcttcacgaagccggcaatctgctccccgctgtccccgtacttcactaaccagggccggcgctgcacctccatctgccccaccaggaaagacatcagcctacagcagctgcatccttgctcacagctaccagcaagaccttagggctgggaattcctccacacttgccctctgtgggccagagccaggcagccagctggccactcccaggcatacccgctcccaatcctccacagcagcccctatcccagggccaggaatctctaccttaccttctggttgagggaatccacaaaccactcatcccccatgaaattgcaggccatgtctacatctccattatataataggatctggtatttctaaagcaggatggggtaaaaatgaggggtgtggaacaagcccagtccccagcccttccctagttcaaggcctacccctcaggaaattcaaggggccaagctagataacacgaaccagggaattttcatgttttctaacgacttactgcatgtccagtattctactaaatgttttatctgtgaaggtagatatcattattatccccattttacagatggagaacctgaggctcatatttaagaaatttgcccaagattatgtggctagtacagggacttgcacccaggccatgtgactccagagcccatgctattaaccactgtgctggacagaacctagtcctaacttggccctgccagtgcttcctatatcaccttgtgcaaggtctcctcccaccctggacctctgctggcccatttttggcatgaatgaagctcttctcacccttaagactccgtggctgatgcagacccctaggcctcctatagcaggacagcatgggtggggacaaacccaggttcaaattctgaccccaccaatcacaggaccctgggcttcgcctttcggagtttcagcttcccttgtcctgacaggaagtctcaagggcccccagcttgctgtgctactctggggtcctaaggctgctggtgatccagctgtgctctccccactcacctgtgagctaagcagcttcagatactgggagttcatgcttcggtagagacggcggtactgtaagtttaccagaaagctgccgggaacatacgagcaggccccaggaagaccaggtcggggcgaaaagtagtcaacagatcagaccttctctcctatctccaagctccaacccagaaggcagacagctgggttccactcccctttttgggggggggccacctctctaggactgacttggatgttgggctggatgggctgggattcagacagcctcaactcaccaccatttagaaaggtacagggatgctgggcgtggtggctcacgcctgtaatcctagcactttgggagaccgaggtgagtggatcacgaggtcaggagttcgagaccagcctgaccaacatggtgaaaccccgtctctactaaaaaaa

SEQ ID NO: 406655 - DNA, 1262 bp, Homo sapiens
ctgcccgccagaccccgtcgcccggccggatcccctgagctgcccgccatcccacgtgaccgcgccgccccccagctccaccgctgagcccgctcgccatggccctcttcggggccctcttcctagcgctgctggcaggcgcacatgcagagttcccaggctgcaagatccgcgtcacctccaaggcgctggagctggtgaagcaggaggggctgcgctttctggagcaagagctggagactatcaccattccggacctgcggggcaaagaaggccacttctactacaacatctctgaggtgaaggtcacagagctgcaactgacatcttccgagctcgatttccagccacagcaggagctgatgcttcaaatcaccaatgcctccttggggctgcgcttccggagacagctgctctactggttcttctatgatgggggctacatcaacgcctcagctgagggtgtgtccatccgcactggtctggagctctcccgggatcccgctggacggatgaaagtgtccaatgtctcctgccaggcctctgtctccagaatgcacgcggccttcgggggaaccttcaagaaggtgtatgattttctctccacgttcatcacctcagggatgcgcttcctcctcaaccagcagatctgccctgtcctctaccacgcagggacggtcctgctcaactccctcctggacaccgtgcctgtgcgcagttctgtggacgagcttgttggcattgactattccctcatgaaggatcctgtggcttccaccagcaacctggacatggacttccggggggccttcttccccctgactgagaggaactggagcctccccaaccgggcagtggagccccagctgcaggaggaagagcggatggtgtatgtggccttctctgagttcttcttcgactctgccatggagagctacttccgggcgggggccctgcagctgttgctggtgggggacaaggtgccccacgacctggacatgctgctgagggccacctactttgggagcattgtcctgctgagcccagcagtgattgactccccattgaactggcagctgtcattcaggaccccaacccctctcagcccctcttttcccacattcatagcctgtagtgccccctctaacccccagtgccacagagaagacgggatttgaagctgtacccaatttaattccataatcaatctatcaattacagtccgtccaccacctccctgtgggctgtcctgagctctgttg

SEQ ID NO: 406656 - DNA, 1084 bp, Homo sapiens
ctgcccgccagaccccgtcgcccggccggatcccctgagctgcccgccatcccacgtgaccgcgccgccccccagctccaccgctgagcccgctcgccatggccctcttcggggccctcttcctagcgctgctggcaggcgcacatgcagagttcccaggctgcaagatccgcgtcacctccaaggcgctggagctggtgaagcaggaggggctgcgctttctggagcaagagctggagactatcaccattccggacctgcggggcaaagaaggccacttctactacaacatctctgaggtgaaggtcacagagctgcaactgacatcttccgagctcgatttccagccacagcaggagctgatgcttcaaatcaccaatgcctccttggggctgcgcttccggagacagctgctctactggttcttctatgatgggggctacatcaacgcctcagctgagggtgtgtccatccgcactggtctggagctctcccgggatcccgctggacggatgaaagtgtccaatgtctcctgccaggcctctgtctccagaatgcacgcggccttcgggggaaccttcaagaaggtgtatgattttctctccacgttcatcacctcagggatgcgcttcctcctcaaccagcagatctgccctgtcctctaccacgcagggacggtcctgctcaactccctcctggacaccgtgcctgtgcgcagttctgtggacgagcttgttggcattgactattccctcatgaaggatcctgtggcttccaccagcaacctggacatggacttccggggggccttcttccccctgactgagaggaactggagctccactgcccccacaccgtccacagcagctgtctgagccctcaatccccaagctggcagctgtcattcaggaccccaacccctctcagcccctcttttcccacattcatagcctgtagtgccccctctaacccccagtgccacagagaagacgggatttgaagctgtacccaatttaattccataatcaatctatcaattacagtccgtccaccacctccctgtgggctgtcctgagctctgttg

SEQ ID NO: 406657 - DNA, 1001 bp, Homo sapiens
ctgcccgccagaccccgtcgcccggccggatcccctgagctgcccgccatcccacgtgaccgcgccgccccccagctccaccgctgagcccgctcgccatggccctcttcggggccctcttcctagcgctgctggcaggcgcacatgcagagttcccaggctgcaagatccgcgtcacctccaaggcgctggagctggtgaagcaggaggggctgcgctttctggagcaagagctggagactatcaccattccggacctgcggggcaaagaaggccacttctactacaacatctctgaggtgaaggtcacagagctgcaactgacatcttccgagctcgatttccagccacagcaggagctgatgcttcaaatcaccaatgcctccttggggctgcgcttccggagacagctgctctactggttcttctatgatgggggctacatcaacgcctcagctgagggtgtgtccatccgcactggtctggagctctcccgggatcccgctggacggatgaaagtgtccaatgtctcctgccaggcctctgtctccagaatgcacgcggccttcgggggaaccttcaagaaggtgtatgattttctctccacgttcatcacctcagggatgcgcttcctcctcaaccagcagatctgccctgtcctctaccacgcagggacggtcctgctcaactccctcctggacaccgtgcctgtgcgcagttctgtggacgagcttgttggcattgactattccctcatgaaggatcctgtggcttccaccatctctgtcactgctagcgtccatgcctggtcccacagacagctgaggtccgctgtcagctgatttgcgccgtttcggccagaaggtccggggaggccggccgcgtgctggcgtcgattttcaccttgggggtgcggtcgacctaggcctcagcgggtgggtgcccgcgggcggggggcccccggctggggggggcggcccgggcccggggggaaggggccg

SEQ ID NO: 406658 - DNA, 1290 bp, Homo sapiens
ctgcccgccagaccccgtcgcccggccggatcccctgagctgcccgccatcccacgtgaccgcgccgccccccagctccaccgctgagtgagttggggcgcgtccctatcccgttcccagtccctcgccgagccgcgtggtgcactgaagccggcgtggggaggagagccgatgaaggagaacgctaacatgggggctccaggcagaatctctaatgggagagatttaggacctgagggagccgggagacccgggagcccacggtctggtcggccacctcctctcctccccgggcgcgaggcctaggagaccgcaagccaccctccaagaatgcgcgtgcagtcgttgccgtggcaacgtgcaagcctgcatgggcccaccgctaaaggaaaggggaggttgttgggggtgtgggggctggtcccctggaggtccaaactcatcacgcggcggtagcacgagggaactgggaacgtcccctcccccgtgtcccaaatcctctgggagccagaacgcaagtcgcatcgcctctctgagcctcagtttccacatctgccatatggaggcaagattattggttccaagttccccgaagagttatctggagggtaacgatccaggctagttcccacttatggttggacgtccaaggaatgggtttaagcggctcagataactcctgcgaccccaccccacccccaggcccgctcgccatggccctcttcggggccctcttcctagcgctgctggcaggcgcacatgcagagttcccaggctgcaagatccgcgtcacctccaaggcgctggagctggtgaagcaggaggggctgcgctttctggagcaagagctggagactatcaccattccggacctgcggggcaaagaaggccacttctactacaacatctctgaggtgaaggtcacagagctgcaactgacatcttccgagctcgatttccagccacagcaggagctgatgcttcaaatcaccaatgcctccttggggctgcgcttccgaagaaccggcctgctgatgtcagggcgtccactgcccccacaccgtccacagcagctgtctgagccctcaatccccaagctggcagctgtcattcaggaccccaacccctctcagcccctcttttcccacattcatagcctgtagtgccccctctaacccccagtgccacagagaagacgggatttgaagctgtacccaatttaattccataatcaatctatcaattacagtccgtccaccacctccctgtgggctgtcctgagctctgttg

SEQ ID NO: 406659 - DNA, 217 bp, Homo sapiens
tattaacccccctggcagctatgatgggggctacatcaacgcctcagctgagggtgtgtccatccgcactggtctggagctctcccgggatcccgctggacggatgaaagtgtccaatgtctcctgccaggcctctgtctccagaatgcacgcggccttcgggggaaccttcaagtaagccccagccccaaccccagctcacccttttcgagcccca

SEQ ID NO: 406660 - DNA, 400 bp, Homo sapiens
aataataataactaacattaatgagcacctaactacacaccaggccctaagtgctttccacataaaactaatttgaccctcatgacaaccctgtgaaggatgtatcctcattttatgggtgggcctctgagcctggagaggttaagcaccttatcccacatcacacagccgtgagtgacttgagccccttcctgcagtgcgcagttctgtggacgagcttgttggcattgactattccctcatgaaggatcctgtggcttccaccagcaacctggacatggacttccgggtgagctgcttgggctggtgtatgacctctgacttcctaacaagacctctttctctgctaagttgcaagattttacttcttaaagcacagctctgatgaggccactcccat

SEQ ID NO: 406661 - DNA, 3651 bp, Homo sapiens
ctgcccgccagaccccgtcgcccggccggatcccctgagctgcccgccatcccacgtgaccgcgccgccccccagctccaccgctgagcccgctcgccatggccctcttcggggccctcttcctagcgctgctggcaggcgcacatgcagagttcccaggctgcaagatccgcgtcacctccaaggcgctggagctggtgaagcaggaggggctgcgctttctggagcaagagctggagactatcaccattccggacctgcggggcaaagaaggccacttctactacaacatctctgaggtgaaggtcacagagctgcaactgacatcttccgagctcgatttccagccacagcaggagctgatgcttcaaatcaccaatgcctccttggggctgcgcttccggagacagctgctctactggttcttctatgatgggggctacatcaacgcctcagctgagggtgtgtccatccgcactggtctggagctctcccgggatcccgctggacggatgaaagtgtccaatgtctcctgccaggcctctgtctccagaatgcacgcggccttcgggggaaccttcaagaaggtgtatgattttctctccacgttcatcacctcagggatgcgcttcctcctcaaccagcagatctgccctgtcctctaccacgcagggacggtcctgctcaactccctcctggacaccgtgcctgtgcgcagttctgtggacgagcttgttggcattgactattccctcatgaaggatcctgtggcttccaccagcaacctggacatggacttccggggggccttcttccccctgactgagaggaactggagcctccccaaccgggcagtggagccccagctgcaggaggaagagcggatggtgtatgtggccttctctgagttcttcttcgactctgccatggagagctacttccgggcgggggccctgcagctgttgctggtgggggacaaggtgccccacgacctggacatgctgctgagggccacctactttgggagcattgtcctgctgagcccagcagtgattgactccccattgaagctggagctgcgggtcctggccccaccgcgctgcaccatcaagccctctggcaccaccatctctgtcactgctagcgtcaccattgccctggtcccaccagaccagcctgaggtccagctgtccagcatgactatggacgcccgtctcagcgccaagatggctctccgggggaaggccctgcgcacgcagctggacctgcgcaggttccgaatctattccaaccattctgcactggagtcgctggctctgatcccattacaggcccctctgaagaccatgctgcagattggggtgatgcccatgctcaatgagcggacctggcgtggggtgcagatcccactacctgagggcatcaactttgtgcatgaggtggtgacgaaccatgcgggattcctcaccatcggggctgatctccactttgccaaagggctgcgagaggtgattgagaagaaccggcctgctgatgtcagggcgtccactgcccccacaccgtccacagcagctgtctgagccctcaatccccaagctggcagctgtcattcaggaccccaacccctctcagcccctcttttcccacattcatagcctgtagtgccccctctaacccccagtgccacagagaagacgggatttgaagctgtacccaatttaattccataatcaatctatcaattacagtccgtccaccacctccctgtgggctgtcctgagctctgttgggttcctgggatggaatcagtgcatcataaagggcattctttaagcagagaaggggccaggccaccccattcaggaactgctgcgggaataaagtgctaacttgcccccaggctgtctatgggagaccctgggcccagtctgggatgtacagggctctgggaagggggcagtcctggcggcagaacccggcctgcaggggcactttgcttagaagaggactctcctagcgggagaggctgggaggggctgcatcaggccgtggagctggttgctgtggtcatcagtatggctgcttgttcaggaagcgggagaacatggtgaaggcagcgaggggcttgtcggtgggaaccatgtggccggcgcccttgatcgtgagaaaggcgatgtgggagaactcttcacgaagccggcaatctgctccccgctgtccccgtacttcactaaccagggccggcgctgcacctccatctgccccaccaggaaagacatcagcctacagcagctgcatccttgctcacagctaccagcaagaccttagggctgggaattcctccacacttgccctctgtgggccagagccaggcagccagctggccactcccaggcatacccgctcccaatcctccacagcagcccctatcccagggccaggaatctctaccttaccttctggttgagggaatccacaaaccactcatcccccatgaaattgcaggccatgtctacatctccattatataataggatctggtatttctaaagcaggatggggtaaaaatgaggggtgtggaacaagcccagtccccagcccttccctagttcaaggcctacccctcaggaaattcaaggggccaagctagataacacgaaccagggaattttcatgttttctaacgacttactgcatgtccagtattctactaaatgttttatctgtgaaggtagatatcattattatccccattttacagatggagaacctgaggctcatatttaagaaatttgcccaagattatgtggctagtacagggacttgcacccaggccatgtgactccagagcccatgctattaaccactgtgctggacagaacctagtcctaacttggccctgccagtgcttcctatatcaccttgtgcaaggtctcctcccaccctggacctctgctggcccatttttggcatgaatgaagctcttctcacccttaagactccgtggctgatgcagacccctaggcctcctatagcaggacagcatgggtggggacaaacccaggttcaaattctgaccccaccaatcacaggaccctgggcttcgcctttcggagtttcagcttcccttgtcctgacaggaagtctcaagggcccccagcttgctgtgctactctggggtcctaaggctgctggtgatccagctgtgctctccccactcacctgtgagctaagcagcttcagatactgggagttcatgcttcggtagagacggcggtactgtaagtttaccagaaagctgccgggaacatacgagcaggccccaggaagaccaggtcggggcgaaaagtagtcaacagatcagaccttctctcctatctccaagctccaacccagaaggcagacagctgggttccactcccctttttgggggggggccacctctctaggactgacttggatgttgggctggatgggctgggattcagacagcctcaactcaccaccatttagaaaggtacagggatgctgggcgtggtggctcacgcctgtaatcctagcactttgggagaccgaggtgagtggatcacgaggtcaggagttcgagaccagcctgaccaacatggtgaaaccccgtctctactaaaaaaa

SEQ ID NO: 406662 - DNA, 3631 bp, Homo sapiens
ctgcccgccagaccccgtcgcccggccggatcccctgagctgcccgccatcccacgtgaccgcgccgccccccagctccaccgctgagcccgctcgccatggccctcttcggggccctcttcctagcgctgctggcaggcgcacatgcagagttcccaggctgcaagatccgcgtcacctccaaggcgctggagctggtgaagcaggaggggctgcgctttctggagcaagagctggagactatcaccattccggacctgcggggcaaagaaggccacttctactacaacatctctgaggtgaaggtcacagagctgcaactgacatcttccgagctcgatttccagccacagcaggagctgatgcttcaaatcaccaatgcctccttggggctgcgcttccggagacagctgctctactggttcttctatgatgggggctacatcaacgcctcagctgagggtgtgtccatccgcactggtctggagctctcccgggatcccgctggacggatgaaagtgtccaatgtctcctgccaggcctctgtctccagaatgcacgcggccttcgggggaaccttcaagaaggtgtatgattttctctccacgttcatcacctcagggatgcgcttcctcctcaaccagcagatctgccctgtcctctaccacgcagggacggtcctgctcaactccctcctggacaccgtgcctgtgcgcagttctgtggacgagcttgttggcattgactattccctcatgaaggatcctgtggcttccaccagcaacctggacatggacttccggggggccttcttccccctgactgagaggaactggagcctccccaaccgggcagtggagccccagctgcaggaggaagagcggatggtgtatgtggccttctctgagttcttcttcgactctgccatggagagctacttccgggcgggggccctgcagctgttgctggtgggggacaaggtgccccacgacctggacatgctgctgagggccacctactttgggagcattgtcctgctgagcccagcagtgattgactccccattgaagctggagctgcgggtcctggccccaccgcgctgcaccatcaagccctctggcaccaccatctctgtcactgctagcgtcaccattgccctggtcccaccagaccagcctgaggtccagctgtccagcatgactatggacgcccgtctcagcgccaagatggctctccgggggaaggccctgcgcacgcagctggacctgcgcaggttccgaatctattccaaccattctgcactggagtcgctggctctgatcccattacaggcccctctgaagaccatgctgcagattggggtgatgcccatgctcaatgagcggacctggcgtggggtgcagatcccactacctgagggcatcaactttgtgcatgaggtggtgacgaaccatgcgggattcctcaccatcggggctgatctccactttgccaaagggctgcgagaggtgattgagaagaaccggcctgctgatgtcagggcgtccactgcccccacaccgtccacagcagctgtctgagccctcaatccccaagctggcagctgtcattcaggaccccaacccctctcagcccctcttttcccacattcatagcctgtagtgccccctctaacccccagtgccacagagaagacgggatttgaagctgtacccaatttaattccataatcaatctatcaattacagtccgtccaccacctccctgtgggctgtcctgagctctgttgggttcctgggatggaatcagtgcatcataaagggcattctttaagcagagaaggggccaggccaccccattcaggaactgctgcgggaataaagtgctaacttgcccccaggctgtctatgggagaccctgggcccagtctgggatgtacagggctctgggaagggggcagtcctggcggcagaacccggcctgcaggggcactttgcttagaagaggactctcctagcgggagaggctgggaggggctgcatcaggccgtggagctggttgctgtggtcatcagtatggctgcttgttcaggaagcgggagaacatggtgaaggcagcgaggggcttgtcggtgggaaccatgtggccggcgcccttgatcgtgagaaaggcgatgtgggagaactcttcacgaagccggcaatctgctccccgctgtccccgtacttcactaaccagggccggcgctgcacctccatctgccccaccaggaaagacatcagcctacagcagctgcatccttgctcacagctaccagcaagaccttagggctgggaattcctccacacttgccctctgtgggccagagccaggcagccagctggccactcccaggcatacccgctcccaatcctccacagcagcccctatcccagggccaggaatctctaccttaccttctggttgagggaatccacaaaccactcatcccccatgaaattgcaggccatgtctacatctccattatataataggatctggtatttctaaagcaggatggggtaaaaatgaggggtgtggaacaagcccagtccccagcccttccctagttcaaggcctacccctcaggaaattcaaggggccaagctagataacacgaaccagggaattttcatgttttctaacgacttactgcatgtccagtattctactaaatgttttatctgtgaaggtagatatcattattatccccattttacagatggagaacctgaggctcatatttaagaaatttgcccaagattatgtggctagtacagggacttgcacccaggccatgtgactccagagcccatgctattaaccactgtgctggacagaacctagtcctaacttggccctgccagtgcttcctatatcaccttgtgcaaggtctcctcccaccctggacctctgctggcccatttttggcatgaatgaagctcttctcacccttaagactccgtggctgatgcagacccctaggcctcctatagcaggacagcatgggtggggacaaacccaggttcaaattctgaccccaccaatcacaggaccctgggcttcgcctttcggagtttcagcttcccttgtcctgacaggaagtctcaagggcccccagcttgctgtgctactctggggtcctaaggctgctggtgatccagctgtgctctccccactcacctgtgagctaagcagcttcagatactgggagttcatgcttcggtagagacggcggtactgtaagtttaccagaaagttgcacatgtcccattgtggcagctgctccgggatgttgagggccttccgcacgtacgggttgttgaggtaggtggaagcagctgttgtgttggtgcagggggggtccatgcgcactttgcttagaagaggactctcctagcgggagaggctgggaggggctgcatcaggccgtggagctggttgctgtggtcatcagtatggctgcttgttcaggaagcgggagaacatggtgaaggcagcgaggggcttgtcggtgggaaccatgtggccggcgcccttgatcgtgagaaaggcgatgtgggagaacgccttcacgagctgcaatctgtcc

SEQ ID NO: 406663 - DNA, 3550 bp, Homo sapiens
ctgcccgccagaccccgtcgcccggccggatcccctgagctgcccgccatcccacgtgaccgcgccgccccccagctccaccgctgagcccgctcgccatggccctcttcggggccctcttcctagcgctgctggcaggcgcacatgcagagttcccaggctgcaagatccgcgtcacctccaaggcgctggagctggtgaagcaggaggggctgcgctttctggagcaagagctggagactatcaccattccggacctgcggggcaaagaaggccacttctactacaacatctctgaggtgaaggtcacagagctgcaactgacatcttccgagctcgatttccagccacagcaggagctgatgcttcaaatcaccaatgcctccttggggctgcgcttccggagacagctgctctactggttcttctatgatgggggctacatcaacgcctcagctgagggtgtgtccatccgcactggtctggagctctcccgggatcccgctggacggatgaaagtgtccaatgtctcctgccaggcctctgtctccagaatgcacgcggccttcgggggaaccttcaagaaggtgtatgattttctctccacgttcatcacctcagggatgcgcttcctcctcaaccagcagatctgccctgtcctctaccacgcagggacggtcctgctcaactccctcctggacaccgtgcctgtgcgcagttctgtggacgagcttgttggcattgactattccctcatgaaggatcctgtggcttccaccagcaacctggacatggacttccggggggccttcttccccctgactgagaggaactggagcctccccaaccgggcagtggagccccagctgcaggaggaagagcggatggtgtatgtggccttctctgagttcttcttcgactctgccatggagagctacttccgggcgggggccctgcagctgttgctggtgggggacaaggtgccccacgacctggacatgctgctgagggccacctactttgggagcattgtcctgctgagcccagcagtgattgactccccattgaagctggagctgcgggtcctggccccaccgcgctgcaccatcaagccctctggcaccaccatctctgtcactgctagcgtcaccattgccctggtcccaccagaccagcctgaggtccagctgtccagcatgactatggacgcccgtctcagcgccaagatggctctccgggggaaggccctgcgcacgcagctggacctgcgcaggttccgaatctattccaaccattctgcactggagtcgctggctctgatcccattacaggcccctctgaagaccatgctgcagattggggtgatgcccatgctcaatgagcggacctggcgtggggtgcagatcccactacctgagggcatcaactttgtgcatgaggtggtgacgaaccatgcgggattcctcaccatcggggctgatctccactttgccaaagggctgcgagaggtgattgagaagaaccggcctgctgatgtcagggcgtccactgcccccacaccgtccacagcagctgtctgagccctcaatccccaagctggcagctgtcattcaggaccccaacccctctcagcccctcttttcccacattcatagcctgtagtgccccctctaacccccagtgccacagagaagacgggatttgaagctgtacccaatttaattccataatcaatctatcaattacagtccgtccaccacctccctgtgggctgtcctgagctctgttgggttcctgggatggaatcagtgcatcataaagggcattctttaagcagagaaggggccaggccaccccattcaggaactgctgcgggaataaagtgctaacttgcccccaggctgtctatgggagaccctgggcccagtctgggatgtacagggctctgggaagggggcagtcctggcggcagaacccggcctgcaggggcactttgcttagaagaggactctcctagcgggagaggctgggaggggctgcatcaggccgtggagctggttgctgtggtcatcagtatggctgcttgttcaggaagcgggagaacatggtgaaggcagcgaggggcttgtcggtgggaaccatgtggccggcgcccttgatcgtgagaaaggcgatgtgggagaactcttcacgaagccggcaatctgctccccgctgtccccgtacttcactaaccagggccggcgctgcacctccatctgccccaccaggaaagacatcagcctacagcagctgcatccttgctcacagctaccagcaagaccttagggctgggaattcctccacacttgccctcttctggttgagggaatccacaaaccactcatcccccatgaaattgcaggccatgtctacatctccattatataataggatctggtatttctaaagcaggatggggtaaaaatgaggggtgtggaacaagcccagtccccagcccttccctagttcaaggcctacccctcaggaaattcaaggggccaagctagataacacgaaccagggaattttcatgttttctaacgacttactgcatgtccagtattctactaaatgttttatctgtgaaggtagatatcattattatccccattttacagatggagaacctgaggctcatatttaagaaatttgcccaagattatgtggctagtacagggacttgcacccaggccatgtgactccagagcccatgctattaaccactgtgctggacagaacctagtcctaacttggccctgccagtgcttcctatatcaccttgtgcaaggtctcctcccaccctggacctctgctggcccatttttggcatgaatgaagctcttctcacccttaagactccgtggctgatgcagacccctaggcctcctatagcaggacagcatgggtggggacaaacccaggttcaaattctgaccccaccaatcacaggaccctgggcttcgcctttcggagtttcagcttcccttgtcctgacaggaagtctcaagggcccccagcttgctgtgctactctggggtcctaaggctgctggtgatccagctgtgctctccccactcacctgtgagctaagcagcttcagatactgggagttcatgcttcggtagagacggcggtactgtaagtttaccagaaagctgccgggaacatacgagcaggccccaggaagaccaggtcggggcgaaaagtagtcaacagatcagaccttctctcctatctccaagctccaacccagaaggcagacagctgggttccactcccctttttgggggggggccacctctctaggactgacttggatgttgggctggatgggctgggattcagacagcctcaactcaccaccatttagaaaggtacagggatgctgggcgtggtggctcacgcctgtaatcctagcactttgggagaccgaggtgagtggatcacgaggtcaggagttcgagaccagcctgaccaacatggtgaaaccccgtctctactaaaaaaa

SEQ ID NO: 406664 - DNA, 2757 bp, Homo sapiens
ctgcccgccagaccccgtcgcccggccggatcccctgagctgcccgccatcccacgtgaccgcgccgccccccagctccaccgctgagcccgctcgccatggccctcttcggggccctcttcctagcgctgctggcaggcgcacatgcagagttcccaggctgcaagatccgcgtcacctccaaggcgctggagctggtgaagcaggaggggctgcgctttctggagcaagagctggagactatcaccattccggacctgcggggcaaagaaggccacttctactacaacatctctgaggtgaaggtcacagagctgcaactgacatcttccgagctcgatttccagccacagcaggagctgatgcttcaaatcaccaatgcctccttggggctgcgcttccggagacagctgctctactggttcttctatgatgggggctacatcaacgcctcagctgagggtgtgtccatccgcactggtctggagctctcccgggatcccgctggacggatgaaagtgtccaatgtctcctgccaggcctctgtctccagaatgcacgcggccttcgggggaaccttcaagaaggtgtatgattttctctccacgttcatcacctcagggatgcgcttcctcctcaaccagcagatctgccctgtcctctaccacgcagggacggtcctgctcaactccctcctggacaccgtgcctgtgcgcagttctgtggacgagcttgttggcattgactattccctcatgaaggatcctgtggcttccaccagcaacctggacatggacttccggggggccttcttccccctgactgagaggaactggagcctccccaaccgggcagtggagccccagctgcaggaggaagagcggatggtgtatgtggccttctctgagttcttcttcgactctgccatggagagctacttccgggcgggggccctgcagctgttgctggtgggggacaaggtgccccacgacctggacatgctgctgagggccacctactttgggagcattgtcctgctgagcccagcagtgattgactccccattgaagctggagctgcgggtcctggccccaccgcgctgcaccatcaagccctctggcaccaccatctctgtcactgctagcgtcaccattgccctggtcccaccagaccagcctgaggtccagctgtccagcatgactatggacgcccgtctcagcgccaagatggctctccgggggaaggccctgcgcacgcagctggacctgcgcaggttccgaatctattccaaccattctgcactggagtcgctggctctgatcccattacaggcccctctgaagaccatgctgcagattggggtgatgcccatgctcaatgagcggacctggcgtggggtgcagatcccactacctgagggcatcaactttgtgcatgaggtggtgacgaaccatgcgggattcctcaccatcggggctgatctccactttgccaaagggctgcgagaggtgattgagaagaaccggcctgctgatgtcagggcgtccactgcccccacaccgtccacagcagctgtctgagccctcaatccccaagctggcagctgtcattcaggaccccaacccctctcagcccctcttttcccacattcatagcctgtagtgccccctctaacccccagtgccacagagaagacgggatttgaagctgtacccaatttaattccataatcaatctatcaattacagtccgtccaccacctccctgtgggctgtcctgagctctgttgggttcctgggatggaatcagtgcatcataaagggcattctttaagcagagaaggggccaggccaccccattcaggaactgctgcgggaataaagtgctaacttgcccccaggctgtctatgggagaccctgggcccagtctgggatgtacagggctctgggaagggggcagtcctggcggcagaacccggcctgcaggggcactttgcttagaagaggactctcctagcgggagaggctgggaggggctgcatcaggccgtggagctggttgctgtggtcatcagtatggctgcttgttcaggaagcgggagaacatggtgaaggcagcgaggggcttgtcggtgggaaccatgtggccggcgcccttgatcgtgagaaaggcgatgtgggagaactcttcacgaagccggcaatctgctccccgctgtccccgtacttcactaaccagggccggcgctgcacctccatcttctggttgagggaatccacaaaccactcatcccccatgaaattgcaggccatgtctacatctccattatataataggatctggtatttctgtgagctaagcagcttcagatactgggagttcatgcttcggtagagacggcggtactgtaagtttaccagaaagttgcacatgtcccattgtggcagctgctccgggatgttgagggccttccgcacgtacgggttgttgaggtaggtggaagcagctgttgtgttggtgcagggggggtccatgcgcactttgcttagaagaggactctcctagcgggagaggctgggaggggctgcatcaggccgtggagctggttgctgtggtcatcagtatggctgcttgttcaggaagcgggagaacatggtgaaggcagcgaggggcttgtcggtgggaaccatgtggccggcgcccttgatcgtgagaaaggcgatgtgggagaacgccttcacgagctgcaatctgtcc

SEQ ID NO: 406665 - DNA, 2279 bp, Homo sapiens
ctgcccgccagaccccgtcgcccggccggatcccctgagctgcccgccatcccacgtgaccgcgccgccccccagctccaccgctgagcccgctcgccatggccctcttcggggccctcttcctagcgctgctggcaggcgcacatgcagagttcccaggctgcaagatccgcgtcacctccaaggcgctggagctggtgaagcaggaggggctgcgctttctggagcaagagctggagactatcaccattccggacctgcggggcaaagaaggccacttctactacaacatctctgaggtgaaggtcacagagctgcaactgacatcttccgagctcgatttccagccacagcaggagctgatgcttcaaatcaccaatgcctccttggggctgcgcttccggagacagctgctctactggttcttctatgatgggggctacatcaacgcctcagctgagggtgtgtccatccgcactggtctggagctctcccgggatcccgctggacggatgaaagtgtccaatgtctcctgccaggcctctgtctccagaatgcacgcggccttcgggggaaccttcaagaaggtgtatgattttctctccacgttcatcacctcagggatgcgcttcctcctcaaccagcagatctgccctgtcctctaccacgcagggacggtcctgctcaactccctcctggacaccgtgcctgtgcgcagttctgtggacgagcttgttggcattgactattccctcatgaaggatcctgtggcttccaccagcaacctggacatggacttccggggggccttcttccccctgactgagaggaactggagcctccccaaccgggcagtggagccccagctgcaggaggaagagcggatggtgtatgtggccttctctgagttcttcttcgactctgccatggagagctacttccgggcgggggccctgcagctgttgctggtgggggacaaggtgccccacgacctggacatgctgctgagggccacctactttgggagcattgtcctgctgagcccagcagtgattgactccccattgaagctggagctgcgggtcctggccccaccgcgctgcaccatcaagccctctggcaccaccatctctgtcactgctagcgtcaccattgccctggtcccaccagaccagcctgaggtccagctgtccagcatgactatggacgcccgtctcagcgccaagatggctctccgggggaaggccctgcgcacgcagctggacctgcgcaggttccgaatctattccaaccattctgcactggagtcgctggctctgatcccattacaggcccctctgaagaccatgctgcagattggggtgatgcccatgctcaatgagcggacctggcgtggggtgcagatcccactacctgagggcatcaactttgtgcatgaggtggtgacgaaccatgcgggattcctcaccatcggggctgatctccactttgccaaagggctgcgagaggtgattgagaagaaccggcctgctgatgtcagggcgtccactgcccccacaccgtccacagcagctgtctgagccctcaatccccaagctggcagctgtcattcaggaccccaacccctctcagcccctcttttcccacattcatagcctgtagtgccccctctaacccccagtgccacagagaagacgggatttgaagctgtacccaatttaattccataatcaatctatcaattacagtccgtccaccacctccctgtgggctgtcctgagctctgttgggttcctgggatggaatcagtgcatcataaagggcattctttaagcagagaaggggccaggccaccccattcaggaactgctgcgggaataaagtgctaacttgcccccaggctgtctatgggagaccctgggcccagtctgggatgtacagggctctgggaagggggcagtcctggcggcagaacccggcctgcaggggcactttgcttagaagaggactctcctagcgggagaggctgggaggggctgcatcaggccgtggagctggttgctgtggtcatcagtatggctgcttgttcaggaagcgggagaacatggtgaaggcagcgaggggcttgtcggtgggaaccatgtggccggcgccctgaggagcaatgttcgtgagctcctgaccccaccattccctcctccccatataactgctcactcgggggcaattccttcatcccaaaccctttattcttcccagaaccctccccacccctctcc

SEQ ID NO: 406666 - DNA, 4266 bp, Homo sapiens
ctgcccgccagaccccgtcgcccggccggatcccctgagctgcccgccatcccacgtgaccgcgccgccccccagctccaccgctgagtgagttggggcgcgtccctatcccgttcccagtccctcgccgagccgcgtggtgcactgaagccggcgtggggaggagagccgatgaaggagaacgctaacatgggggctccaggcagaatctctaatgggagagatttaggacctgagggagccgggagacccgggagcccacggtctggtcggccacctcctctcctccccgggcgcgaggcctaggagaccgcaagccaccctccaagaatgcgcgtgcagtcgttgccgtggcaacgtgcaagcctgcatgggcccaccgctaaaggaaaggggaggttgttgggggtgtgggggctggtcccctggaggtccaaactcatcacgcggcggtagcacgagggaactgggaacgtcccctcccccgtgtcccaaatcctctgggagccagaacgcaagtcgcatcgcctctctgagcctcagtttccacatctgccatatggaggcaagattattggttccaagttccccgaagagttatctggagggtaacgatccaggctagttcccacttatggttggacgtccaaggaatgggtttaagcggctcagataactcctgcgaccccaccccacccccaggcccgctcgccatggccctcttcggggccctcttcctagcgctgctggcaggcgcacatgcagagttcccaggctgcaagatccgcgtcacctccaaggcgctggagctggtgaagcaggaggggctgcgctttctggagcaagagctggagactatcaccattccggacctgcggggcaaagaaggccacttctactacaacatctctgaggtgaaggtcacagagctgcaactgacatcttccgagctcgatttccagccacagcaggagctgatgcttcaaatcaccaatgcctccttggggctgcgcttccggagacagctgctctactggttcttctatgatgggggctacatcaacgcctcagctgagggtgtgtccatccgcactggtctggagctctcccgggatcccgctggacggatgaaagtgtccaatgtctcctgccaggcctctgtctccagaatgcacgcggccttcgggggaaccttcaagaaggtgtatgattttctctccacgttcatcacctcagggatgcgcttcctcctcaaccagcagatctgccctgtcctctaccacgcagggacggtcctgctcaactccctcctggacaccgtgcctgtgcgcagttctgtggacgagcttgttggcattgactattccctcatgaaggatcctgtggcttccaccagcaacctggacatggacttccggggggccttcttccccctgactgagaggaactggagcctccccaaccgggcagtggagccccagctgcaggaggaagagcggatggtgtatgtggccttctctgagttcttcttcgactctgccatggagagctacttccgggcgggggccctgcagctgttgctggtgggggacaaggtgccccacgacctggacatgctgctgagggccacctactttgggagcattgtcctgctgagcccagcagtgattgactccccattgaagctggagctgcgggtcctggccccaccgcgctgcaccatcaagccctctggcaccaccatctctgtcactgctagcgtcaccattgccctggtcccaccagaccagcctgaggtccagctgtccagcatgactatggacgcccgtctcagcgccaagatggctctccgggggaaggccctgcgcacgcagctggacctgcgcaggttccgaatctattccaaccattctgcactggagtcgctggctctgatcccattacaggcccctctgaagaccatgctgcagattggggtgatgcccatgctcaatgagcggacctggcgtggggtgcagatcccactacctgagggcatcaactttgtgcatgaggtggtgacgaaccatgcgggattcctcaccatcggggctgatctccactttgccaaagggctgcgagaggtgattgagaagaaccggcctgctgatgtcagggcgtccactgcccccacaccgtccacagcagctgtctgagccctcaatccccaagctggcagctgtcattcaggaccccaacccctctcagcccctcttttcccacattcatagcctgtagtgccccctctaacccccagtgccacagagaagacgggatttgaagctgtacccaatttaattccataatcaatctatcaattacagtccgtccaccacctccctgtgggctgtcctgagctctgttgggttcctgggatggaatcagtgcatcataaagggcattctttaagcagagaaggggccaggccaccccattcaggaactgctgcgggaataaagtgctaacttgcccccaggctgtctatgggagaccctgggcccagtctgggatgtacagggctctgggaagggggcagtcctggcggcagaacccggcctgcaggggcactttgcttagaagaggactctcctagcgggagaggctgggaggggctgcatcaggccgtggagctggttgctgtggtcatcagtatggctgcttgttcaggaagcgggagaacatggtgaaggcagcgaggggcttgtcggtgggaaccatgtggccggcgcccttgatcgtgagaaaggcgatgtgggagaactcttcacgaagccggcaatctgctccccgctgtccccgtacttcactaaccagggccggcgctgcacctccatctgccccaccaggaaagacatcagcctacagcagctgcatccttgctcacagctaccagcaagaccttagggctgggaattcctccacacttgccctctgtgggccagagccaggcagccagctggccactcccaggcatacccgctcccaatcctccacagcagcccctatcccagggccaggaatctctaccttaccttctggttgagggaatccacaaaccactcatcccccatgaaattgcaggccatgtctacatctccattatataataggatctggtatttctaaagcaggatggggtaaaaatgaggggtgtggaacaagcccagtccccagcccttccctagttcaaggcctacccctcaggaaattcaaggggccaagctagataacacgaaccagggaattttcatgttttctaacgacttactgcatgtccagtattctactaaatgttttatctgtgaaggtagatatcattattatccccattttacagatggagaacctgaggctcatatttaagaaatttgcccaagattatgtggctagtacagggacttgcacccaggccatgtgactccagagcccatgctattaaccactgtgctggacagaacctagtcctaacttggccctgccagtgcttcctatatcaccttgtgcaaggtctcctcccaccctggacctctgctggcccatttttggcatgaatgaagctcttctcacccttaagactccgtggctgatgcagacccctaggcctcctatagcaggacagcatgggtggggacaaacccaggttcaaattctgaccccaccaatcacaggaccctgggcttcgcctttcggagtttcagcttcccttgtcctgacaggaagtctcaagggcccccagcttgctgtgctactctggggtcctaaggctgctggtgatccagctgtgctctccccactcacctgtgagctaagcagcttcagatactgggagttcatgcttcggtagagacggcggtactgtaagtttaccagaaagctgccgggaacatacgagcaggccccaggaagaccaggtcggggcgaaaagtagtcaacagatcagaccttctctcctatctccaagctccaacccagaaggcagacagctgggttccactcccctttttgggggggggccacctctctaggactgacttggatgttgggctggatgggctgggattcagacagcctcaactcaccaccatttagaaaggtacagggatgctgggcgtggtggctcacgcctgtaatcctagcactttgggagaccgaggtgagtggatcacgaggtcaggagttcgagaccagcctgaccaacatggtgaaaccccgtctctactaaaaaaa

SEQ ID NO: 406667 - DNA, 3477 bp, Homo sapiens
ataaaggccaagccagtcatcataggcgggaccaggcagatgggcgtggccttgaaaatgtagagggggccaagaaggaagcaggaccagtggatgtgaggcgtggtcgaagaacaacagaaagggtgaaggtcacagagctgcaactgacatcttccgagctcgatttccagccacagcaggagctgatgcttcaaatcaccaatgcctccttggggctgcgcttccggagacagctgctctactggttcttctatgatgggggctacatcaacgcctcagctgagggtgtgtccatccgcactggtctggagctctcccgggatcccgctggacggatgaaagtgtccaatgtctcctgccaggcctctgtctccagaatgcacgcggccttcgggggaaccttcaagaaggtgtatgattttctctccacgttcatcacctcagggatgcgcttcctcctcaaccagcagatctgccctgtcctctaccacgcagggacggtcctgctcaactccctcctggacaccgtgcctgtgcgcagttctgtggacgagcttgttggcattgactattccctcatgaaggatcctgtggcttccaccagcaacctggacatggacttccggggggccttcttccccctgactgagaggaactggagcctccccaaccgggcagtggagccccagctgcaggaggaagagcggatggtgtatgtggccttctctgagttcttcttcgactctgccatggagagctacttccgggcgggggccctgcagctgttgctggtgggggacaaggtgccccacgacctggacatgctgctgagggccacctactttgggagcattgtcctgctgagcccagcagtgattgactccccattgaagctggagctgcgggtcctggccccaccgcgctgcaccatcaagccctctggcaccaccatctctgtcactgctagcgtcaccattgccctggtcccaccagaccagcctgaggtccagctgtccagcatgactatggacgcccgtctcagcgccaagatggctctccgggggaaggccctgcgcacgcagctggacctgcgcaggttccgaatctattccaaccattctgcactggagtcgctggctctgatcccattacaggcccctctgaagaccatgctgcagattggggtgatgcccatgctcaatgagcggacctggcgtggggtgcagatcccactacctgagggcatcaactttgtgcatgaggtggtgacgaaccatgcgggattcctcaccatcggggctgatctccactttgccaaagggctgcgagaggtgattgagaagaaccggcctgctgatgtcagggcgtccactgcccccacaccgtccacagcagctgtctgagccctcaatccccaagctggcagctgtcattcaggaccccaacccctctcagcccctcttttcccacattcatagcctgtagtgccccctctaacccccagtgccacagagaagacgggatttgaagctgtacccaatttaattccataatcaatctatcaattacagtccgtccaccacctccctgtgggctgtcctgagctctgttgggttcctgggatggaatcagtgcatcataaagggcattctttaagcagagaaggggccaggccaccccattcaggaactgctgcgggaataaagtgctaacttgcccccaggctgtctatgggagaccctgggcccagtctgggatgtacagggctctgggaagggggcagtcctggcggcagaacccggcctgcaggggcactttgcttagaagaggactctcctagcgggagaggctgggaggggctgcatcaggccgtggagctggttgctgtggtcatcagtatggctgcttgttcaggaagcgggagaacatggtgaaggcagcgaggggcttgtcggtgggaaccatgtggccggcgcccttgatcgtgagaaaggcgatgtgggagaactcttcacgaagccggcaatctgctccccgctgtccccgtacttcactaaccagggccggcgctgcacctccatctgccccaccaggaaagacatcagcctacagcagctgcatccttgctcacagctaccagcaagaccttagggctgggaattcctccacacttgccctctgtgggccagagccaggcagccagctggccactcccaggcatacccgctcccaatcctccacagcagcccctatcccagggccaggaatctctaccttaccttctggttgagggaatccacaaaccactcatcccccatgaaattgcaggccatgtctacatctccattatataataggatctggtatttctaaagcaggatggggtaaaaatgaggggtgtggaacaagcccagtccccagcccttccctagttcaaggcctacccctcaggaaattcaaggggccaagctagataacacgaaccagggaattttcatgttttctaacgacttactgcatgtccagtattctactaaatgttttatctgtgaaggtagatatcattattatccccattttacagatggagaacctgaggctcatatttaagaaatttgcccaagattatgtggctagtacagggacttgcacccaggccatgtgactccagagcccatgctattaaccactgtgctggacagaacctagtcctaacttggccctgccagtgcttcctatatcaccttgtgcaaggtctcctcccaccctggacctctgctggcccatttttggcatgaatgaagctcttctcacccttaagactccgtggctgatgcagacccctaggcctcctatagcaggacagcatgggtggggacaaacccaggttcaaattctgaccccaccaatcacaggaccctgggcttcgcctttcggagtttcagcttcccttgtcctgacaggaagtctcaagggcccccagcttgctgtgctactctggggtcctaaggctgctggtgatccagctgtgctctccccactcacctgtgagctaagcagcttcagatactgggagttcatgcttcggtagagacggcggtactgtaagtttaccagaaagctgccgggaacatacgagcaggccccaggaagaccaggtcggggcgaaaagtagtcaacagatcagaccttctctcctatctccaagctccaacccagaaggcagacagctgggttccactcccctttttgggggggggccacctctctaggactgacttggatgttgggctggatgggctgggattcagacagcctcaactcaccaccatttagaaaggtacagggatgctgggcgtggtggctcacgcctgtaatcctagcactttgggagaccgaggtgagtggatcacgaggtcaggagttcgagaccagcctgaccaacatggtgaaaccccgtctctactaaaaaaa

SEQ ID NO: 406668 - DNA, 3495 bp, Homo sapiens
ctgcccgccagaccccgtcgcccggccggatcccctgagctgcccgccatcccacgtgaccgcgccgccccccagctccaccgctgagcccgctcgccatggccctcttcggggccctcttcctagcgctgctggcaggcgcacatgcagagttcccaggctgcaagatccgcgtcacctccaaggcgctggagctggtgaagcaggaggggctgcgctttctggagcaagagctggagactatcaccattccggacctgcggggcaaagaaggccacttctactacaacatctctgaggtgaaggtcacagagctgcaactgacatcttccgagctcgatttccagccacagcaggagctgatgcttcaaatcaccaatgcctccttggggctgcgcttccggagacagctgctctactggttcttgaaggtgtatgattttctctccacgttcatcacctcagggatgcgcttcctcctcaaccagcagatctgccctgtcctctaccacgcagggacggtcctgctcaactccctcctggacaccgtgcctgtgcgcagttctgtggacgagcttgttggcattgactattccctcatgaaggatcctgtggcttccaccagcaacctggacatggacttccggggggccttcttccccctgactgagaggaactggagcctccccaaccgggcagtggagccccagctgcaggaggaagagcggatggtgtatgtggccttctctgagttcttcttcgactctgccatggagagctacttccgggcgggggccctgcagctgttgctggtgggggacaaggtgccccacgacctggacatgctgctgagggccacctactttgggagcattgtcctgctgagcccagcagtgattgactccccattgaagctggagctgcgggtcctggccccaccgcgctgcaccatcaagccctctggcaccaccatctctgtcactgctagcgtcaccattgccctggtcccaccagaccagcctgaggtccagctgtccagcatgactatggacgcccgtctcagcgccaagatggctctccgggggaaggccctgcgcacgcagctggacctgcgcaggttccgaatctattccaaccattctgcactggagtcgctggctctgatcccattacaggcccctctgaagaccatgctgcagattggggtgatgcccatgctcaatgagcggacctggcgtggggtgcagatcccactacctgagggcatcaactttgtgcatgaggtggtgacgaaccatgcgggattcctcaccatcggggctgatctccactttgccaaagggctgcgagaggtgattgagaagaaccggcctgctgatgtcagggcgtccactgcccccacaccgtccacagcagctgtctgagccctcaatccccaagctggcagctgtcattcaggaccccaacccctctcagcccctcttttcccacattcatagcctgtagtgccccctctaacccccagtgccacagagaagacgggatttgaagctgtacccaatttaattccataatcaatctatcaattacagtccgtccaccacctccctgtgggctgtcctgagctctgttgggttcctgggatggaatcagtgcatcataaagggcattctttaagcagagaaggggccaggccaccccattcaggaactgctgcgggaataaagtgctaacttgcccccaggctgtctatgggagaccctgggcccagtctgggatgtacagggctctgggaagggggcagtcctggcggcagaacccggcctgcaggggcactttgcttagaagaggactctcctagcgggagaggctgggaggggctgcatcaggccgtggagctggttgctgtggtcatcagtatggctgcttgttcaggaagcgggagaacatggtgaaggcagcgaggggcttgtcggtgggaaccatgtggccggcgcccttgatcgtgagaaaggcgatgtgggagaactcttcacgaagccggcaatctgctccccgctgtccccgtacttcactaaccagggccggcgctgcacctccatctgccccaccaggaaagacatcagcctacagcagctgcatccttgctcacagctaccagcaagaccttagggctgggaattcctccacacttgccctctgtgggccagagccaggcagccagctggccactcccaggcatacccgctcccaatcctccacagcagcccctatcccagggccaggaatctctaccttaccttctggttgagggaatccacaaaccactcatcccccatgaaattgcaggccatgtctacatctccattatataataggatctggtatttctaaagcaggatggggtaaaaatgaggggtgtggaacaagcccagtccccagcccttccctagttcaaggcctacccctcaggaaattcaaggggccaagctagataacacgaaccagggaattttcatgttttctaacgacttactgcatgtccagtattctactaaatgttttatctgtgaaggtagatatcattattatccccattttacagatggagaacctgaggctcatatttaagaaatttgcccaagattatgtggctagtacagggacttgcacccaggccatgtgactccagagcccatgctattaaccactgtgctggacagaacctagtcctaacttggccctgccagtgcttcctatatcaccttgtgcaaggtctcctcccaccctggacctctgctggcccatttttggcatgaatgaagctcttctcacccttaagactccgtggctgatgcagacccctaggcctcctatagcaggacagcatgggtggggacaaacccaggttcaaattctgaccccaccaatcacaggaccctgggcttcgcctttcggagtttcagcttcccttgtcctgacaggaagtctcaagggcccccagcttgctgtgctactctggggtcctaaggctgctggtgatccagctgtgctctccccactcacctgtgagctaagcagcttcagatactgggagttcatgcttcggtagagacggcggtactgtaagtttaccagaaagctgccgggaacatacgagcaggccccaggaagaccaggtcggggcgaaaagtagtcaacagatcagaccttctctcctatctccaagctccaacccagaaggcagacagctgggttccactcccctttttgggggggggccacctctctaggactgacttggatgttgggctggatgggctgggattcagacagcctcaactcaccaccatttagaaaggtacagggatgctgggcgtggtggctcacgcctgtaatcctagcactttgggagaccgaggtgagtggatcacgaggtcaggagttcgagaccagcctgaccaacatggtgaaaccccgtctctactaaaaaaa

SEQ ID NO: 406669 - DNA, 2991 bp, Homo sapiens
catgatagccgggtaatcggacaggctgccactccctctggacacgtgctgtgcgcagttctgtggacgagcttgttggcattgactattccctcatgaaggatcctgtggcttccaccagcaacctggacatggacttccggggggccttcttccccctgactgagaggaactggagcctccccaaccgggcagtggagccccagctgcaggaggaagagcggatggtgtatgtggccttctctgagttcttcttcgactctgccatggagagctacttccgggcgggggccctgcagctgttgctggtgggggacaaggtgccccacgacctggacatgctgctgagggccacctactttgggagcattgtcctgctgagcccagcagtgattgactccccattgaagctggagctgcgggtcctggccccaccgcgctgcaccatcaagccctctggcaccaccatctctgtcactgctagcgtcaccattgccctggtcccaccagaccagcctgaggtccagctgtccagcatgactatggacgcccgtctcagcgccaagatggctctccgggggaaggccctgcgcacgcagctggacctgcgcaggttccgaatctattccaaccattctgcactggagtcgctggctctgatcccattacaggcccctctgaagaccatgctgcagattggggtgatgcccatgctcaatgagcggacctggcgtggggtgcagatcccactacctgagggcatcaactttgtgcatgaggtggtgacgaaccatgcgggattcctcaccatcggggctgatctccactttgccaaagggctgcgagaggtgattgagaagaaccggcctgctgatgtcagggcgtccactgcccccacaccgtccacagcagctgtctgagccctcaatccccaagctggcagctgtcattcaggaccccaacccctctcagcccctcttttcccacattcatagcctgtagtgccccctctaacccccagtgccacagagaagacgggatttgaagctgtacccaatttaattccataatcaatctatcaattacagtccgtccaccacctccctgtgggctgtcctgagctctgttgggttcctgggatggaatcagtgcatcataaagggcattctttaagcagagaaggggccaggccaccccattcaggaactgctgcgggaataaagtgctaacttgcccccaggctgtctatgggagaccctgggcccagtctgggatgtacagggctctgggaagggggcagtcctggcggcagaacccggcctgcaggggcactttgcttagaagaggactctcctagcgggagaggctgggaggggctgcatcaggccgtggagctggttgctgtggtcatcagtatggctgcttgttcaggaagcgggagaacatggtgaaggcagcgaggggcttgtcggtgggaaccatgtggccggcgcccttgatcgtgagaaaggcgatgtgggagaactcttcacgaagccggcaatctgctccccgctgtccccgtacttcactaaccagggccggcgctgcacctccatctgccccaccaggaaagacatcagcctacagcagctgcatccttgctcacagctaccagcaagaccttagggctgggaattcctccacacttgccctctgtgggccagagccaggcagccagctggccactcccaggcatacccgctcccaatcctccacagcagcccctatcccagggccaggaatctctaccttaccttctggttgagggaatccacaaaccactcatcccccatgaaattgcaggccatgtctacatctccattatataataggatctggtatttctaaagcaggatggggtaaaaatgaggggtgtggaacaagcccagtccccagcccttccctagttcaaggcctacccctcaggaaattcaaggggccaagctagataacacgaaccagggaattttcatgttttctaacgacttactgcatgtccagtattctactaaatgttttatctgtgaaggtagatatcattattatccccattttacagatggagaacctgaggctcatatttaagaaatttgcccaagattatgtggctagtacagggacttgcacccaggccatgtgactccagagcccatgctattaaccactgtgctggacagaacctagtcctaacttggccctgccagtgcttcctatatcaccttgtgcaaggtctcctcccaccctggacctctgctggcccatttttggcatgaatgaagctcttctcacccttaagactccgtggctgatgcagacccctaggcctcctatagcaggacagcatgggtggggacaaacccaggttcaaattctgaccccaccaatcacaggaccctgggcttcgcctttcggagtttcagcttcccttgtcctgacaggaagtctcaagggcccccagcttgctgtgctactctggggtcctaaggctgctggtgatccagctgtgctctccccactcacctgtgagctaagcagcttcagatactgggagttcatgcttcggtagagacggcggtactgtaagtttaccagaaagctgccgggaacatacgagcaggccccaggaagaccaggtcggggcgaaaagtagtcaacagatcagaccttctctcctatctccaagctccaacccagaaggcagacagctgggttccactcccctttttgggggggggccacctctctaggactgacttggatgttgggctggatgggctgggattcagacagcctcaactcaccaccatttagaaaggtacagggatgctgggcgtggtggctcacgcctgtaatcctagcactttgggagaccgaggtgagtggatcacgaggtcaggagttcgagaccagcctgaccaacatggtgaaaccccgtctctactaaaaaaa

SEQ ID NO: 406670 - DNA, 1620 bp, Homo sapiens
ctgcccgccagaccccgtcgcccggccggatcccctgagctgcccgccatcccacgtgaccgcgccgccccccagctccaccgctgagcccgctcgccatggccctcttcggggccctcttcctagcgctgctggcaggcgcacatgcagagttcccaggctgcaagatccgcgtcacctccaaggcgctggagctggtgaagcaggaggggctgcgctttctggagcaagagctggagactatcaccattccggacctgcggggcaaagaaggccacttctactacaacatctctgaggtgaaggtcacagagctgcaactgacatcttccgagctcgatttccagccacagcaggagctgatgcttcaaatcaccaatgcctccttggggctgcgcttccggagacagctgctctactggttcttctatgatgggggctacatcaacgcctcagctgagggtgtgtccatccgcactggtctggagctctcccgggatcccgctggacggatgaaagtgtccaatgtctcctgccaggcctctgtctccagaatgcacgcggccttcgggggaaccttcaagaaggtgtatgattttctctccacgttcatcacctcagggatgcgcttcctcctcaaccagcagatctgccctgtcctctaccacgcagggacggtcctgctcaactccctcctggacaccgtgcctgtgcgcagttctgtggacgagcttgttggcattgactattccctcatgaaggatcctgtggcttccaccagcaacctggacatggacttccggggggccttcttccccctgactgagaggaactggagcctccccaaccgggcagtggagccccagctgcaggaggaagagcggatggtgtatgtggccttctctgagttcttcttcgactctgccatggagagctacttccgggcgggggccctgcagctgttgctggtgggggacaaggtgccccacgacctggacatgctgctgagggccacctactttgggagcattgtcctgctgagcccagcagtgattgactccccattgaagctggagctgcgggtcctggccccaccgcgctgcaccatcaagccctctggcaccaccatctctgtcactgctagcgtcaccattgccctggtcccaccagaccagcctgaggtccagctgtccagcatgactatggacgcccgtctcagcgccaagatggctctccgggggaaggccctgcgcacgcagctggacctgcgcaggttccgaatctattccaaccattctgcactggagtcgctggctctgatcccattacaggcccctctgaagaccatgctgcagattggggtgatgcccatgctcaatgagcggacctggcgtggggtgcagatcccactacctgagggcatcaactttgtgcatgaggtggtgacgaaccatgcgtctcagcccctcttttcccacattcatagcctgtagtgccccctctaacccccagtgccacagagaagacgggatttgaagctgtacccaatttaattccataatcaatctatcaattacagtccgtccaccacctccctgtgggctgtcctgagctctgttg

SEQ ID NO: 406671 - DNA, 1236 bp, Homo sapiens
ctgcccgccagaccccgtcgcccggccggatcccctgagctgcccgccatcccacgtgaccgcgccgccccccagctccaccgctgagcccgctcgccatggccctcttcggggccctcttcctagcgctgctggcaggcgcacatgcagagttcccaggctgcaagatccgcgtcacctccaaggcgctggagctggtgaagcaggaggggctgcgctttctggagcaagagctggagactatcaccattccggacctgcggggcaaagaaggccacttctactacaacatctctgaggtgaaggtcacagagctgcaactgacatcttccgagctcgatttccagccacagcaggagctgatgcttcaaatcaccaatgcctccttggggctgcgcttccggagacagctgctctactggttcttctatgatgggggctacatcaacgcctcagctgagggtgtgtccatccgcactggtctggagctctcccgggatcccgctggacggatgaaagtgtccaatgtctcctgccaggcctctgtctccagaatgcacgcggccttcgggggaaccttcaagaaggtgtatgattttctctccacgttcatcacctcagggatgcgcttcctcctcaaccagcagatctgccctgtcctctaccacgcagggacggtcctgctcaactccctcctggacaccgtgcctgtgcgcagttctgtggacgagcttgttggcattgactattccctcatgaaggatcctgtggcttccaccagcaacctggacatggacttccggggggccttcttccccctgactgagaggaactggagcctccccaaccgggcagtggagccccagctgcaggaggaagagcggatggtgtatgtggccttctctgagttcttcttcgactctgccatggagagctacttccgggcgggggccctgcagctgttgctggtgggggacaaggtgccccacgacctggacatgctgctgagggccacctactttgggagcattgtcctgctgagcccagcagtgattgactccccattgaagctggagctgcgggtcctggccccaccgcgctgcaccatcaagccctctggcaccaccatctctgtcactgctagcgtcaccattgccctggtcccaccagaccagcctgaggtccagctgtccagcatgactatggtacgggtcccagagtgggggctgctggctg

SEQ ID NO: 406672 - DNA, 2405 bp, Homo sapiens
ctgcccgccagaccccgtcgcccggccggatcccctgagctgcccgccatcccacgtgaccgcgccgccccccagctccaccgctgagcccgctcgccatggccctcttcggggccctcttcctagcgctgctggcaggcgcacatgcagagttcccaggctgcaagatccgcgtcacctccaaggcgctggagctggtgaagcaggaggggctgcgctttctggagcaagagctggagactatcaccattccggacctgcggggcaaagaaggccacttctactacaacatctctgatccactgcccccacaccgtccacagcagctgtctgagccctcaatccccaagctggcagctgtcattcaggaccccaacccctctcagcccctcttttcccacattcatagcctgtagtgccccctctaacccccagtgccacagagaagacgggatttgaagctgtacccaatttaattccataatcaatctatcaattacagtccgtccaccacctccctgtgggctgtcctgagctctgttgggttcctgggatggaatcagtgcatcataaagggcattctttaagcagagaaggggccaggccaccccattcaggaactgctgcgggaataaagtgctaacttgcccccaggctgtctatgggagaccctgggcccagtctgggatgtacagggctctgggaagggggcagtcctggcggcagaacccggcctgcaggggcactttgcttagaagaggactctcctagcgggagaggctgggaggggctgcatcaggccgtggagctggttgctgtggtcatcagtatggctgcttgttcaggaagcgggagaacatggtgaaggcagcgaggggcttgtcggtgggaaccatgtggccggcgcccttgatcgtgagaaaggcgatgtgggagaactcttcacgaagccggcaatctgctccccgctgtccccgtacttcactaaccagggccggcgctgcacctccatctgccccaccaggaaagacatcagcctacagcagctgcatccttgctcacagctaccagcaagaccttagggctgggaattcctccacacttgccctctgtgggccagagccaggcagccagctggccactcccaggcatacccgctcccaatcctccacagcagcccctatcccagggccaggaatctctaccttaccttctggttgagggaatccacaaaccactcatcccccatgaaattgcaggccatgtctacatctccattatataataggatctggtatttctaaagcaggatggggtaaaaatgaggggtgtggaacaagcccagtccccagcccttccctagttcaaggcctacccctcaggaaattcaaggggccaagctagataacacgaaccagggaattttcatgttttctaacgacttactgcatgtccagtattctactaaatgttttatctgtgaaggtagatatcattattatccccattttacagatggagaacctgaggctcatatttaagaaatttgcccaagattatgtggctagtacagggacttgcacccaggccatgtgactccagagcccatgctattaaccactgtgctggacagaacctagtcctaacttggccctgccagtgcttcctatatcaccttgtgcaaggtctcctcccaccctggacctctgctggcccatttttggcatgaatgaagctcttctcacccttaagactccgtggctgatgcagacccctaggcctcctatagcaggacagcatgggtggggacaaacccaggttcaaattctgaccccaccaatcacaggaccctgggcttcgcctttcggagtttcagcttcccttgtcctgacaggaagtctcaagggcccccagcttgctgtgctactctggggtcctaaggctgctggtgatccagctgtgctctccccactcacctgtgagctaagcagcttcagatactgggagttcatgcttcggtagagacggcggtactgtaagtttaccagaaagctgccgggaacatacgagcaggccccaggaagaccaggtcggggcgaaaagtagtcaacagatcagaccttctctcctatctccaagctccaacccagaaggcagacagctgggttccactcccctttttgggggggggccacctctctaggactgacttggatgttgggctggatgggctgggattcagacagcctcaactcaccaccatttagaaaggtacagggatgctgggcgtggtggctcacgcctgtaatcctagcactttgggagaccgaggtgagtggatcacgaggtcaggagttcgagaccagcctgaccaacatggtgaaaccccgtctctactaaaaaaa

SEQ ID NO: 406673 - DNA, 1844 bp, Homo sapiens
ttcgagctcggtacccaaggtatccagcagagaaggggccaggccaccccattcaggaactgctgcgggaataaagtgctaacttgcccccaggctgtctatgggagaccctgggcccagtctgggatgtacagggctctgggaagggggcagtcctggcggcagaacccggcctgcaggggcactttgcttagaagaggactctcctagcgggagaggctgggaggggctgcatcaggccgtggagctggttgctgtggtcatcagtatggctgcttgttcaggaagcgggagaacatggtgaaggcagcgaggggcttgtcggtgggaaccatgtggccggcgcccttgatcgtgagaaaggcgatgtgggagaactcttcacgaagccggcaatctgctccccgctgtccccgtacttcactaaccagggccggcgctgcacctccatctgccccaccaggaaagacatcagcctacagcagctgcatccttgctcacagctaccagcaagaccttagggctgggaattcctccacacttgccctctgtgggccagagccaggcagccagctggccactcccaggcatacccgctcccaatcctccacagcagcccctatcccagggccaggaatctctaccttaccttctggttgagggaatccacaaaccactcatcccccatgaaattgcaggccatgtctacatctccattatataataggatctggtatttctaaagcaggatggggtaaaaatgaggggtgtggaacaagcccagtccccagcccttccctagttcaaggcctacccctcaggaaattcaaggggccaagctagataacacgaaccagggaattttcatgttttctaacgacttactgcatgtccagtattctactaaatgttttatctgtgaaggtagatatcattattatccccattttacagatggagaacctgaggctcatatttaagaaatttgcccaagattatgtggctagtacagggacttgcacccaggccatgtgactccagagcccatgctattaaccactgtgctggacagaacctagtcctaacttggccctgccagtgcttcctatatcaccttgtgcaaggtctcctcccaccctggacctctgctggcccatttttggcatgaatgaagctcttctcacccttaagactccgtggctgatgcagacccctaggcctcctatagcaggacagcatgggtggggacaaacccaggttcaaattctgaccccaccaatcacaggaccctgggcttcgcctttcggagtttcagcttcccttgtcctgacaggaagtctcaagggcccccagcttgctgtgctactctggggtcctaaggctgctggtgatccagctgtgctctccccactcacctgtgagctaagcagcttcagatactgggagttcatgcttcggtagagacggcggtactgtaagtttaccagaaagctgccgggaacatacgagcaggccccaggaagaccaggtcggggcgaaaagtagtcaacagatcagaccttctctcctatctccaagctccaacccagaaggcagacagctgggttccactcccctttttgggggggggccacctctctaggactgacttggatgttgggctggatgggctgggattcagacagcctcaactcaccaccatttagaaaggtacagggatgctgggcgtggtggctcacgcctgtaatcctagcactttgggagaccgaggtgagtggatcacgaggtcaggagttcgagaccagcctgaccaacatggtgaaaccccgtctctactaaaaaaa

SEQ ID NO: 406674 - DNA, 1158 bp, Homo sapiens
ctgcccgccagaccccgtcgcccggccggatcccctgagctgcccgccatcccacgtgaccgcgccgccccccagctccaccgctgagtgagttggggcgcgtccctatcccgttcccagtccctcgccgagccgcgtggtgcactgaagccggcgtggggaggagagccgatgaaggagaacgctaacatgggggctccaggcagaatctctaatgggagagatttaggacctgagggagccgggagacccgggagcccacggtctggtcggccacctcctctcctccccgggcgcgaggcctaggagaccgcaagccaccctccaagaatgcgcgtgcagtcgttgccgtggcaacgtgcaagcctgcatgggcccaccgctaaaggaaaggggaggttgttgggggtgtgggggctggtcccctggaggtccaaactcatcacgcggcggtagcacgagggaactgggaacgtcccctcccccgtgtcccaaatcctctgggagccagaacgcaagtcgcatcgcctctctgagcctcagtttccacatctgccatatggaggcaagattattggttccaagttccccgaagagttatctggagggtaacgatccaggctagttcccacttatggttggacgtccaaggaatgggtttaagcggctcagataactcctgcgaccccaccccacccccaggcccgctcgccatggccctcttcggggccctcttcctagcgctgctggcaggcgcacatgcagagttcccaggctgcaagatccgcgtcacctccaaggcgctggagctggtgaagcaggaggggctgcgctttctggagcaagagctggagactatcaccattccggacctgcggggcaaagaaggccacttctactacaacatctctgatccactgcccccacaccgtccacagcagctgtctgagccctcaatccccaagctggcagctgtcattcaggaccccaacccctctcagcccctcttttcccacattcatagcctgtagtgccccctctaacccccagtgccacagagaagacgggatttgaagctgtacccaatttaattccataatcaatctatcaattacagtccgtccaccacctccctgtgggctgtcctgagctctgttg

SEQ ID NO: 406675 - DNA, 2348 bp, Homo sapiens
agcggaatgaacggctgctcagtggcgggagggcgggctaccgcgcccgggccctacccgccctggcgcactgctcttcccggtcatggaggcgccagccgccggcttgtttctgctcctgttgcttgggacttgggccccggcgccgggcagcgcctcctccgaggcaccgccgctgatcaatgaggacgtgaagcgcacagtggacctaagcagccacctggctaaggtgacggccgaggtggtcctggcgcacctgggcggcggctccacgtcccgagctacctctttcctgctggctttggagcctgagctcgaggcccggctggcgcacctgggcgtgcaggtaaagggagaagatgaggaagagaacaatttggaagtacgtgaaaccaaaattaagggtaaaagtgggagattcttcacagtcaagctcccagttgctcttgatcctggggccaagatttcagtcattgtggaaacagtctacacccatgtgcttcatccatatccaacccagatcacccagtcagagaaacagtttgtggtgtttgaggggaaccattatttctactctccctatccaacgaagacacaaaccatgcgtgtgaagcttgcctctcgaaatgtggagagctacaccaagctggggaaccccacgcgctctgaggacctactggattatgggcctttcagagatgtgcctgcctatagtcaggatacttttaaagtacattatgagaacaacagccctttcctgaccatcaccagcatgacccgagtcattgaagtctctcactggggtaatattgctgtggaagaaaatgtggacttaaagcacacaggagctgtgcttaaggggcctttctcacgctatgattaccagagacagccagatagtggaatatcctccatccgttcttttaagaccatccttcctgctgctgcccaggatgtttattaccgggatgagattggcaatgtttctaccagccacctccttattttggatgactctgtagagatggaaatccggcctcgcttccctctctttggcgggtggaagacccattacatcgttggctacaacctcccaagctatgagtacctctataatttgggtgaccagtatgcactgaagatgaggtttgtggaccatgtgtttgatgaacaagtgatagattctctgactgtgaagatcatcctgcctgaaggagccaagaacattgaaattgatagtccctatgaaatcagccgtgccccagatgagctgcactacacctatctggacacatttggccgccctgtgattgttgcctacaagaaaaatctggtagaacagcacattcaggacattgtggtccactacacgttcaacaaggtgctcatgctgcaggagcccctgctggtggtggcggccttctacatcctgttcttcaccgttatcatctatgttcggctggacttctccatcaccaaggatccagccgcagaagccaggatgaaggtagcctgcatcacagagcaggtcttgaccctggtcaacaagagaataggcctttaccgtcactttgacgagaccgtcaataggtacaagcaatcccgggacatctccaccctcaacagtggcaagaagagcctggagactgaacacaaggccttgaccagtgagattgcactgctgcagtccaggctgaagacagagggctctgatctgtgcgacagagtgagcgaaatgcagaagctggatgcacaggtcaaggagctggtgctgaagtcggcggtggaggctgagcgcctggtggctggcaagctcaagaaagacacgtacattgagaatgagaagctcatctcaggaaagcgccaggagctggtcaccaagatcgaccacatcctggatgccctgtagcccctgcccgcatcctccagggggcccagggtgcctgcactttgctgtggcaggcagattgggtggtagtgggaggttgtgcatggaggccagtgaaagctgacatctgtaaaaggccttcaaggaagagaaaccaggccctgcgtcaggcagtgtgagtttgccgtttgtccttaactttctttttttttttttttaaaaaaagaaaactttaaaaaaactcccattaaaaacaaaacatctttgtgttttgaacaaaggaattttcaatatttgattggtattctgttctgaagtctaggatatttttcagcctataaagccccctgttttatgcccttctaattctgatgtttgggtattgtgtgagtgcatgtgtttttttttttttttttaaagcgtgtgtgaacaaatggaaataaagcagggactgtgaaca

SEQ ID NO: 406676 - DNA, 2400 bp, Homo sapiens
ttagctaggcatggtggcacatgcctgtaatcccagctactcgggaggctgaggcaggagaattgcttgaacccgggaggcagaggttgcagccggctgagatggcgccatcacactccagcctgctcttcccggtcatggaggcgccagccgccggcttgtttctgctcctgttgcttgggacttgggccccggcgccgggcagcgcctcctccgaggcaccgccgctgatcaatgaggacgtgaagcgcacagtggacctaagcagccacctggctaaggtgacggccgaggtggtcctggcgcacctgggcggcggctccacgtcccgagctacctctttcctgctggctttggagcctgagctcgaggcccggctggcgcacctgggcgtgcaggtaaagggagaagatgaggaagagaacaatttggaagtacgtgaaaccaaaattaagggtaaaagtgggagattcttcacagtcaagctcccagttgctcttgatcctggggccaagatttcagtcattgtggaaacagtctacacccatgtgcttcatccatatccaacccagatcacccagtcagagaaacagtttgtggtgtttgaggggaaccattatttctactctccctatccaacgaagacacaaaccatgcgtgtgaagcttgcctctcgaaatgtggagagctacaccaagctggggaaccccacgcgctctgaggacctactggattatgggcctttcagagatgtgcctgcctatagtcaggatacttttaaagtacattatgagaacaacagccctttcctgaccatcaccagcatgacccgagtcattgaagtctctcactggggtaatattgctgtggaagaaaatgtggacttaaagcacacaggagctgtgcttaaggggcctttctcacgctatgattaccagagacagccagatagtggaatatcctccatccgttcttttaagaccatccttcctgctgctgcccaggatgtttattaccgggatgagattggcaatgtttctaccagccacctccttattttggatgactctgtagagatggaaatccggcctcgcttccctctctttggcgggtggaagacccattacatcgttggctacaacctcccaagctatgagtacctctataatttgggtgaccagtatgcactgaagatgaggtttgtggaccatgtgtttgatgaacaagtgatagattctctgactgtgaagatcatcctgcctgaaggagccaagaacattgaaattgatagtccctatgaaatcagccgtgccccagatgagctgcactacacctatctggacacatttggccgccctgtgattgttgcctacaagaaaaatctggtagaacagcacattcaggacattgtggtccactacacgttcaacaaggtgctcatgctgcaggagcccctgctggtggtggcggccttctacatcctgttcttcaccgttatcatctatgttcggctggacttctccatcaccaaggatccagccgcagaagccaggatgaaggtagcctgcatcacagagcaggtcttgaccctggtcaacaagagaataggcctttaccgtcactttgacgagaccgtcaataggtacaagcaatcccgggacatctccaccctcaacagtggcaagaagagcctggagactgaacacaaggccttgaccagtgagattgcactgctgcagtccaggctgaagacagagggctctgatctgtgcgacagagtgagcgaaatgcagaagctggatgcacaggtcaaggagctggtgctgaagtcggcggtggaggctgagcgcctggtggctggcaagctcaagaaagacacgtacattgagaatgagaagctcatctcaggaaagcgccaggagctggtcaccaagatcgaccacatcctggatgccctgtagcccctgcccgcatcctccagggggcccagggtgcctgcactttgctgtggcaggcagattgggtggtagtgggaggttgtgcatggaggccagtgaaagctgacatctgtaaaaggccttcaaggaagagaaaccaggccctgcgtcaggcagtgtgagtttgccgtttgtccttaactttctttttttttttttttaaaaaaagaaaactttaaaaaaactcccattaaaaacaaaacatctttgtgttttgaacaaaggaattttcaatatttgattggtattctgttctgaagtctaggatatttttcagcctataaagccccctgttttatgcccttctaattctgatgtttgggtattgtgtgagtgcatgtgtttttttttttttttttaaagcgtgtgtgaacaaatggaaataaagcagggactgtgaaca

SEQ ID NO: 406677 - DNA, 1069 bp, Homo sapiens
  misc_feature (17)..(17): n is a, c, g, or t
  misc_feature (131)..(132): n is a, c, g, or t
aatagggaatcctttcnccgttgcttgtttttgtcaggtttgtcagagatcagatggttgtacatgtgcggtcttatttctgagttctctattctgttccactggtctctgtgtctgtttttgtatcagtnncatgctgttttggttactgttgctttgtagtatagtttgaagtcaggtagcatgatgcctccagctttgttctttttgcttatgattgtcttggctattcgtgctctttttttttgtttcatatgaatttttttttttttaaagcgtgtgtgaacaaatggaaataaagcagggactgtgaacattgtttttggtctgttgaagatctctcataatttaattcttaattttgggaatagtgcttttatcaagtgctttttattcattaaataatggatttgcttctcagcaggtttgcaaggcaagcatttacattttacatattagaacactgaggtattctagtaccagagtgttgaaagtggtgccagagtgttgaaagagttgacgtggcttaggtcacagaatggagtagtggagtgaggcctccatttttgtagtttttgcatccttcctgtgagtcatgttttactcagcatcaaggaaacagtgatgagcaaagcagagatggttcctctcaagaggcaagggattgaaaggtcatgtggggaatcgacagtgccagtgagtgccaggctttctgcccctctttcctctctgcaggagttcgctccctgtctccacctaatgaattcctgctcagcctcaggatgtgttacttaaggttactgtgtcagggagccatccgtggcctgccacactcagtcaagtcctgtggtaccctctcgttttcctttgtacctcttctccacctcatataccacggttggaatgtgtgtgattactgaactagcttcaatagggcaggggtttagtcttttatgctcatctttatgttaacagctaggtgtacagaccaatctatgacacgtagttgggttattgaatgtttgcatgagtggcttacaaacagcttaaatattggcaggtgggttga

SEQ ID NO: 406678 - DNA, 3101 bp, Homo sapiens
agcggaatgaacggctgctcagtggcgggagggcgggctaccgcgcccgggccctacccgccctggcgcactgctcttcccggtcatggaggcgccagccgccggcttgtttctgctcctgttgcttgggacttgggccccggcgccgggcagcgcctcctccgaggcaccgccgctgatcaatgaggacgtgaagcgcacagtggacctaagcagccacctggctaaggtgacggccgaggtggtcctggcgcacctgggcggcggctccacgtcccgagctacctctttcctgctggctttggagcctgagctcgaggcccggctggcgcacctgggcgtgcaggtaaagggagaagatgaggaagagaacaatttggaagtacgtgaaaccaaaattaagggtaaaagtgggagattcttcacagtcaagctcccagttgctcttgatcctggggccaagatttcagtcattgtggaaacagtctacacccatgtgcttcatccatatccaacccagatcacccagtcagagaaacagtttgtggtgtttgaggggaaccattatttctactctccctatccaacgaagacacaaaccatgcgtgtgaagcttgcctctcgaaatgtggagagctacaccaagctggggaaccccacgcgctctgaggacctactggattatgggcctttcagagatgtgcctgcctatagtcaggatacttttaaagtacattatgagaacaacagccctttcctgaccatcaccagcatgacccgagtcattgaagtctctcactggggtaatattgctgtggaagaaaatgtggacttaaagcacacaggagctgtgcttaaggggcctttctcacgctatgattaccagagacagccagatagtggaatatcctccatccgttcttttaagaccatccttcctgctgctgcccaggatgtttattaccgggatgagattggcaatgtttctaccagccacctccttattttggatgactctgtagagatggaaatccggcctcgcttccctctctttggcgggtggaagacccattacatcgttggctacaacctcccaagctatgagtacctctataatttgggtgaccagtatgcactgaagatgaggtttgtggaccatgtgtttgatgaacaagtgatagattctctgactgtgaagatcatcctgcctgaaggagccaagaacattgaaattgatagtccctatgaaatcagccgtgccccagatgagctgcactacacctatctggacacatttggccgccctgtgattgttgcctacaagaaaaatctggtagaacagcacattcaggacattgtggtccactacacgttcaacaaggtgctcatgctgcaggagcccctgctggtggtggcggccttctacatcctgttcttcaccgttatcatctatgttcggctggacttctccatcaccaaggatccagccgcagaagccaggatgaaggtagcctgcatcacagagcaggtcttgaccctggtcaacaagagaataggcctttaccgtcactttgacgagaccgtcaataggtacaagcaatcccgggacatctccaccctcaacagtggcaagaagagcctggagactgaacacaaggccttgaccagtgagattgcactgctgcagtccaggctgaagacagagggctctgatctgtgcgacagagtgagcgaaatgcagaagctggatgcacaggtcaaggagctggtgctgaagtcggcggtggaggctgagcgcctggtggctggcaagctcaagaaagacacgtacattgagaatgagaagctcatctcaggaaagcgccaggagctggtcaccaagatcgaccacatcctggatgccctgtagcccctgcccgcatcctccagggggcccagggtgcctgcactttgctgtggcaggcagattgggtggtagtgggaggttgtgcatggaggccagtgaaagctgacatctgtaaaaggccttcaaggaagagaaaccaggccctgcgtcaggcagtgtgagtttgccgtttgtccttaactttctttttttttttttttaaaaaaagaaaactttaaaaaaactcccattaaaaacaaaacatctttgtgttttgaacaaaggaattttcaatatttgattggtattctgttctgaagtctaggatatttttcagcctataaagccccctgttttatgcccttctaattctgatgtttgggtattgtgtgagtgcatgtgtttttttttttttttttaaagcgtgtgtgaacaaatggaaataaagcagggactgtgaacattgtttttggtctgttgaagatctctcataatttaattcttaattttgggaatagtgcttttatcaagtgctttttattcattaaataatggatttgcttctcagcaggtttgcaaggcaagcatttacattttacatattagaacactgaggtattctagtaccagagtgttgaaagtggtgccagagtgttgaaagagttgacgtggcttaggtcacagaatggagtagtggagtgaggcctccatttttgtagtttttgcatccttcctgtgagtcatgttttactcagcatcaaggaaacagtgatgagcaaagcagagatggttcctctcaagaggcaagggattgaaaggtcatgtggggaatcgacagtgccagtgagtgccaggctttctgcccctctttcctctctgcaggagttcgctccctgtctccacctaatgaattcctgctcagcctcaggatgtgttacttaaggttactgtgtcagggagccatccgtggcctgccacactcagtcaagtcctgtggtaccctctcgttttcctttgtacctcttctccacctcatataccacggttggaatgtgtgtgattactgaactagcttcaatagggcaggggtttagtcttttatgctcatctttatgttaacagctaggtgtacagaccaatctatgacacgtagttgggttattgaatgtttgcatgagtggcttacaaacagcttaaatattggcaggtgggttga

SEQ ID NO: 406679 - DNA, 3491 bp, Homo sapiens
agcggaatgaacggctgctcagtggcgggagggcgggctaccgcgcccgggccctacccgccctggcgcactgctcttcccggtcatggaggcgccagccgccggcttgtttctgctcctgttgcttgggacttgggccccggcgccgggcagcgcctcctccgaggcaccgccgctgatcaatgaggacgtgaagcgcacagtggacctaagcagccacctggctaaggtgacggccgaggtggtcctggcgcacctgggcggcggctccacgtcccgagctacctctttcctgctggctttggagcctgagctcgaggcccggctggcgcacctgggcgtgcaggtaaagggagaagatgaggaagagaacaatttggaagtacgtgaaaccaaaattaagggtaaaagtgggagattcttcacagtcaagctcccagttgctcttgatcctggggccaagatttcagtcattgtggaaacagtctacacccatgtgcttcatccatatccaacccagatcacccagtcagagaaacagtttgtggtgtttgaggggaaccattatttctactctccctatccaacgaagacacaaaccatgcgtgtgaagcttgcctctcgaaatgtggagagctacaccaagctggggaaccccacgcgctctgaggacctactggattatgggcctttcagagatgtgcctgcctatagtcaggatacttttaaagtacattatgagaacaacagccctttcctgaccatcaccagcatgacccgagtcattgaagtctctcactggggtaatattgctgtggaagaaaatgtggacttaaagcacacaggagctgtgcttaaggggcctttctcacgctatgattaccagagacagccagatagtggaatatcctccatccgttcttttaagaccatccttcctgctgctgcccaggatgtttattaccgggatgagattggcaatgtttctaccagccacctccttattttggatgactctgtagagatggaaatccggcctcgcttccctctctttggcgggtggaagacccattacatcgttggctacaacctcccaagctatgagtacctctataatttgggtgaccagtatgcactgaagatgaggtttgtggaccatgtgtttgatgaacaagtgatagattctctgactgtgaagatcatcctgcctgaaggagccaagaacattgaaattgatagtccctatgaaatcagccgtgccccagatgagctgcactacacctatctggacacatttggccgccctgtgattgttgcctacaagaaaaatctggtagaacagcacattcaggacattgtggtccactacacgttcaacaaggtgctcatgctgcaggagcccctgctggtggtggcggccttctacatcctgttcttcaccgttatcatctatgttcggctggacttctccatcaccaaggatccagccgcagaagccaggatgaaggtagcctgcatcacagagcaggtcttgaccctggtcaacaagagaataggcctttaccgtcactttgacgagaccgtcaataggtacaagcaatcccgggacatctccaccctcaacagtggcaagaagagcctggagactgaacacaaggccttgaccagtgagattgcactgctgcagtccaggctgaagacagagggctctgatctgtgcgacagagtgagcgaaatgcagaagctggatgcacaggtcaaggagctggtgctgaagtcggcggtggaggctgagcgcctggtggctggcaagctcaagaaagacacgtacattgagaatgagaagctcatctcaggaaagcgccaggagctggtcaccaagatcgaccacatcctggatgccctgtagcccctgcccgcatcctccagggggcccagggtgcctgcactttgctgtggcaggcagattgggtggtagtgggaggttgtgcatggaggccagtgaaagctgacatctgtaaaaggccttcaaggaagagaaaccaggccctgcgtcaggcagtgtgagtttgccgtttgtccttaactttctttttttttttttttaaaaaaagaaaactttaaaaaaactcccattaaaaacaaaacatctttgtgtttgtggtggtctgcgcaacacagaggcacatttctccaagtattggcatgggctatctcgtggttcgtgacaggtcctacggactactttttacagccgtatagagagccccacggggtttacagtcgccccgtttctaaatcctcgaatgtaaggggggctcatcgggtgatggaggttgacaatgctggctatactctaactctcaagctctgtttttcactctattaaaacacgcccggtgtgtgtgtcaaacccacacgcggtgggaacaaccaccacgaccgccccgccggcggccaaccttgtgcgcacacccatctttaccaacaccagacagcaccacacacccgcagacacgacaacgaaaacacaacaccagacaacccaaacaaagacggaggggggacgcccgcgactcgctcagcaggaacgatacccccacgccgcagcgcgcggggccacaccaacacaacgcaccaacaacgcaacacccgacaaccaaccacacgcgagcacatatcacaggcgaccaacaaacgacgacggctgtggccccacaagacatgacgcgaggaggcagagcgccacagacaacaagagcaaccggacagagaaagaccatacagagcgaagagcagtacgctatggaccagcgaagacgcggcgggcacggcagaacgaggggagaacaacagcagccgaagaagacagggaaggcggaagacgacactgtgagagacggaccaggacaccagaacgacgtaagacaagcgcggcgaggcgcaggaccaagcaccacaaaaagcggggcgagccgaagacaccagcccacctcccgcaggcgcggcaaccagaccaaccgacgccccacaccacgaaggcagcagactcacagacacacacaccccgcacggcagggctgcaaatcaatcgagcgctccaccacacacccggaccgcgcgacaagctcaccacagtgcgcaccgccgcgaacacaaagcggcccgcgcgccgacacgaccgcagagacgaccgcgaccgcaacagagcgaagagaacgcttgaacaacatcacagaagagccaagccggaagcgagaagcgacgacagaagcgagaagagacagagccacgaacgacgacggcagacgccgacacccgcaggggaaacgcaaggaagagcagcccggagcgcaagcggcaagaaccgacagagcggaagagcacgacgcacgagacagacgcagcgaggcagcccgcacagcaccgcaagacagacacaccaaccgacgaggaagcgagagcgcaccggaacaggcgagcacgcacgg

SEQ ID NO: 406680 - DNA, 1859 bp, Homo sapiens
ggcaggacgaggctgggttgaatccaaccagatcacccagtcagagaaacagtttgtggtgtttgaggggaaccattatttctactctccctatccaacgaagacacaaaccatgcgtgtgaagcttgcctctcgaaatgtggagagctacaccaagctggggaaccccacgcgctctgaggacctactggattatgggcctttcagagatgtgcctgcctatagtcaggatacttttaaagtacattatgagaacaacagccctttcctgaccatcaccagcatgacccgagtcattgaagtctctcactggggtaatattgctgtggaagaaaatgtggacttaaagcacacaggagctgtgcttaaggggcctttctcacgctatgattaccagagacagccagatagtggaatatcctccatccgttcttttaagaccatccttcctgctgctgcccaggatgtttattaccgggatgagattggcaatgtttctaccagccacctccttattttggatgactctgtagagatggaaatccggcctcgcttccctctctttggcgggtggaagacccattacatcgttggctacaacctcccaagctatgagtacctctataatttgggtgaccagtatgcactgaagatgaggtttgtggaccatgtgtttgatgaacaagtgatagattctctgactgtgaagatcatcctgcctgaaggagccaagaacattgaaattgatagtccctatgaaatcagccgtgccccagatgagctgcactacacctatctggacacatttggccgccctgtgattgttgcctacaagaaaaatctggtagaacagcacattcaggacattgtggtccactacacgttcaacaaggtgctcatgctgcaggagcccctgctggtggtggcggccttctacatcctgttcttcaccgttatcatctatgttcggctggacttctccatcaccaaggatccagccgcagaagccaggatgaaggtagcctgcatcacagagcaggtcttgaccctggtcaacaagagaataggcctttaccgtcactttgacgagaccgtcaataggtacaagcaatcccgggacatctccaccctcaacagtggcaagaagagcctggagactgaacacaaggccttgaccagtgagattgcactgctgcagtccaggctgaagacagagggctctgatctgtgcgacagagtgagcgaaatgcagaagctggatgcacaggtcaaggagctggtgctgaagtcggcggtggaggctgagcgcctggtggctggcaagctcaagaaagacacgtacattgagaatgagaagctcatctcaggaaagcgccaggagctggtcaccaagatcgaccacatcctggatgccctgtagcccctgcccgcatcctccagggggcccagggtgcctgcactttgctgtggcaggcagattgggtggtagtgggaggttgtgcatggaggccagtgaaagctgacatctgtaaaaggccttcaaggaagagaaaccaggccctgcgtcaggcagtgtgagtttgccgtttgtccttaactttctttttttttttttttaaaaaaagaaaactttaaaaaaactcccattaaaaacaaaacatctttgtgttttgaacaaaggaattttcaatatttgattggtattctgttctgaagtctaggatatttttcagcctataaagccccctgttttatgcccttctaattctgatgtttgggtattgtgtgagtgcatgtgtttttttttttttttttaaagcgtgtgtgaacaaatggaaataaagcagggactgtgaaca

SEQ ID NO: 406681 - DNA, 1812 bp, Homo sapiens
cgagctcggttccccttttgggtctttgctcttttggggtctttgctccaacgaagacacaaaccatgcgtgtgaagcttgcctctcgaaatgtggagagctacaccaagctggggaaccccacgcgctctgaggacctactggattatgggcctttcagagatgtgcctgcctatagtcaggatacttttaaagtacattatgagaacaacagccctttcctgaccatcaccagcatgacccgagtcattgaagtctctcactggggtaatattgctgtggaagaaaatgtggacttaaagcacacaggagctgtgcttaaggggcctttctcacgctatgattaccagagacagccagatagtggaatatcctccatccgttcttttaagaccatccttcctgctgctgcccaggatgtttattaccgggatgagattggcaatgtttctaccagccacctccttattttggatgactctgtagagatggaaatccggcctcgcttccctctctttggcgggtggaagacccattacatcgttggctacaacctcccaagctatgagtacctctataatttgggtgaccagtatgcactgaagatgaggtttgtggaccatgtgtttgatgaacaagtgatagattctctgactgtgaagatcatcctgcctgaaggagccaagaacattgaaattgatagtccctatgaaatcagccgtgccccagatgagctgcactacacctatctggacacatttggccgccctgtgattgttgcctacaagaaaaatctggtagaacagcacattcaggacattgtggtccactacacgttcaacaaggtgctcatgctgcaggagcccctgctggtggtggcggccttctacatcctgttcttcaccgttatcatctatgttcggctggacttctccatcaccaaggatccagccgcagaagccaggatgaaggtagcctgcatcacagagcaggtcttgaccctggtcaacaagagaataggcctttaccgtcactttgacgagaccgtcaataggtacaagcaatcccgggacatctccaccctcaacagtggcaagaagagcctggagactgaacacaaggccttgaccagtgagattgcactgctgcagtccaggctgaagacagagggctctgatctgtgcgacagagtgagcgaaatgcagaagctggatgcacaggtcaaggagctggtgctgaagtcggcggtggaggctgagcgcctggtggctggcaagctcaagaaagacacgtacattgagaatgagaagctcatctcaggaaagcgccaggagctggtcaccaagatcgaccacatcctggatgccctgtagcccctgcccgcatcctccagggggcccagggtgcctgcactttgctgtggcaggcagattgggtggtagtgggaggttgtgcatggaggccagtgaaagctgacatctgtaaaaggccttcaaggaagagaaaccaggccctgcgtcaggcagtgtgagtttgccgtttgtccttaactttctttttttttttttttaaaaaaagaaaactttaaaaaaactcccattaaaaacaaaacatctttgtgttttgaacaaaggaattttcaatatttgattggtattctgttctgaagtctaggatatttttcagcctataaagccccctgttttatgcccttctaattctgatgtttgggtattgtgtgagtgcatgtgtttttttttttttttttaaagcgtgtgtgaacaaatggaaataaagcagggactgtgaaca

SEQ ID NO: 406682 - DNA, 1633 bp, Homo sapiens
gcacggctgatttcatagggactatcaatttcaatgttcttggctccttcaggcagcatgacccgagtcattgaagtctctcactggggtaatattgctgtggaagaaaatgtggacttaaagcacacaggagctgtgcttaaggggcctttctcacgctatgattaccagagacagccagatagtggaatatcctccatccgttcttttaagaccatccttcctgctgctgcccaggatgtttattaccgggatgagattggcaatgtttctaccagccacctccttattttggatgactctgtagagatggaaatccggcctcgcttccctctctttggcgggtggaagacccattacatcgttggctacaacctcccaagctatgagtacctctataatttgggtgaccagtatgcactgaagatgaggtttgtggaccatgtgtttgatgaacaagtgatagattctctgactgtgaagatcatcctgcctgaaggagccaagaacattgaaattgatagtccctatgaaatcagccgtgccccagatgagctgcactacacctatctggacacatttggccgccctgtgattgttgcctacaagaaaaatctggtagaacagcacattcaggacattgtggtccactacacgttcaacaaggtgctcatgctgcaggagcccctgctggtggtggcggccttctacatcctgttcttcaccgttatcatctatgttcggctggacttctccatcaccaaggatccagccgcagaagccaggatgaaggtagcctgcatcacagagcaggtcttgaccctggtcaacaagagaataggcctttaccgtcactttgacgagaccgtcaataggtacaagcaatcccgggacatctccaccctcaacagtggcaagaagagcctggagactgaacacaaggccttgaccagtgagattgcactgctgcagtccaggctgaagacagagggctctgatctgtgcgacagagtgagcgaaatgcagaagctggatgcacaggtcaaggagctggtgctgaagtcggcggtggaggctgagcgcctggtggctggcaagctcaagaaagacacgtacattgagaatgagaagctcatctcaggaaagcgccaggagctggtcaccaagatcgaccacatcctggatgccctgtagcccctgcccgcatcctccagggggcccagggtgcctgcactttgctgtggcaggcagattgggtggtagtgggaggttgtgcatggaggccagtgaaagctgacatctgtaaaaggccttcaaggaagagaaaccaggccctgcgtcaggcagtgtgagtttgccgtttgtccttaactttctttttttttttttttaaaaaaagaaaactttaaaaaaactcccattaaaaacaaaacatctttgtgttttgaacaaaggaattttcaatatttgattggtattctgttctgaagtctaggatatttttcagcctataaagccccctgttttatgcccttctaattctgatgtttgggtattgtgtgagtgcatgtgtttttttttttttttttaaagcgtgtgtgaacaaatggaaataaagcagggactgtgaaca

SEQ ID NO: 406683 - DNA, 1167 bp, Homo sapiens
tagaggatcctcagcttacagcgttcgggggaaggagcaagaacattgaaattgatagtccctatgaaatcagccgtgccccagatgagctgcactacacctatctggacacatttggccgccctgtgattgttgcctacaagaaaaatctggtagaacagcacattcaggacattgtggtccactacacgttcaacaaggtgctcatgctgcaggagcccctgctggtggtggcggccttctacatcctgttcttcaccgttatcatctatgttcggctggacttctccatcaccaaggatccagccgcagaagccaggatgaaggtagcctgcatcacagagcaggtcttgaccctggtcaacaagagaataggcctttaccgtcactttgacgagaccgtcaataggtacaagcaatcccgggacatctccaccctcaacagtggcaagaagagcctggagactgaacacaaggccttgaccagtgagattgcactgctgcagtccaggctgaagacagagggctctgatctgtgcgacagagtgagcgaaatgcagaagctggatgcacaggtcaaggagctggtgctgaagtcggcggtggaggctgagcgcctggtggctggcaagctcaagaaagacacgtacattgagaatgagaagctcatctcaggaaagcgccaggagctggtcaccaagatcgaccacatcctggatgccctgtagcccctgcccgcatcctccagggggcccagggtgcctgcactttgctgtggcaggcagattgggtggtagtgggaggttgtgcatggaggccagtgaaagctgacatctgtaaaaggccttcaaggaagagaaaccaggccctgcgtcaggcagtgtgagtttgccgtttgtccttaactttctttttttttttttttaaaaaaagaaaactttaaaaaaactcccattaaaaacaaaacatctttgtgttttgaacaaaggaattttcaatatttgattggtattctgttctgaagtctaggatatttttcagcctataaagccccctgttttatgcccttctaattctgatgtttgggtattgtgtgagtgcatgtgtttttttttttttttttaaagcgtgtgtgaacaaatggaaataaagcagggactgtgaaca

SEQ ID NO: 406684 - DNA, 1745 bp, Homo sapiens
agcggaatgaacggctgctcagtggcgggagggcgggctaccgcgcccgggccctacccgccctggcgcactgctcttcccggtcatggaggcgccagccgccggcttgtttctgctcctgttgcttgggacttgggccccggcgccgggcagcgcctcctccgaggcaccgccgctgatcaatgaggacgtgaagcgcacagtggacctaagcagccacctggctaaggtgacggccgaggtggtcctggcgcacctgggcggcggctccacgtcccgagctacctctttcctgctggctttggagcctgagctcgaggcccggctggcgcacctgggcgtgcaggtaaagggagaagatgaggaagagaacaatttggaagtacgtgaaaccaaaattaagggtaaaagtgggagattcttcacagtcaagctcccagttgctcttgatcctggggccaagatttcagtcattgtggaaacagtctacacccatgtgcttcatccatatccaacccagatcacccagtcagagaaacagtttgtggtgtttgaggggaaccattatttctactctccctatccaacgaagacacaaaccatgcgtgtgaagcttgcctctcgaaatgtggagagctacaccaagctggggaaccccacgcgctctgaggacctactggattatgggcctttcagagatgtgcctgcctatagtcaggatacttttaaagtacattatgagaacaacagccctttcctgaccatcaccagcatgacccgagtcattgaagtctctcactggggtaatattgctgtggaagaaaatgtggacttaaagcacacaggagctgtgcttaaggggcctttctcacgctatgattaccagagacagccagatagtggaatatcctccatccgttcttttaagaccatccttcctgctgctgcccaggatgtttattaccgggatgagattggcaatgtttctaccagccacctccttattttggatgactctgtagagatggaaatccggcctcgcttccctctctttggcgggtggaagacccattacatcgttggctacaacctcccaagctatgagtacctctataatttgggtgaccagtatgcactgaagatgaggtttgtggaccatgtgtttgatgaacaagtgatagattctctgactgtgaagatcatcctgcctgaaggagccaagaacattgaaattgatagtccctatgaaatcagaaagcgccaggagctggtcaccaagatcgaccacatcctggatgccctgtagcccctgcccgcatcctccagggggcccagggtgcctgcactttgctgtggcaggcagattgggtggtagtgggaggttgtgcatggaggccagtgaaagctgacatctgtaaaaggccttcaaggaagagaaaccaggccctgcgtcaggcagtgtgagtttgccgtttgtccttaactttctttttttttttttttaaaaaaagaaaactttaaaaaaactcccattaaaaacaaaacatctttgtgttttgaacaaaggaattttcaatatttgattggtattctgttctgaagtctaggatatttttcagcctataaagccccctgttttatgcccttctaattctgatgtttgggtattgtgtgagtgcatgtgtttttttttttttttttaaagcgtgtgtgaacaaatggaaataaagcagggactgtgaaca

SEQ ID NO: 406685 - DNA, 1564 bp, Homo sapiens
agcggaatgaacggctgctcagtggcgggagggcgggctaccgcgcccgggccctacccgccctggcgcactgctcttcccggtcatggaggcgccagccgccggcttgtttctgctcctgttgcttgggacttgggccccggcgccgggcagcgcctcctccgaggcaccgccgctgatcaatgaggacgtgaagcgcacagtggacctaagcagccacctggctaaggtgacggccgaggtggtcctggcgcacctgggcggcggctccacgtcccgagctacctctttcctgctggctttggagcctgagctcgaggcccggctggcgcacctgggcgtgcaggtaaagggagaagatgaggaagagaacaatttggaagtacgtgaaaccaaaattaagggtaaaagtgggagattcttcacagtcaagctcccagttgctcttgatcctggggccaagatttcagtcattgtggaaacagtctacacccatgtgcttcatccatatccaacccagatcacccagtcagagaaacagtttgtggtgtttgaggggaaccattatttctactctccctatccaacgaagacacaaaccatgcgtgtgaagcttgcctctcgaaatgtggagagctacaccaagctggggaaccccacgcgctctgaggacctactggattatgggcctttcagagatgtgcctgcctatagtcaggatacttttaaagtacattatgagaacaacagccctttcctgaccatcaccagcatgacccgagtcattgaagtctctcactggggtaatattgctgtggaagaaaatgtggacttaaagcacacaggagctgtgcttaaggggcctttctcacgctatgattaccagagacagccagatagtggaatatcctccatccgttcttttaagaccatccttcctgctgctgcccaggatgtttattaccgggatgagattggcaatgtttctaccagccacctccttattttggatgactctgtagagatggaaatccggcctcgcttccctctctttggcgggtggaagacccattacatcgttggctacaacctcccaagatcgaccacatcctggatgccctgtagcccctgcccgcatcctccagggggcccagggtgcctgcactttgctgtggcaggcagattgggtggtagtgggaggttgtgcatggaggccagtgaaagctgacatctgtaaaaggccttcaaggaagagaaaccaggccctgcgtcaggcagtgtgagtttgccgtttgtccttaactttctttttttttttttttaaaaaaagaaaactttaaaaaaactcccattaaaaacaaaacatctttgtgttttgaacaaaggaattttcaatatttgattggtattctgttctgaagtctaggatatttttcagcctataaagccccctgttttatgcccttctaattctgatgtttgggtattgtgtgagtgcatgtgtttttttttttttttttaaagcgtgtgtgaacaaatggaaataaagcagggactgtgaaca

SEQ ID NO: 406686 - DNA, 1232 bp, Homo sapiens
agcggaatgaacggctgctcagtggcgggagggcgggctaccgcgcccgggccctacccgccctggcgcactgctcttcccggtcatggaggcgccagccgccggcttgtttctgctcctgttgcttgggacttgggccccggcgccgggcagcgcctcctccgaggcaccgccgctgatcaatgaggacgtgaagcgcacagtggacctaagcagccacctggctaaggtgacggccgaggtggtcctggcgcacctgggcggcggctccacgtcccgagctacctctttcctgctggctttggagcctgagctcgaggcccggctggcgcacctgggcgtgcaggtaaagggagaagatgaggaagagaacaatttggaagtacgtgaaaccaaaattaagggtaaaagtgggagattcttcacagtcaagctcccagttgctcttgatcctggggccaagatttcagtcattgtggaaacagtctacacccatgtgcttcatccatatccaacccagatcacccagtcagagaaacagtttgtggtgtttgaggggaaccattatttctactctccctatccaacgaagacacaaaccatgcgtgtgaagcttgcctctcgaaatgtggagagctacaccaagctggggaaccccacgcgctctgaggacctactggattatgggcctttcagagatgtgcctgcctatagtcaggatacttttaaagtacattatgagaacaacagccctttcctgaccatcaccagcatgacccgagtcattgaagtctctcactggggtaatattgctgtggaagaaaatgtggacttaaagcacacaggagctgtgcttaaggggcctttctcacgctatgattaccagtgaaagctgacatctgtaaaaggccttcaaggaagagaaaccaggccctgcgtcaggcagtgtgagtttgccgtttgtccttaactttctttttttttttttttaaaaaaagaaaactttaaaaaaactcccattaaaaacaaaacatctttgtgttttgaacaaaggaattttcaatatttgattggtattctgttctgaagtctaggatatttttcagcctataaagccccctgttttatgcccttctaattctgatgtttgggtattgtgtgagtgcatgtgtttttttttttttttttaaagcgtgtgtgaacaaatggaaataaagcagggactgtgaaca

SEQ ID NO: 406687 - DNA, 623 bp, Homo sapiens
taggatccccattggatacccggatatagggaaggacgagctggtgctgaagtcggcggtggaggctgagcgcctggtggctggcaagctcaagaaagacacgtacattgagaatgagaagctcatctcaggaaagcgccaggagctggtcaccaagatcgaccacatcctggatgccctgtagcccctgcccgcatcctccagggggcccagggtgcctgcactttgctgtggcaggcagattgggtggtagtgggaggttgtgcatggaggccagtgaaagctgacatctgtaaaaggccttcaaggaagagaaaccaggccctgcgtcaggcagtgtgagtttgccgtttgtccttaactttctttttttttttttttaaaaaaagaaaactttaaaaaaactcccattaaaaacaaaacatctttgtgttttgaacaaaggaattttcaatatttgattggtattctgttctgaagtctaggatatttttcagcctataaagccccctgttttatgcccttctaattctgatgtttgggtattgtgtgagtgcatgtgtttttttttttttttttaaagcgtgtgtgaacaaatggaaataaagcagggactgtgaaca

SEQ ID NO: 406688 - DNA, 619 bp, Homo sapiens
agaggatccccgctcacaacattgcacatggtcaagctggtgctgaagtcggcggtggaggctgagcgcctggtggctggcaagctcaagaaagacacgtacattgagaatgagaagctcatctcaggaaagcgccaggagctggtcaccaagatcgaccacatcctggatgccctgtagcccctgcccgcatcctccagggggcccagggtgcctgcactttgctgtggcaggcagattgggtggtagtgggaggttgtgcatggaggccagtgaaagctgacatctgtaaaaggccttcaaggaagagaaaccaggccctgcgtcaggcagtgtgagtttgccgtttgtccttaactttctttttttttttttttaaaaaaagaaaactttaaaaaaactcccattaaaaacaaaacatctttgtgttttgaacaaaggaattttcaatatttgattggtattctgttctgaagtctaggatatttttcagcctataaagccccctgttttatgcccttctaattctgatgtttgggtattgtgtgagtgcatgtgtttttttttttttttttaaagcgtgtgtgaacaaatggaaataaagcagggactgtgaaca

SEQ ID NO: 406689 - DNA, 1058 bp, Homo sapiens
actagactgctgcagactcgtagaccttctgcaggcccgtttcactcaccattaggcagggcacaactgctccgagtttcagccactcctcacactggcctgctgtgctctctagggaatcccggttgtgtgttttggggttctgctgttctcaagcccatcagttgccctgtttcttctctctgcgttctccttcacagacactgataacgtgaaggtcttgtggctgtcggtgttttgacccccatccctgtctctgtgttgtggggttcagtagagatactttgttgcctggttttgttgtaaacatggtccgtgggtttttggttttgctgtctacttgctctgtctttatgtgagcccctgtacttctttctctcctgcccatttgatccgttttccacatcattgcttatgcttgcttgatccttcaggtgaccagtatgcactgaagatgaggtttgtggaccatgtgtttgatgaacaagtgatagattctctgactgtgaagatcatcctgcctgaaggagccaagaacattgaaattgatagtccctatgaaatcagaaagcgccaggagctggtcaccaagatcgaccacatcctggatgccctgtagcccctgcccgcatcctccagggggcccagggtgcctgcactttgctgtggcaggcagattgggtggtagtgggaggttgtgcatggaggccagtgaaagctgacatctgtaaaaggccttcaaggaagagaaaccaggccctgcgtcaggcagtgtgagtttgccgtttgtccttaactttctttttttttttttttaaaaaaagaaaactttaaaaaaactcccattaaaaacaaaacatctttgtgttttgaacaaaggaattttcaatatttgattggtattctgttctgaagtctaggatatttttcagcctataaagccccctgttttatgcccttctaattctgatgtttgggtattgtgtgagtgcatgtgtttttttttttttttttaaagcgtgtgtgaacaaatggaaataaagcagggactgtgaaca

SEQ ID NO: 406690 - DNA, 899 bp, Homo sapiens
agcggaatgaacggctgctcagtggcgggagggcgggctaccgcgcccgggccctacccgccctggcgcactgctcttcccggtcatggaggcgccagccgccggcttgtttctgctcctgttgcttgggacttgggccccggcgccgggcagcgcctcctccgaggcaccgccgctgatcaatgaggacgtgaagcgcacagtggacctaagcagccacctggctaaggtgacggccgaggtggtcctggcgcacctgggcggcggctccacgtcccgagctacctctttcctgctggctttggagcctgagctcgaggcccggctggcgcacctgggcgtgcaggtaaagggagaagatgaggaagagaacaatttggaagtacgtgaaaccaaaattaagggtaaaagtgggagattcttcacagtcaagctcccagttgctcttgatcctggggccaagatttcagtcattgtggaaacagtctacacccatgtgcttcatccatatccaacccagatcacccagtcagagaaacagtttgtggtgtttgaggggaaccattatttctactctccctatccaacgaagacacaaaccatgcgtgtgaagcttgcctctcgaaatgtggagagctacaccaagctggggaaccccacgcgctctgaggacctactggattatgggcctttcagagatgtgcctgcctatagtcaggatactttttaaagtacattatgagaacaaccagccatcctaggttatagaaaaaatacgtgataacagcagtgagaataaatgacctatatggatttcagtcttcaccatgattcatactcctcatacctttataaactttagaattttattttcctttattgaagtacaagccctcacg

SEQ ID NO: 406691 - DNA, 1021 bp, Homo sapiens
gggaaggccaacttttactttctcaatctgagcaaaattcactgttttaaggagcaaaacgagcagaattattggacaggaagaatggtaggagagagtagagacctaggcaagggccgctcctgtaaaaattaggtaaagggagaagatgaggaagagaacaatttggaagtacgtgaaaccaaaattaagggtaaaagtgggagattcttcacagtcaagctcccagttgctcttgatcctggggccaagatttcagtcattgtggaaacagtctacacccatgtgcttcatccatatccaacccagatcacccagtcagagaaacagtttgtggtgtttgaggggaaccattatttctactctccctatccaacgaagacacaaaccatgcgtgtgaagcttgcctctcgaaatgtggagagctacaccaagctggggaaccccacgcgctctgaggacctactggattatgggcctttcagagatgtgcctgcctatagtcaggatacttttaaagtacattatgagaacaacagccctttcctgaccatcaccagcatgacccgagtcattgaagtctctcactggggtaatattgctgtggaagaaaatgtggacttaaagcacacaggagctgtgcttaaggggcctttctcacgctatgattaccagtgaaagctgacatctgtaaaaggccttcaaggaagagaaaccaggccctgcgtcaggcagtgtgagtttgccgtttgtccttaactttctttttttttttttttaaaaaaagaaaactttaaaaaaactcccattaaaaacaaaacatctttgtgttttgaacaaaggaattttcaatatttgattggtattctgttctgaagtctaggatatttttcagcctataaagccccctgttttatgcccttctaattctgatgtttgggtattgtgtgagtgcatgtgtttttttttttttttttaaagcgtgtgtgaacaaatggaaataaagcagggactgtgaaca

SEQ ID NO: 406692 - DNA, 732 bp, Homo sapiens
ggcacgagcgtgtctttcttgagcttgccagccaccaggcgctcagcctccaccgccaagatcgaccacatcctggatgccctgtagcccctgcccgcatcctccagggggcccagggtgcctgcactttgctgtggcaggcagattgggtggtagtgggaggttgtgcatggaggccagtgaaagctgacatctgtaaaaggccttcaaggaagagaaaccaggccctgcgtcaggcagtgtgagtttgccgtttgtccttaactttctttttttttttttttaaaaaaagaaaactttaaaaaaactcccattaaaaacaaaacatctttgtgttttgaacaaaggaattttcaatatttgattggtattctgttctgaagtctaggatatttttcagcctataaagccccctgttttatgcccttctaattctgatgtttgggtattgtgtgagtgcatgtgtttttttttttttttttaaagcgtgtgtgaacaaatggaaataaagcagggactgtgaacaaaaaaaattattatttattttttttgtcgttcttaatataaccttgtttctcatctcgcacttctatttctcatacaaaaaaaaactttttggccgctttggcccatgcgtttttaatctgatttttttttgggggcccaatttgggctattttggcaatccccttattgggggggtttaactacgggcgccgtttagttggtttg

SEQ ID NO: 406693 - DNA, 2554 bp, Homo sapiens
agcggaatgaacggctgctcagtggcgggagggcgggctaccgcgcccgggccctacccgccctggcgcactgctcttcccggtcatggaggcgccagccgccggcttgtttctgctcctgttgcttgggacttgggccccggcgccgggcagcgcctcctccgaggcaccgccgctgatcaatgaggacgtgaagcgcacagtggacctaagcagccacctggctaaggtgacggccgaggtggtcctggcgcacctgggcggcggctccacgtcccgagctacctctttcctgctggctttggagcctgagctcgaggcccggctggcgcacctgggcgtgcaggtaaagggagaagatgaggaagagaacaatttggaagtacgtgaaaccaaaattaagggtaaaagtgggagattcttcacagtcaagctcccagttgctcttgatcctggggccaagatttcagtcattgtggaaacagtctacacccatgtgcttcatccatatccaacccagatcacccagtcagagaaacagtttgtggtgtttgaggggaaccattatttctactctccctatccaacgaagacacaaaccatgcgtgtgaagcttgcctctcgaaatgtggagagctacaccaagctggggaaccccacgcgctctgaggacctactggattatgggcctttcagagatgtgcctgcctatagtcaggatacttttaaagtacattatgagaacaacagccctttcctgaccatcaccagcatgacccgagtcattgaagtctctcactggggtaatattgctgtggaagaaaatgtggacttaaagcacacaggagctgtgcttaaggggcctttctcacgctatgattaccagagacagccagatagtggaatatcctccatccgttcttttaagaccatccttcctgctgctgcccaggatgtttattaccgggatgagattggcaatgtttctaccagccacctccttattttggatgactctgtagagatggaaatccggcctcgcttccctctctttggcgggtggaagacccattacatcgttggctacaacctcccaagctatgagtacctctataatttgggtgaccagtatgcactgaagatgaggtttgtggaccatgtgtttgatgaacaagtgatagattctctgactgtgaagatcatcctgcctgaaggagccaagaacattgaaattgatagtccctatgaaatcagccgtgccccagatgagctgcactacacctatctggacacatttggccgccctgtgattgttgcctacaagaaaaatctggtagaacagcacattcaggacattgtggtccactacacgttcaacaaggtgctcatgctgcaggagcccctgctggtggtggcggccttctacatcctgttcttcaccgttatcatctatgttcggctggacttctccatcaccaaggatccagccgcagaagccaggatgaaggtagcctgcatcacagagcaggtcttgaccctggtcaacaagagaataggcctttaccgtcactttgacgagaccgtcaataggtacaagcaatcccgggacatctccaccctcaacagtggcaagaagagcctggagactgaacacaaggccttgaccagtgagattgcactgctgcagtccaggctgaagacagagggctctgatctgtgcgacagagtgagcgaaatgcagaagctggatgcacaggtcaaggagctggtgctgaagtcggcggtggaggctgagcgcctggtggctggcaagctcaagaaagacacgtacattgagaatgagaagctcatctcaggaaagcgccaggagctggtcaccaagatcgaccacatcctggatgccctgtagcccctgcccgcatcctccagggggcccagggtgcctgcactttgctgtggcaggcagattgggtggtagtgggaggttgtgcatggaggccagtgaaagctgacatctgtaaaaggccttcaaggaagagaaaccaggccctgcgtcaggcagtgtgagtttgccgtttgtccttaactttctttttttttttttttaaaaaaagaaaactttaaaaaaactcccattaaaaacaaaacatctttgtgttttgaacaaaggaattttcaatatttgattggtattctgttctgaagtctaggatatttttcagcctataaagccccctgttttatgcccttctaattctgatgtttgggtattgtgtgagtgcatgtgtttttttttttttttttaaagcgtgtgtgaacaaatggaaataaagcagggactgtgaacaaaaaaaattattatttattttttttgtcgttcttaatataaccttgtttctcatctcgcacttctatttctcatacaaaaaaaaactttttggccgctttggcccatgcgtttttaatctgatttttttttgggggcccaatttgggctattttggcaatccccttattgggggggtttaactacgggcgccgtttagttggtttg

SEQ ID NO: 406694 - DNA, 2353 bp, Homo sapiens
gccaggagacacctagcaactccgcagcggccatcttttacaagaaaccttcgctgcaaccgctgcgtcacatcaccgcgtctcccagggacaggaaagcctctccgtgtttggtgaagcttcaggggaagcagtcatcctgtcgtcgcatacggcaaaatcctccattgccgtagccgttcggctgacgtgacaagggaggtgcaggccaacacggcgactccgcgccctctggcggcagtgccggagcagcggcgctgtctttgacctatccggcattcggcttccgggaccgcttggcggctgtgaatgcagagctggggcgacgtggggctcgcttcctgggactgggtaaagggagaagatgaggaagagaacaatttggaagtacgtgaaaccaaaattaagggtaaaagtgggagattcttcacagtcaagctcccagttgctcttgatcctggggccaagatttcagtcattgtggaaacagtctacacccatgtgcttcatccatatccaacccagatcacccagtcagagaaacagtttgtggtgtttgaggggaaccattatttctactctccctatccaacgaagacacaaaccatgcgtgtgaagcttgcctctcgaaatgtggagagctacaccaagctggggaaccccacgcgctctgaggacctactggattatgggcctttcagagatgtgcctgcctatagtcaggatacttttaaagtacattatgagaacaacagccctttcctgaccatcaccagcatgacccgagtcattgaagtctctcactggggtaatattgctgtggaagaaaatgtggacttaaagcacacaggagctgtgcttaaggggcctttctcacgctatgattaccagagacagccagatagtggaatatcctccatccgttcttttaagaccatccttcctgctgctgcccaggatgtttattaccgggatgagattggcaatgtttctaccagccacctccttattttggatgactctgtagagatggaaatccggcctcgcttccctctctttggcgggtggaagacccattacatcgttggctacaacctcccaagctatgagtacctctataatttgggtgaccagtatgcactgaagatgaggtttgtggaccatgtgtttgatgaacaagtgatagattctctgactgtgaagatcatcctgcctgaaggagccaagaacattgaaattgatagtccctatgaaatcagccgtgccccagatgagctgcactacacctatctggacacatttggccgccctgtgattgttgcctacaagaaaaatctggtagaacagcacattcaggacattgtggtccactacacgttcaacaaggtgctcatgctgcaggagcccctgctggtggtggcggccttctacatcctgttcttcaccgttatcatctatgttcggctggacttctccatcaccaaggatccagccgcagaagccaggatgaaggtagcctgcatcacagagcaggtcttgaccctggtcaacaagagaataggcctttaccgtcactttgacgagaccgtcaataggtacaagcaatcccgggacatctccaccctcaacagtggcaagaagagcctggagactgaacacaaggccttgaccagtgagattgcactgctgcagtccaggctgaagacagagggctctgatctgtgcgacagagtgagcgaaatgcagaagctggatgcacaggtcaaggagctggtgctgaagtcggcggtggaggctgagcgcctggtggctggcaagctcaagaaagacacgtacattgagaatgagaagctcatctcaggaaagcgccaggagctggtcaccaagatcgaccacatcctggatgccctgtagcccctgcccgcatcctccagggggcccagggtgcctgcactttgctgtggcaggcagattgggtggtagtgggaggttgtgcatggaggccagtgaaagctgacatctgtaaaaggccttcaaggaagagaaaccaggccctgcgtcaggcagtgtgagtttgccgtttgtccttaactttctttttttttttttttaaaaaaagaaaactttaaaaaaactcccattaaaaacaaaacatctttgtgttttgaacaaaggaattttcaatatttgattggtattctgttctgaagtctaggatatttttcagcctataaagccccctgttttatgcccttctaattctgatgtttgggtattgtgtgagtgcatgtgtttttttttttttttttaaagcgtgtgtgaacaaatggaaataaagcagggactgtgaaca

SEQ ID NO: 406695 - DNA, 2463 bp, Homo sapiens
agcggaatgaacggctgctcagtggcgggagggcgggctaccgcgcccgggccctacccgccctggcgcactgctcttcccggtcatggaggcgccagccgccggcttgtttctgctcctgttgcttgggacttgggccccggcgccgggcagcgcctcctccgaggcaccgccgctgatcaatgaggacgtgaagcgcacagtggacctaagcagccacctggctaaggtgacggccgaggtggtcctggcgcacctgggcggcggctccacgtcccgagctacctctttcctgctggctttggagcctgagctcgaggcccggctggcgcacctgggcgtgcaggtaaagggagaagatgaggaagagaacaatttggaagtacgtgaaaccaaaattaagggtaaaagtgggagattcttcacagtcaagctcccagttgctcttgatcctggggccaagatttcagtcattgtggaaacagtctacacccatgtgcttcatccatatccaacccagatcacccagtcagagaaacagtttgtggtgtttgaggggaaccattatttctactctccctatccaacgaagacacaaaccatgcgtgtgaagcttgcctctcgaaatgtggagagctacaccaagctggggaaccccacgcgctctgaggacctactggattatgggcctttcagagatgtgcctgcctatagtcaggatacttttaaagtacattatgagaacaacagccctttcctgaccatcaccagcatgacccgagtcattgaagtctctcactggggtaatattgctgtggaagaaaatgtggacttaaagcacacaggagctgtgcttaaggggcctttctcacgctatgattaccagagacagccagatagtggaatatcctccatccgttcttttaagaccatccttcctgctgctgcccaggatgtttattaccgggatgagattggcaatgtttctaccagccacctccttattttggatgactctgtagagatggaaatccggcctcgcttccctctctttggcgggtggaagacccattacatcgttggctacaacctcccaagctatgagtacctctataatttgggtgaccagtatgcactgaagatgaggtttgtggaccatgtgtttgatgaacaagtgatagattctctgactgtgaagatcatcctgcctgaaggagccaagaacattgaaattgatagtccctatgaaatcagccgtgccccagatgagctgcactacacctatctggacacatttggccgccctgtgattgttgcctacaagaaaaatctggtagaacagcacattcaggacattgtggtccactacacgttcaacaaggtgctcatgctgcaggagcccctgctggtggtggcggccttctacatcctgttcttcaccgttatcatctatgttcggctggacttctccatcaccaaggatccagccgcagaagccaggatgaaggtagcctgcatcacagagcaggtcttgaccctggtcaacaagagaataggcctttaccgtcactttgacgagaccgtcaataggtacaagcaatcccgggacatctccaccctcaacagtggcaagaagagcctggagactgaacacaaggccttgaccagtgagattgcactgctgcagtccaggctgaagacagagggctctgatctgtgcgacagagtgagcgaaatgcagaagctggatgcacaggtcaaggagctggtgctgaagtcggcggtggaggctgagcgcctggtggctggcaagctcaagaaagacacgtacattgagaatgagaagctcatctcaggaaagcgccaggagctggtcaccaagatcgaccacatcctggatgccctgtagcccctgcccgcatcctccagggggcccagggtgcctgcactttgctgtggcaggcagattgggtggtagtgggaggttgtgcatggaggccagtgaaagctgacatctgtaaaaggccttcaaggaagagaaaccaggccctgcgtcaggcagtgtgagtttgccgtttgtccttaactttctttttttttttttttaaaaaaagaaaactttaaaaaaactcccattaaaaacaaaacatctttgtgtttaaaaatcatttctcaccaaacacacccgttaaaaaaacgataagaacgcaaacattccctcatgtgctctattgccgacacttgcggtagaccatgcgctttagcatgcttatggtcttatacgctttcaagtctcagaatcactttttggggttgtgaggccggatattactcagtttcccaaaattaaataacgctatgcatttcggcgctattcggacaaatcccctatattggacgataatccatgtccggtcgccggattttactctggtgtccaccggataccgtggcgtcccatac

SEQ ID NO: 406696 - DNA, 1637 bp, Homo sapiens
gtacgagggctgggggtgaatcggccgagggaacaacagccctttcctgaccatcaccagcatgacccgagtcattgaagtctctcactggggtaatattgctgtggaagaaaatgtggacttaaagcacacaggagctgtgcttaaggggcctttctcacgctatgattaccagagacagccagatagtggaatatcctccatccgttcttttaagaccatccttcctgctgctgcccaggatgtttattaccgggatgagattggcaatgtttctaccagccacctccttattttggatgactctgtagagatggaaatccggcctcgcttccctctctttggcgggtggaagacccattacatcgttggctacaacctcccaagctatgagtacctctataatttgggtgaccagtatgcactgaagatgaggtttgtggaccatgtgtttgatgaacaagtgatagattctctgactgtgaagatcatcctgcctgaaggagccaagaacattgaaattgatagtccctatgaaatcagccgtgccccagatgagctgcactacacctatctggacacatttggccgccctgtgattgttgcctacaagaaaaatctggtagaacagcacattcaggacattgtggtccactacacgttcaacaaggtgctcatgctgcaggagcccctgctggtggtggcggccttctacatcctgttcttcaccgttatcatctatgttcggctggacttctccatcaccaaggatccagccgcagaagccaggatgaaggtagcctgcatcacagagcaggtcttgaccctggtcaacaagagaataggcctttaccgtcactttgacgagaccgtcaataggtacaagcaatcccgggacatctccaccctcaacagtggcaagaagagcctggagactgaacacaaggccttgaccagtgagattgcactgctgcagtccaggctgaagacagagggctctgatctgtgcgacagagtgagcgaaatgcagaagctggatgcacaggtcaaggagctggtgctgaagtcggcggtggaggctgagcgcctggtggctggcaagctcaagaaagacacgtacattgagaatgagaagctcatctcaggaaagcgccaggagctggtcaccaagatcgaccacatcctggatgccctgtagcccctgcccgcatcctccagggggcccagggtgcctgcactttgctgtggcaggcagattgggtggtagtgggaggttgtgcatggaggccagtgaaagctgacatctgtaaaaggccttcaaggaagagaaaccaggccctgcgtcaggcagtgtgagtttgccgtttgtccttaactttctttttttttttttttaaaaaaagaaaactttaaaaaaactcccattaaaaacaaaacatctttgtgttttgaacaaaggaattttcaatatttgattggtattctgttctgaagtctaggatatttttcagcctataaagccccctgttttatgcccttctaattctgatgtttgggtattgtgtgagtgcatgtgtttttttttttttttttaaagcgtgtgtgaacaaatggaaataaagcagggactgtgaaca

SEQ ID NO: 406697 - DNA, 1772 bp, Homo sapiens
agcggaatgaacggctgctcagtggcgggagggcgggctaccgcgcccgggccctacccgccctggcgcactgctcttcccggtcatggaggcgccagccgccggcttgtttctgctcctgttgcttgggacttgggccccggcgccgggcagcgcctcctccgaggcaccgccgctgatcaatgaggacgtgaagcgcacagtggacctaagcagccacctggctaaggtgacggccgaggtggtcctggcgcacctgggcggcggctccacgtcccgagctacctctttcctgctggctttggagcctgagctcgaggcccggctggcgcacctgggcgtgcaggtaaagggagaagatgaggaagagaacaatttggaagtacgtgaaaccaaaattaagggtaaaagtgggagattcttcacagtcaagctcccagttgctcttgatcctggggccaagatttcagtcattgtggaaacagtctacacccattacatcgttggctacaacctcccaagctatgagtacctctataatttgggtgaccagtatgcactgaagatgaggtttgtggaccatgtgtttgatgaacaagtgatagattctctgactgtgaagatcatcctgcctgaaggagccaagaacattgaaattgatagtccctatgaaatcagccgtgccccagatgagctgcactacacctatctggacacatttggccgccctgtgattgttgcctacaagaaaaatctggtagaacagcacattcaggacattgtggtccactacacgttcaacaaggtgctcatgctgcaggagcccctgctggtggtggcggccttctacatcctgttcttcaccgttatcatctatgttcggctggacttctccatcaccaaggatccagccgcagaagccaggatgaaggtagcctgcatcacagagcaggtcttgaccctggtcaacaagagaataggcctttaccgtcactttgacgagaccgtcaataggtacaagcaatcccgggacatctccaccctcaacagtggcaagaagagcctggagactgaacacaaggccttgaccagtgagattgcactgctgcagtccaggctgaagacagagggctctgatctgtgcgacagagtgagcgaaatgcagaagctggatgcacaggtcaaggagctggtgctgaagtcggcggtggaggctgagcgcctggtggctggcaagctcaagaaagacacgtacattgagaatgagaagctcatctcaggaaagcgccaggagctggtcaccaagatcgaccacatcctggatgccctgtagcccctgcccgcatcctccagggggcccagggtgcctgcactttgctgtggcaggcagattgggtggtagtgggaggttgtgcatggaggccagtgaaagctgacatctgtaaaaggccttcaaggaagagaaaccaggccctgcgtcaggcagtgtgagtttgccgtttgtccttaactttctttttttttttttttaaaaaaagaaaactttaaaaaaactcccattaaaaacaaaacatctttgtgttttgaacaaaggaattttcaatatttgattggtattctgttctgaagtctaggatatttttcagcctataaagccccctgttttatgcccttctaattctgatgtttgggtattgtgtgagtgcatgtgtttttttttttttttttaaagcgtgtgtgaacaaatggaaataaagcagggactgtgaaca

SEQ ID NO: 406698 - DNA, 1017 bp, Homo sapiens
ccacgcgtccgcacattcaggacattgtggtccactacacgttcaacaaggtgctcatgctgcaggagcccctgctggtggtggcggccttctacatcctgttcttcaccgttatcatctatgttcggctggacttctccatcaccaaggatccagccgcagaagccaggatgaaggtagcctgcatcacagagcaggtcttgaccctggtcaacaagagaataggcctttaccgtcactttgacgagaccgtcaataggtacaagcaatcccgggacatctccaccctcaacagtggcaagaagagcctggagactgaacacaaggccttgaccagtgagattgcactgctgcagtccaggctgaagacagagggctctgatctgtgcgacagagtgagcgaaatgcagaagctggatgcacaggtcaaggagctggtgctgaagtcggcggtggaggctgagcgcctggtggctggcaagctcaagaaagacacgtacattgagaatgagaagctcatctcaggaaagcgccaggagctggtcaccaagatcgaccacatcctggatgccctgtagcccctgcccgcatcctccagggggcccagggtgcctgcactttgctgtggcaggcagattgggtggtagtgggaggttgtgcatggaggccagtgaaagctgacatctgtaaaaggccttcaaggaagagaaaccaggccctgcgtcaggcagtgtgagtttgccgtttgtccttaactttctttttttttttttttaaaaaaagaaaactttaaaaaaactcccattaaaaacaaaacatctttgtgttttgaacaaaggaattttcaatatttgattggtattctgttctgaagtctaggatatttttcagcctataaagccccctgttttatgcccttctaattctgatgtttgggtattgtgtgagtgcatgtgtttttttttttttttttaaagcgtgtgtgaacaaatggaaataaagcagggactgtgaaca

SEQ ID NO: 406699 - DNA, 971 bp, Homo sapiens
agcggaatgaacggctgctcagtggcgggagggcgggctaccgcgcccgggccctacccgccctggcgcactgctcttcccggtcatggaggcgccagccgccggcttgtttctgctcctgttgcttgggacttgggccccggcgccgggcagcgcctcctccgaggcaccgccgctgatcaatgaggacgtgaagcgcacagtggacctaagcagccacctggctaaggtgacggccgaggtggtcctggcgcacctgggcggcggctccacgtcccgagctacctctttcctgctggctttggagcctgagctcgaggcccggctggcgcacctgggcgtgcaggtaaagggagaagatgaggaagagaacaatttggaagtacgtgaaaccaaaattaagggtaaaagtgggagattcttcacagtcaagctcccagttgctcttgatcctggggccaagatttcagtcattgtggaaacagtctacacccatgtgcttcatccatatccaacccagatcacccagtcagagaaacagtttgtggtgtttgaggggaaccattatttctactctccctatccaacgaagacacaaaccatgcgtgtgaagcttgcctctcgaaatgtggagagctacaccaagctggggaaccccacgcgctctgaggacctactggattatgggcctttcagagatgtgcctgcctatagtcaggatacttttaaagtacattatgagaacaacagccctttcctgaccatcaccagcatgacccgagtcattgaagtctctcactggggtaatattgctgtggaagaaaatgtggacttaaagcacacaggagctgtgcttaaggggcctttctcacgctatgattaccagagacagccagatagtggaatatcctccatccgttcttttaagaccatccttctaatgctgcccagatagccggatatattgtaac

SEQ ID NO: 406700 - DNA, 526 bp, Homo sapiens
ggcacgagcgtgtctttcttgagcttgccagccaccaggcgctcagcctccaccgccaagatcgaccacatcctggatgccctgtagcccctgcccgcatcctccagggggcccagggtgcctgcactttgctgtggcaggcagattgggtggtagtgggaggttgtgcatggaggccagtgaaagctgacatctgtaaaaggccttcaaggaagagaaaccaggccctgcgtcaggcagtgtgagtttgccgtttgtccttaactttctttttttttttttttaaaaaaagaaaactttaaaaaaactcccattaaaaacaaaacatctttgtgttttgaacaaaggaattttcaatatttgattggtattctgttctgaagtctaggatatttttcagcctataaagccccctgttttatgcccttctaattctgatgtttgggtattgtgtgagtgcatgtgtttttttttttttttttaaagcgtgtgtgaacaaatggaaataaagcagggactgtgaaca

SEQ ID NO: 406701 - DNA, 806 bp, Homo sapiens
  misc_feature (752)..(752): n is a, c, g, or t
  misc_feature (772)..(772): n is a, c, g, or t
  misc_feature (799)..(799): n is a, c, g, or t
agcggaatgaacggctgctcagtggcgggagggcgggctaccgcgcccgggccctacccgccctggcgcactgctcttcccggtcatggaggcgccagccgccggcttgtttctgctcctgttgcttgggacttgggccccggcgccgggcagcgcctcctccgaggcaccgccgctgatcaatgaggacgtgaagcgcacagtggacctaagcagccacctggctaaggtgacggccgaggtggtcctggcgcacctgggcggcggctccacgtcccgagctacctctttcctgctggctttggagcctgagctcgaggcccggctggcgcacctgggcgtgcaggtaaagggagaagatgaggaagagaacaatttggaagtacgtgaaaccaaaattaagggtaaaagtgggagattcttcacagtcaagctcccagttgctcttgatcctggggccaagatttcagtcattgtggaaacagtctacacccatgtgcttcatccatatccaacccagatcacccagtcagagaaacagtttgtggtgtttgaggggaaccattatttctactctccctatccaacgaagacacaaaccatgcgtgtgaagcttgcctctcgaaatgtggagagctacaccaagctggggaaccccacgcgctctgaggacctactggattatgggcctttcagagatgtgcctgcctatagtcaggatactttttaaagtacattatgagaacaaccangcccttttccttgacccttnaacccagccttgaaccccgaagttcantttgaaa

SEQ ID NO: 406702 - DNA, 372 bp, Homo sapiens
ttggactcacaacgctgtcgtagagctactggtctaaccggctgatcattggcttcatcagcaaacagtacgttactagccttcttctcaatgagcccgacggaacctttctcctccgcttcagcgactcagagattgggggcatcaccattgcccatgtcatccggggccaggatggctctccacagatagagaacatccagccattctctgccaaaaggtgaagccacggcccagcaggatctccttgttgaactgcgaccaggacacagaacggtgctggaaggcctccatactgaggctgttgtcattgaagatcttctgggccaggaagaggaagtgctctgggagcagcccccggttggtccccac

SEQ ID NO: 406703 - DNA, 663 bp, Homo sapiens
  misc_feature (568)..(568): n is a, c, g, or t
ctcatctttgccttctagccctccagcttcctctctcttctaggctctttcctcctagcttactaaacccgccttttttccagtctcttccatcctcttccttagttctctctactttccttttccacctctcctccttcaagtctcctcccaccttcccccacttcttaggatgatcagatttgcccctggaagggatcctaacaacacagtgcgatggttaatccccactcagattcaaagcctgctttccaaacacacatacagagctctctgagggtgatggggctgagcaggaggggggctgggtaagagcacaggttagggcatggaaaagactaacaggagaatgcacagtgggtggagccaatccactccttcctttctatcattcccctgcccacctccttccagcactgactggaagggaagttcaggctctgagacacgccccaacatgcctgcacctgcagcgcgcacacgcacgcacacacacatacagagctctctgagggtgccctcctatcccccagcctgggccagatgagcctgccctttgaccagcctnacccccagggcctgctgccgtgccagcctcaagagcatgctgtgtccagccctgaccccctgctctgctcagatgtgaccatggggggagaccgc

SEQ ID NO: 406704 - DNA, 549 bp, Homo sapiens
tccagggagggacctgggtagaaggagaagccggaaacagcgggctggggcagccactgcttacactgaagagggaggacgggagaggagtgtgtgtgtgtgtgtgtgtgtgtgtgtgtatgtatgtgtgtgctttatcttatttttctttttggtggtggtggtggaaggggggaggtgctagcagggccagccttgaactcgctggacagagctacagacctatggggcctggaagtgcccgctgagaaagggagaagacagcagaggggttgccgaggcaacctccaagtcccagatcatgtctctgtggggtctggtctccaagatgcccccagaaaaagtgcagcggctctatgtcgactttccccaacacctgcggcatcttctgggtgactggctggagagccagccctgagcatatatcagagggaccccctgaagctggtggccactttcagacaaatacttcaaggagagaaggtttgcacaatgtggttcatggtgaccagcggcgatcgggttaccgggatggttctcagtgagccc

SEQ ID NO: 406705 - DNA, 195 bp, Homo sapiens
cctcatcctgatcttcctgcagggagttcctggtcggctccgacgccttctgctgcaacttggctagtgccctactttcagacactgtccagcaccttcaggctcgagatagggagtactgctagaggacagtcagtttgtatatctgcatgatgcgtgatgacactcactgtatagacatctttacactgattc

SEQ ID NO: 406706 - DNA, 544 bp, Homo sapiens
cagagtgagatactatctaaaaaaaaaaaaaaaaaaaaaaaaggaaagaaagaaagaaaagaaacccctgtcctcaccctcttcaggccctgtctctgcccctggtggtcatcgtccatggcaaccaagacaacaatgccaaagccactatcctgtgggacaatgccttctctgagatggaccgcgtgccctttgtggtggctgagcgggtgccctgggagaagatgtgtgaaactctgaacctgaagttcatggctgaggtggggaccaaccgggggctgctcccagagcacttcctcttcctggcccagaagatcttcaatgacaacagcctcagtatggaggccttccagcaccgttctgtgtcctggtcgcagttcaacaaggagatcctgctgggccgtggcttcaccttttggcagtggtttgatggtgtcctggacctcaccaaacgctgtctccggagctactggtctgaccggtgagtccccaccctgggtagtctgagcagccatacaccagtcacctccatactcactgccca

SEQ ID NO: 406707 - DNA, 4768 bp, Homo sapiens
tccagggagggacctgggtagaaggagaagccggaaacagcgggctggggcagccactgcttacactgaagagggaggacgggagaggagtgtgtgtgtgtgtgtgtgtgtgtgtgtgtatgtatgtgtgtgctttatcttatttttctttttggtggtggtggtggaaggggggaggtgctagcagggccagccttgaactcgctggacagagctacagacctatggggcctggaagtgcccgctgagaaagggagaagacagcagaggggttgccgaggcaacctccaagtcccagatcatgtctctgtggggtctggtctccaagatgcccccagaaaaagtgcagcggctctatgtcgactttccccaacacctgcggcatcttctgggtgactggctggagagccagccctgggagttcctggtcggctccgacgccttctgctgcaacttggctagtgccctactttcagacactgtccagcaccttcaggcctcggtgggagagcagggggaggggagcaccatcttgcaacacatcagcacccttgagagcatatatcagagggaccccctgaagctggtggccactttcagacaaatacttcaaggagagaaaaaagctgttatggaacagttccgccacttgccaatgcctttccactggaagcaggaagaactcaagtttaagacaggcttgcggaggctgcagcaccgagtaggggagatccaccttctccgagaagccctgcagaagggggctgaggctggccaagtgtctctgcacagcttgatagaaactcctgctaatgggactgggccaagtgaggccctggccatgctactgcaggagaccactggagagctagaggcagccaaagccctagtgctgaagaggatccagatttggaaacggcagcagcagctggcagggaatggcgcaccgtttgaggagagcctggccccactccaggagaggtgtgaaagcctggtggacatttattcccagctacagcaggaggtaggggcggctggtggggagcttgagcccaagacccgggcatcgctgactggccggctggatgaagtcctgagaaccctcgtcaccagttgcttcctggtggagaagcagcccccccaggtactgaagactcagaccaagttccaggctggagttcgattcctgttgggcttgaggttcctgggggccccagccaagcctccgctggtcagggccgacatggtgacagagaagcaggcgcgggagctgagtgtgcctcagggtcctggggctggagcagaaagcactggagaaatcatcaacaacactgtgcccttggagaacagcattcctgggaactgctgctctgccctgttcaagaacctgcttctcaagaagatcaagcggtgtgagcggaagggcactgagtctgtcacagaggagaagtgcgctgtgctcttctctgccagcttcacacttggccccggcaaactccccatccagctccaggccctgtctctgcccctggtggtcatcgtccatggcaaccaagacaacaatgccaaagccactatcctgtgggacaatgccttctctgagatggaccgcgtgccctttgtggtggctgagcgggtgccctgggagaagatgtgtgaaactctgaacctgaagttcatggctgaggtggggaccaaccgggggctgctcccagagcacttcctcttcctggcccagaagatcttcaatgacaacagcctcagtatggaggccttccagcaccgttctgtgtcctggtcgcagttcaacaaggagatcctgctgggccgtggcttcaccttttggcagtggtttgatggtgtcctggacctcaccaaacgctgtctccggagctactggtctgaccggctgatcattggcttcatcagcaaacagtacgttactagccttcttctcaatgagcccgacggaacctttctcctccgcttcagcgactcagagattgggggcatcaccattgcccatgtcatccggggccaggatggctctccacagatagagaacatccagccattctctgccaaagacctgtccattcgctcactgggggaccgaatccgggatcttgctcagctcaaaaatctctatcccaagaagcccaaggatgaggctttccggagccactacaagcctgaacagatgggtaaggatggcaggggttatgtcccagctaccatcaagatgaccgtggaaagggaccaaccacttcctaccccagagctccagatgcctaccatggtgccttcttatgaccttggaatggcccctgattcctccatgagcatgcagcttggcccagatatggtgccccaggtgtacccaccacactctcactccatccccccgtatcaaggcctctccccagaagaatcagtcaacgtgttgtcagccttccaggagcctcacctgcagatgccccccagcctgggccagatgagcctgccctttgaccagcctcacccccagggcctgctgccgtgccagcctcaggagcatgctgtgtccagccctgaccccctgctctgctcagatgtgaccatggtggaagacagctgcctgagccagccagtgacagcgtttcctcagggcacttggattggtgaagacatattccctcctctgctgcctcccactgaacaggacctcactaagcttctcctggaggggcaaggggagtcggggggagggtccttgggggcacagcccctcctgcagccctcccactatgggcaatctgggatctcaatgtcccacatggacctaagggccaaccccagttggtgatcccagctggagggagaacccaaagagacagctcttctactacccccacagacctgctctggacacttgctcatgccctgccaagcagcagatggggagggtgccctcctatccccacctactcctgggtcaggaggaaaagactaacaggagaatgcacagtgggtggagccaatccactccttcctttctatcattcccctgcccacctccttccagcactgactggaagggaagttcaggctctgagacacgccccaacatgcctgcacctgcagcgcgcacacgcacgcacacacacatacagagctctctgagggtgatggggctgagcaggaggggggctgggtaagagcacaggttagggcatggaaggcttctccgcccattctgacccagggcctaggacggataggcaggaacatacagacacatttacactagaggccagggatagaggatattgggtctcagccctaggggaatgggaagcagctcaagggaccctgggtgggagcataggaggggtctggacatgtggttactagtacaggttttgccctgattaaaaaatctcccaaagccccaaattcctgttagccaggtggaggcttctgatacgtgtatgagactatgcaaaagtacaagggctgagattcttcgtgtatagctgtgtgaacgtgtatgtacctaggatatgttaaatatatagctggcaccttagttgcatgaccacatagaacatgtgtctatctgcttttgcctacgtgacaacacaaatttgggagggtgagacactgcacagaagacagcagcaagtgtgctggcctctctgacatatgctaacccccaaatactctgaatttggagtctgactgtgcccaagtgggtccaagtggctgtgacatctacgtatggctccacacctccaatgctgcctgggagccagggtgagagtctgggtccaggcctggccatgtggccctccagtgtatgagagggccctgcctgctgcatcttttctgttgccccatccaccgccagcttcccttcactcccctatcccattctccctctcaaggcaggggtcatagatcctaagccataaaataaattttattccaaaataacaaaataaataatctactgtacacaatctgaaaagaaagacgctctaactgctcagataggtgctgcggtccagcccccagctggaggagaccctgagtccaacccaggcctcccgagggggccagtgaagggatcccacacccaccgcccctatgtagggcagggaagaaattgcaaaggacttgggggatagatgggaatgggagggcaaactgcagcacttgttaaattaattaaagaaacaaaccagaagcacaaaaacggggaaggagaggggagaaggagcaggtccagtgttcccaggcccccaattctgggggcaaatgttgccacttttagctggaccttcccagggaagtccccctttcccccttgtccaaactgagtccaactgctcacaccactggtgcaaacctaaagagaatgggagtgtgttgtgtgagggaggggaaaaccccagatgccctggaggcagagtccttgccccctcgctctgggcaggggtgagggcaccacgcaccctccttgtgtcctctctccaggcctctgcttgttattgcttgaagccccacagtcttatgcccatggagcaggtggggaggcaggagaagggcagaggaaggatccagggttgtgactagattccggggatggagagcgtgggggtctgtgtgagccagaagtctgaggtcctgggtctgaagacaccagtccaaccctcactgccggctggcctcagcctccactttcacgctgctcctgcgaccctccaccagcgcgggatggggtcct

SEQ ID NO: 406708 - DNA, 4703 bp, Homo sapiens
tccagggagggacctgggtagaaggagaagccggaaacagcgggctggggcagccactgcttacactgaagagggaggacgggagaggagtgtgtgtgtgtgtgtgtgtgtgtgtgtgtatgtatgtgtgtgctttatcttatttttctttttggtggtggtggtggaaggggggaggtgctagcagggccagccttgaactcgctggacagagctacagacctatggggcctggaagtgcccgctgagaaagggagaagacagcagaggggttgccgaggcaacctccaagtcccagatcatgtctctgtggggtctggtctccaagatgcccccagaaaaagtgcagcggctctatgtcgactttccccaacacctgcggcatcttctgggtgactggctggagagccagccctgggagttcctggtcggctccgacgccttctgctgcaacttggctagtgccctactttcagacactgtccagcaccttcaggcctcggtgggagagcagggggaggggagcaccatcttgcaacacatcagcacccttgagagcatatatcagagggaccccctgaagctggtggccactttcagacaaatacttcaaggagagaaaaaagctgttatggaacagttccgccacttgccaatgcctttccactggaagcaggaagaactcaagtttaagacaggcttgcggaggctgcagcaccgagtaggggagatccaccttctccgagaagccctgcagaagggggctgaggctggccaagtgtctctgcacagcttgatagaaactcctgctaatgggactgggccaagtgaggccctggccatgctactgcaggagaccactggagagctagaggcagccaaagccctagtgctgaagaggatccagatttggaaacggcagcagcagctggcagggaatggcgcaccgtttgaggagagcctggccccactccaggagaggtgtgaaagcctggtggacatttattcccagctacagcaggaggtaggggcggctggtggggagcttgagcccaagacccgggcatcgctgactggccggctggatgaagtcctgagaaccctcgtcaccagttgcttcctggtggagaagcagcccccccaggtactgaagactcagaccaagttccaggctggagttcgattcctgttgggcttgaggttcctgggggccccagccaagcctccgctggtcagggccgacatggtgacagagaagcaggcgcgggagctgagtgtgcctcagggtcctggggctggagcagaaagcactggagaaatcatcaacaacactgtgcccttggagaacagcattcctgggaactgctgctctgccctgttcaagaacctgcttctcaagaagatcaagcggtgtgagcggaagggcactgagtctgtcacagaggagaagtgcgctgtgctcttctctgccagcttcacacttggccccggcaaactccccatccagctccaggccctgtctctgcccctggtggtcatcgtccatggcaaccaagacaacaatgccaaagccactatcctgtgggacaatgccttctctgagatggaccgcgtgccctttgtggtggctgagcgggtgccctgggagaagatgtgtgaaactctgaacctgaagttcatggctgaggtggggaccaaccgggggctgctcccagagcacttcctcttcctggcccagaagatcttcaatgacaacagcctcagtatggaggccttccagcaccgttctgtgtcctggtcgcagttcaacaaggagatcctgctgggccgtggcttcaccttttggcagtggtttgatggtgtcctggacctcaccaaacgctgtctccggagctactggtctgaccggctgatcattggcttcatcagcaaacagtacgttactagccttcttctcaatgagcccgacggaacctttctcctccgcttcagcgactcagagattgggggcatcaccattgcccatgtcatccggggccaggatggctctccacagatagagaacatccagccattctctgccaaagacctgtccattcgctcactgggggaccgaatccgggatcttgctcagctcaaaaatctctatcccaagaagcccaaggatgaggctttccggagccactacaagcctgaacagatgggtaaggatggcaggggttatgtcccagctaccatcaagatgaccgtggaaagggaccaaccacttcctaccccagagctccagatgcctaccatggtgccttcttatgaccttggaatggcccctgattcctccatgagcatgcagcttggcccagatatggtgccccaggtgtacccaccacactctcactccatccccccgtatcaaggcctctccccagaagaatcagtcaacgtgttgtcagccttccaggagcctcacctgcagatgccccccagcctgggccagatgagcctgccctttgaccagcctcacccccagggcctgctgccgtgccagcctcaggagcatgctgtgtccagccctgaccccctgctctgctcagatgtgaccatggtggaagacagctgcctgagccagccagtgacagcgtttcctcagggcacttggattggtgaagacatattccctcctctgctgcctcccactgaacaggacctcactaagcttctcctggaggggcaaggggagtcggggggagggtccttgggggcacagcccctcctgcagccctcccactatgggcaatctgggatctcaatgtcccacatggacctaagggccaaccccagttggtgatcccagctggagggagaacccaaagagacagctcttctactacccccacagacctgctctggacacttgctcatgccctgccaagcagcagatggggagggtgccctcctatccccacctactcctgggtcaggaggaaaagactaacaggagaatgcacagtgggtggagccaatccactccttcctttctatcattcccctgcccacctccttccagcactgactggaagggaagttcaggctctgagacacgccccaacatgcctgcacctgcagcgcgcacacgcacgcacacacacatacagagctctctgagggtgatggggctgagcaggaggggggctgggtaagagcacaggttagggcatggaaggcttctccgcccattctgacccagggcctaggacggataggcaggaacatacagacacatttacactagaggccagggatagaggatattgggtctcagccctaggggaatgggaagcagctcaagggaccctgggtgggagcataggaggggtctggacatgtggttactagtacaggttttgccctgattaaaaaatctcccaaagccccaaattcctgttagccaggtggaggcttctgatacgtgtatgagactatgcaaaagtacaagggctgagattcttcgtgtatagctgtgtgaacgtgtatgtacctaggatatgttaaatatatagctggcaccttagttgcatgaccacatagaacatgtgtctatctgcttttgcctacgtgacaacacaaatttgggagggtgagacactgcacagaagacagcagcaagtgtgctggcctctctgacatatgctaacccccaaatactctgaatttggagtctgactgtgcccaagtgggtccaagtggctgtgacatctacgtatggctccacacctccaatgctgcctgggagccagggtgagagtctgggtccaggcctggccatgtggccctccagtgtatgagagggccctgcctgctgcatcttttctgttgccccatccaccgccagcttcccttcactcccctatcccattctccctctcaaggcaggggtcatagatcctaagccataaaataaattttattccaaaataacaaaataaataatctactgtacacaatctgaaaagaaagacgctctaactgctcagataggtgctgcggtccagcccccagctggaggagaccctgagtccaacccaggcctcccgagggggccagtgaagggatcccacacccaccgcccctatgtagggcagggaagaaattgcaaaggacttgggggatagatgggaatgggagggcaaactgcagcacttgttaaattaattaaagaaacaaaccagaagcacaaaaacggggaaggagaggggagaaggagcagggaagtccccctttcccccttgtccaaactgagtccaactgctcacaccactggtgcaaacctaaagagaatgggagtgtgttgtgtgagggaggggaaaaccccagatgccctggaggcagagtccttgccccctcgctctgggcaggggtgagggcaccacgcaccctccttgtgtcctctctccaggcctctgcttgttattgcttgaagccccacagtcttatgcccatggagcaggtggggaggcaggagaagggcagaggaaggatccagggttgtgactagattccggggatggagagcgtgggggtctgtgtgagccagaagtctgaggtcctgggtctgaagacaccagtccaaccctcactgccggctggcctcagcctccactttcacgctgctcctgcgaccctccaccagcgcgggatggggtcct

SEQ ID NO: 406709 - DNA, 4714 bp, Homo sapiens
tccagggagggacctgggtagaaggagaagccggaaacagcgggctggggcagccactgcttacactgaagagggaggacgggagaggagtgtgtgtgtgtgtgtgtgtgtgtgtgtgtatgtatgtgtgtgctttatcttatttttctttttggtggtggtggtggaaggggggaggtgctagcagggccagccttgaactcgctggacagagctacagacctatggggcctggaagtgcccgctgagaaagggagaagacagcagaggggttgccgaggcaacctccaagtcccagatcatgtctctgtggggtctggtctccaagatgcccccagaaaaagtgcagcggctctatgtcgactttccccaacacctgcggcatcttctgggtgactggctggagagccagccctgggagttcctggtcggctccgacgccttctgctgcaacttggctagtgccctactttcagacactgtccagcaccttcaggcctcggtgggagagcagggggaggggagcaccatcttgcaacacatcagcacccttgagagcatatatcagagggaccccctgaagctggtggccactttcagacaaatacttcaaggagagaaaaaagctgttatggaacagttccgccacttgccaatgcctttccactggaagcaggaagaactcaagtttaagacaggcttgcggaggctgcagcaccgagtaggggagatccaccttctccgagaagccctgcagaagggggctgaggctggccaagtgtctctgcacagcttgatagaaactcctgctaatgggactgggccaagtgaggccctggccatgctactgcaggagaccactggagagctagaggcagccaaagccctagtgctgaagaggatccagatttggaaacggcagcagcagctggcagggaatggcgcaccgtttgaggagagcctggccccactccaggagaggtgtgaaagcctggtggacatttattcccagctacagcaggaggtaggggcggctggtggggagcttgagcccaagacccgggcatcgctgactggccggctggatgaagtcctgagaaccctcgtcaccagttgcttcctggtggagaagcagcccccccaggtactgaagactcagaccaagttccaggctggagttcgattcctgttgggcttgaggttcctgggggccccagccaagcctccgctggtcagggccgacatggtgacagagaagcaggcgcgggagctgagtgtgcctcagggtcctggggctggagcagaaagcactggagaaatcatcaacaacactgtgcccttggagaacagcattcctgggaactgctgctctgccctgttcaagaacctgcttctcaagaagatcaagcggtgtgagcggaagggcactgagtctgtcacagaggagaagtgcgctgtgctcttctctgccagcttcacacttggccccggcaaactccccatccagctccaggccctgtctctgcccctggtggtcatcgtccatggcaaccaagacaacaatgccaaagccactatcctgtgggacaatgccttctctgagatggaccgcgtgccctttgtggtggctgagcgggtgccctgggagaagatgtgtgaaactctgaacctgaagttcatggctgaggtggggaccaaccgggggctgctcccagagcacttcctcttcctggcccagaagatcttcaatgacaacagcctcagtatggaggccttccagcaccgttctgtgtcctggtcgcagttcaacaaggagatcctgctgggccgtggcttcaccttttggcagtggtttgatggtgtcctggacctcaccaaacgctgtctccggagctactggtctgaccggctgatcattggcttcatcagcaaacagtacgttactagccttcttctcaatgagcccgacggaacctttctcctccgcttcagcgactcagagattgggggcatcaccattgcccatgtcatccggggccaggatggctctccacagatagagaacatccagccattctctgccaaagacctgtccattcgctcactgggggaccgaatccgggatcttgctcagctcaaaaatctctatcccaagaagcccaaggatgaggctttccggagccactacaagcctgaacagatgggtaaggatggcaggggttatgtcccagctaccatcaagatgaccgtggaaagggaccaaccacttcctaccccagagctccagatgcctaccatggtgccttcttatgaccttggaatggcccctgattcctccatgagcatgcagcttggcccagatatggtgccccaggtgtacccaccacactctcactccatccccccgtatcaaggcctctccccagaagaatcagtcaacgtgttgtcagccttccaggagcctcacctgcagatgccccccagcctgggccagatgagcctgccctttgaccagcctcacccccagggcctgctgccgtgccagcctcaggagcatgctgtgtccagccctgaccccctgctctgctcagatgtgaccatggtggaagacagctgcctgagccagccagtgacagcgtttcctcagggcacttggattggtgaagacatattccctcctctgctgcctcccactgaacaggacctcactaagcttctcctggaggggcaaggggagtcggggggagggtccttgggggcacagcccctcctgcagccctcccactatgggcaatctgggatctcaatgtcccacatggacctaagggccaaccccagttggtgatcccagctggagggagaacccaaagagacagctcttctactacccccacagacctgctctggacacttgctcatgccctgccaagcagcagatggggagggtgccctcctatccccacctactcctgggtcaggaggaaaagactaacaggagaatgcacagtgggtggagccaatccactccttcctttctatcattcccctgcccacctccttccagcactgactggaagggaagttcaggctctgagacacgccccaacatgcctgcacctgcagcgcgcacacgcacgcacacacacatacagagctctctgagggtgatggggctgagcaggaggggggctgggtaagagcacaggttagggcatggaaggcttctccgcccattctgacccagggcctaggacggataggcaggaacatacagacacatttacactagaggccagggatagaggatattgggtctcagccctaggggaatgggaagcagctcaagggaccctgggtgggagcataggaggggtctggacatgtggttactagtacaggttttgccctgattaaaaaatctcccaaagccccaaattcctgttagccaggtggaggcttctgatacgtgtatgagactatgctaggatatgttaaatatatagctggcaccttagttgcatgaccacatagaacatgtgtctatctgcttttgcctacgtgacaacacaaatttgggagggtgagacactgcacagaagacagcagcaagtgtgctggcctctctgacatatgctaacccccaaatactctgaatttggagtctgactgtgcccaagtgggtccaagtggctgtgacatctacgtatggctccacacctccaatgctgcctgggagccagggtgagagtctgggtccaggcctggccatgtggccctccagtgtatgagagggccctgcctgctgcatcttttctgttgccccatccaccgccagcttcccttcactcccctatcccattctccctctcaaggcaggggtcatagatcctaagccataaaataaattttattccaaaataacaaaataaataatctactgtacacaatctgaaaagaaagacgctctaactgctcagataggtgctgcggtccagcccccagctggaggagaccctgagtccaacccaggcctcccgagggggccagtgaagggatcccacacccaccgcccctatgtagggcagggaagaaattgcaaaggacttgggggatagatgggaatgggagggcaaactgcagcacttgttaaattaattaaagaaacaaaccagaagcacaaaaacggggaaggagaggggagaaggagcaggtccagtgttcccaggcccccaattctgggggcaaatgttgccacttttagctggaccttcccagggaagtccccctttcccccttgtccaaactgagtccaactgctcacaccactggtgcaaacctaaagagaatgggagtgtgttgtgtgagggaggggaaaaccccagatgccctggaggcagagtccttgccccctcgctctgggcaggggtgagggcaccacgcaccctccttgtgtcctctctccaggcctctgcttgttattgcttgaagccccacagtcttatgcccatggagcaggtggggaggcaggagaagggcagaggaaggatccagggttgtgactagattccggggatggagagcgtgggggtctgtgtgagccagaagtctgaggtcctgggtctgaagacaccagtccaaccctcactgccggctggcctcagcctccactttcacgctgctcctgcgaccctccaccagcgcgggatggggtcct

SEQ ID NO: 406710 - DNA, 3937 bp, Homo sapiens
tccagggagggacctgggtagaaggagaagccggaaacagcgggctggggcagccactgcttacactgaagagggaggacgggagaggagtgtgtgtgtgtgtgtgtgtgtgtgtgtgtatgtatgtgtgtgctttatcttatttttctttttggtggtggtggtggaaggggggaggtgctagcagggccagccttgaactcgctggacagagctacagacctatggggcctggaagtgcccgctgagaaagggagaagacagcagaggggttgccgaggcaacctccaagtcccagatcatgtctctgtggggtctggtctccaagatgcccccagaaaaagtgcagcggctctatgtcgactttccccaacacctgcggcatcttctgggtgactggctggagagccagccctgggagttcctggtcggctccgacgccttctgctgcaacttggctagtgccctactttcagacactgtccagcaccttcaggcctcggtgggagagcagggggaggggagcaccatcttgcaacacatcagcacccttgagagcatatatcagagggaccccctgaagctggtggccactttcagacaaatacttcaaggagagaaaaaagctgttatggaacagttccgccacttgccaatgcctttccactggaagcaggaagaactcaagtttaagacaggcttgcggaggctgcagcaccgagtaggggagatccaccttctccgagaagccctgcagaagggggctgaggctggccaagtgtctctgcacagcttgatagaaactcctgctaatgggactgggccaagtgaggccctggccatgctactgcaggagaccactggagagctagaggcagccaaagccctagtgctgaagaggatccagatttggaaacggcagcagcagctggcagggaatggcgcaccgtttgaggagagcctggccccactccaggagaggtgtgaaagcctggtggacatttattcccagctacagcaggaggtaggggcggctggtggggagcttgagcccaagacccgggcatcgctgactggccggctggatgaagtcctgagaaccctcgtcaccagttgcttcctggtggagaagcagcccccccaggtactgaagactcagaccaagttccaggctggagttcgattcctgttgggcttgaggttcctgggggccccagccaagcctccgctggtcagggccgacatggtgacagagaagcaggcgcgggagctgagtgtgcctcagggtcctggggctggagcagaaagcactggagaaatcatcaacaacactgtgcccttggagaacagcattcctgggaactgctgctctgccctgttcaagaacctgcttctcaagaagatcaagcggtgtgagcggaagggcactgagtctgtcacagaggagaagtgcgctgtgctcttctctgccagcttcacacttggccccggcaaactccccatccagctccaggccctgtctctgcccctggtggtcatcgtccatggcaaccaagacaacaatgccaaagccactatcctgtgggacaatgccttctctgagatggaccgcgtgccctttgtggtggctgagcgggtgccctgggagaagatgtgtgaaactctgaacctgaagttcatggctgaggtggggaccaaccgggggctgctcccagagcacttcctcttcctggcccagaagatcttcaatgacaacagcctcagtatggaggccttccagcaccgttctgtgtcctggtcgcagttcaacaaggagatcctgctgggccgtggcttcaccttttggcagtggtttgatggtgtcctggacctcaccaaacgctgtctccggagctactggtctgaccggctgatcattggcttcatcagcaaacagtacgttactagccttcttctcaatgagcccgacggaacctttctcctccgcttcagcgactcagagattgggggcatcaccattgcccatgtcatccggggccaggatggctctccacagatagagaacatccagccattctctgccaaagacctgtccattcgctcactgggggaccgaatccgggatcttgctcagctcaaaaatctctatcccaagaagcccaaggatgaggctttccggagccactacaagcctgaacagatgggtaaggatggcaggggttatgtcccagctaccatcaagatgaccgtggaaagggaccaaccacttcctaccccagagctccagatgcctaccatggtgccttcttatgaccttggaatggcccctgattcctccatgagcatgcagcttggcccagatatggtgccccaggtgtacccaccacactctcactccatccccccgtatcaaggcctctccccagaagaatcagtcaacgtgttgtcagccttccaggagcctcacctgcagatgccccccagcctgggccagatgagcctgccctttgaccagcctcacccccagggcctgctgccgtgccagcctcaggagcatgctgtgtccagccctgaccccctgctctgctcagatgtgaccatggtggaagacagctgcctgagccagccagtgacagcgtttcctcagggcacttggattggtgaagacatattccctcctctgctgcctcccactgaacaggacctcactaagcttctcctggaggggcaaggggagtcggggggagggtccttgggggcacagcccctcctgcagccctcccactatgggcaatctgggatctcaatgtcccacatggacctaagggccaaccccagttggtgatcccagctggagggagaacccaaagagacagctcttctactacccccacagacctgctctggacacttgctcatgccctgccaagcagcagatggggagggtgccctcctatccccacctactcctgggtcaggaggaaaagactaacaggagaatgcacagtgggtggagccaatccactccttcctttctatcattcccctgcccacctccttccagcactgactggaagggaagttcaggctctgagacacgccccaacatgcctgcacctgcagcgcgcacacgcacgcacacacacatacagagctctctgagggtgatggggctgagcaggaggggggctgggtaagagcacaggttagggcatggaaggcttctccgcccattctgacccagggcctaggacggataggcaggaacatacagacacatttacactagaggccagggatagaggatattgggtctcagccctaggggaatgggaagcagctcaagggaccctgggtgggagcataggaggggtctggacatgtggttactagtacaggttttgccctgattaaaaaatctcccaaagccccaaattcctgttagccaggtggaggcttctgatacgtgtatgagactatgcaaaagtacaagggctgagattcttcgtgtatagctgtgtgaacgtgtatgtacctaggatatgttaaatatatagctggcaccttagttgcatgaccacatagaacatgtgtctatctgcttttgcctacgtgacaacacaaatttgggagggtgagacactgcacagaagacagcagcaagttggctgtgacatctacgtatggctccacacctccaatgctgcctgggagccagggtgagagtctgggtccaggcctggccatgtggccctccagtgtatgagagggccctgcctgctgcatcttttctgttgccccatccaccgccagcttcccttcactcccctatcccattctccctctcaaggcaggggtcatagatcctaagccataaaataaattttattccaaaataacaaaataaataatctactgtacacaatctgaaaagaaa

SEQ ID NO: 406711 - DNA, 3578 bp, Homo sapiens
tccagggagggacctgggtagaaggagaagccggaaacagcgggctggggcagccactgcttacactgaagagggaggacgggagaggagtgtgtgtgtgtgtgtgtgtgtgtgtgtgtatgtatgtgtgtgctttatcttatttttctttttggtggtggtggtggaaggggggaggtgctagcagggccagccttgaactcgctggacagagctacagacctatggggcctggaagtgcccgctgagaaagggagaagacagcagaggggttgccgaggcaacctccaagtcccagatcatgtctctgtggggtctggtctccaagatgcccccagaaaaagtgcagcggctctatgtcgactttccccaacacctgcggcatcttctgggtgactggctggagagccagccctgggagttcctggtcggctccgacgccttctgctgcaacttggctagtgccctactttcagacactgtccagcaccttcaggcctcggtgggagagcagggggaggggagcaccatcttgcaacacatcagcacccttgagagcatatatcagagggaccccctgaagctggtggccactttcagacaaatacttcaaggagagaaaaaagctgttatggaacagttccgccacttgccaatgcctttccactggaagcaggaagaactcaagtttaagacaggcttgcggaggctgcagcaccgagtaggggagatccaccttctccgagaagccctgcagaagggggctgaggctggccaagtgtctctgcacagcttgatagaaactcctgctaatgggactgggccaagtgaggccctggccatgctactgcaggagaccactggagagctagaggcagccaaagccctagtgctgaagaggatccagatttggaaacggcagcagcagctggcagggaatggcgcaccgtttgaggagagcctggccccactccaggagaggtgtgaaagcctggtggacatttattcccagctacagcaggaggtaggggcggctggtggggagcttgagcccaagacccgggcatcgctgactggccggctggatgaagtcctgagaaccctcgtcaccagttgcttcctggtggagaagcagcccccccaggtactgaagactcagaccaagttccaggctggagttcgattcctgttgggcttgaggttcctgggggccccagccaagcctccgctggtcagggccgacatggtgacagagaagcaggcgcgggagctgagtgtgcctcagggtcctggggctggagcagaaagcactggagaaatcatcaacaacactgtgcccttggagaacagcattcctgggaactgctgctctgccctgttcaagaacctgcttctcaagaagatcaagcggtgtgagcggaagggcactgagtctgtcacagaggagaagtgcgctgtgctcttctctgccagcttcacacttggccccggcaaactccccatccagctccaggccctgtctctgcccctggtggtcatcgtccatggcaaccaagacaacaatgccaaagccactatcctgtgggacaatgccttctctgagatggaccgcgtgccctttgtggtggctgagcgggtgccctgggagaagatgtgtgaaactctgaacctgaagttcatggctgaggtggggaccaaccgggggctgctcccagagcacttcctcttcctggcccagaagatcttcaatgacaacagcctcagtatggaggccttccagcaccgttctgtgtcctggtcgcagttcaacaaggagatcctgctgggccgtggcttcaccttttggcagtggtttgatggtgtcctggacctcaccaaacgctgtctccggagctactggtctgaccggctgatcattggcttcatcagcaaacagtacgttactagccttcttctcaatgagcccgacggaacctttctcctccgcttcagcgactcagagattgggggcatcaccattgcccatgtcatccggggccaggatggctctccacagatagagaacatccagccattctctgccaaagacctgtccattcgctcactgggggaccgaatccgggatcttgctcagctcaaaaatctctatcccaagaagcccaaggatgaggctttccggagccactacaagcctgaacagatgggtaaggatggcaggggttatgtcccagctaccatcaagatgaccgtggaaagggaccaaccacttcctaccccagagctccagatgcctaccatggtgccttcttatgaccttggaatggcccctgattcctccatgagcatgcagcttggcccagatatggtgccccaggtgtacccaccacactctcactccatccccccgtatcaaggcctctccccagaagaatcagtcaacgtgttgtcagccttccaggagcctcacctgcagatgccccccagcctgggccagatgagcctgccctttgaccagcctcacccccagggcctgctgccgtgccagcctcaggagcatgctgtgtccagccctgaccccctgctctgctcagatgtgaccatggtggaagacagctgcctgagccagccagtgacagcgtttcctcagggcacttggattggtgaagacatattccctcctctgctgcctcccactgaacaggacctcactaagcttctcctggaggggcaaggggagtcggggggagggtccttgggggcacagcccctcctgcagccctcccactatgggcaatctgggatctcaatgtcccacatggacctaagggccaaccccagttggtgatcccagctggagggagaacccaaagagacagctcttctactacccccacagacctgctctggacacttgctcatgccctgccaagcagcagatggggagggtgccctcctatccccacctactcctgggtcaggaggaaaagactaacaggagaatgcacagtgggtggagccaatccactccttcctttctatcattcccctgcccacctccttccagcactgactggaagggaagttcaggctctgagacacgccccaacatgcctgcacctgcagcgcgcacacgcacgcacacacacatacagagctctctgagggtgatggggctgagcaggaggggggctgggtaagagcacaggttagggcatggaaggcttctccgcccattctgacccagggcctaggacggataggcaggaacatacagacacatttacactagaggccagggatagaggatattgggtctcagccctaggggaatgggaagcagctcaagggaccctgggtgggagcataggaggggtctggacatgtggttactagtacaggttttgccctgattaaaaaatctcccaaagccccaaattcctgttagccaggtggaggcttctgatacgtgtatgagactatgcaaaagtacaagggctgagattcttcgtgtatagctgtgtgaacgtgtatgtacctaggatatgttaaatatatagctggcaccttagttgcatgac

SEQ ID NO: 406712 - DNA, 4340 bp, Homo sapiens
tccagggagggacctgggtagaaggagaagccggaaacagcgggctggggcagccactgcttacactgaagagggaggacgggagaggagtgtgtgtgtgtgtgtgtgtgtgtgtgtgtatgtatgtgtgtgctttatcttatttttctttttggtggtggtggtggaaggggggaggtgctagcagggccagccttgaactcgctggacagagctacagacctatggggcctggaagtgcccgctgagaaagggagaagacagcagaggggttgccgaggcaacctccaagtcccagatcatgtctctgtggggtctggtctccaagatgcccccagaaaaagtgcagcggctctatgtcgactttccccaacacctgcggcatcttctgggtgactggctggagagccagccctgggagttcctggtcggctccgacgccttctgctgcaacttggctagtgccctactttcagacactgtccagcaccttcaggcctcggtgggagagcagggggaggggagcaccatcttgcaacacatcagcacccttgagagcatatatcagagggaccccctgaagctggtggccactttcagacaaatacttcaaggagagaaaaaagctgttatggaacagttccgccacttgccaatgcctttccactggaagcaggaagaactcaagtttaagacaggcttgcggaggctgcagcaccgagtaggggagatccaccttctccgagaagccctgcagaagggggctgaggctggccaagtgtctctgcacagcttgatagaaactcctgctaatgggactgggccaagtgaggccctggccatgctactgcaggagaccactggagagctagaggcagccaaagccctagtgctgaagaggatccagatttggaaacggcagcagcagctggcagggaatggcgcaccgtttgaggagagcctggccccactccaggagaggtgtgaaagcctggtggacatttattcccagctacagcaggaggtaggggcggctggtggggagcttgagcccaagacccgggcatcgctgactggccggctggatgaagtcctgagaaccctcgtcaccagttgcttcctggtggagaagcagcccccccaggtactgaagactcagaccaagttccaggctggagttcgattcctgttgggcttgaggttcctgggggccccagccaagcctccgctggtcagggccgacatggtgacagagaagcaggcgcgggagctgagtgtgcctcagggtcctggggctggagcagaaagcactggagaaatcatcaacaacactgtgcccttggagaacagcattcctgggaactgctgctctgccctgttcaagaacctgcttctcaagaagatcaagcggtgtgagcggaagggcactgagtctgtcacagaggagaagtgcgctgtgctcttctctgccagcttcacacttggccccggcaaactccccatccagctccaggccctgtctctgcccctggtggtcatcgtccatggcaaccaagacaacaatgccaaagccactatcctgtgggacaatgccttctctgagatggaccgcgtgccctttgtggtggctgagcgggtgccctgggagaagatgtgtgaaactctgaacctgaagttcatggctgaggtggggaccaaccgggggctgctcccagagcacttcctcttcctggcccagaagatcttcaatgacaacagcctcagtatggaggccttccagcaccgttctgtgtcctggtcgcagttcaacaaggagatcctgctgggccgtggcttcaccttttggcagtggtttgatggtgtcctggacctcaccaaacgctgtctccggagctactggtctgaccggctgatcattggcttcatcagcaaacagtacgttactagccttcttctcaatgagcccgacggaacctttctcctccgcttcagcgactcagagattgggggcatcaccattgcccatgtcatccggggccaggatggctctccacagatagagaacatccagccattctctgccaaagacctgtccattcgctcactgggggaccgaatccgggatcttgctcagctcaaaaatctctatcccaagaagcccaaggatgaggctttccggagccactacaagcgtgagctggaactggcagctctgattccttcctgtcacccacttcctccctgctccccgctgccctcctctccctgcccgtgtgtcatcctgatgtcactccctatttcatagctgtgcttctcttacttccccatgatccatgcccaccttttccacctcccttcctccctaaccccagagcactccatggctgtcttttccttctcacaacagctgaacagatgggtaaggatggcaggggttatgtcccagctaccatcaagatgaccgtggaaaggtgagtgtggtggtatggacagtgggtaggtcaggggcttagtgcttatctgcaggaaggaggggtggcatcaacccttggtcagtcacatgtacctccttccctcctccagggaccaaccacttcctaccccagagctccagatgcctaccatggtgccttcttatgaccttggaatggcccctgattcctccatgagcatgcagcttggcccagatatggtgccccaggtgtacccaccacactctcactccatccccccgtatcaaggcctctccccagaagaatcagtcaacgtgttgtcagccttccaggagcctcacctgcagatgccccccagcctgggccagatgagcctgccctttgaccagcctcacccccagggcctgctgccgtgccagcctcaggagcatgctgtgtccagccctgaccccctgctctgctcagatgtgaccatggtggaagacagctgcctgagccagccagtgacagcgtttcctcagggcacttggattggtgaagacatattccctcctctgctgcctcccactgaacaggacctcactaagcttctcctggaggggcaaggggagtcggggggagggtccttgggggcacagcccctcctgcagccctcccactatgggcaatctgggatctcaatgtcccacatggacctaagggccaaccccagttggtgatcccagctggagggagaacccaaagagacagctcttctactacccccacagacctgctctggacacttgctcatgccctgccaagcagcagatggggagggtgccctcctatccccacctactcctgggtcaggaggaaaagactaacaggagaatgcacagtgggtggagccaatccactccttcctttctatcattcccctgcccacctccttccagcactgactggaagggaagttcaggctctgagacacgccccaacatgcctgcacctgcagcgcgcacacgcacgcacacacacatacagagctctctgagggtgatggggctgagcaggaggggggctgggtaagagcacaggttagggcatggaaggcttctccgcccattctgacccagggcctaggacggataggcaggaacatacagacacatttacactagaggccagggatagaggatattgggtctcagccctaggggaatgggaagcagctcaagggaccctgggtgggagcataggaggggtctggacatgtggttactagtacaggttttgccctgattaaaaaatctcccaaagccccaaattcctgttagccaggtggaggcttctgatacgtgtatgagactatgcaaaagtacaagggctgagattcttcgtgtatagctgtgtgaacgtgtatgtacctaggatatgttaaatatatagctggcaccttagttgcatgaccacatagaacatgtgtctatctgcttttgcctacgtgacaacacaaatttgggagggtgagacactgcacagaagacagcagcaagtgtgctggcctctctgacatatgctaacccccaaatactctgaatttggagtctgactgtgcccaagtgggtccaagtggctgtgacatctacgtatggctccacacctccaatgctgcctgggagccagggtgagagtctgggtccaggcctggccatgtggccctccagtgtatgagagggccctgcctgctgcatcttttctgttgccccatccaccgccagcttcccttcactcccctatcccattctccctctcaaggcaggggtcatagatcctaagccataaaataaattttattccaaaataacaaaataaataatctactgtacacaatctgaaaagaaa

SEQ ID NO: 406713 - DNA, 4339 bp, Homo sapiens
tccagggagggacctgggtagaaggagaagccggaaacagcgggctggggcagccactgcttacactgaagagggaggacgggagaggagtgtgtgtgtgtgtgtgtgtgtgtgtgtgtatgtatgtgtgtgctttatcttatttttctttttggtggtggtggtggaaggggggaggtgctagcagggccagccttgaactcgctggacagagctacagacctatggggcctggaagtgcccgctgagaaagggagaagacagcagaggggttgccgaggcaacctccaagtcccagatcatgtctctgtggggtctggtctccaagatgcccccagaaaaagtgcagcggctctatgtcgactttccccaacacctgcggcatcttctgggtgactggctggagagccagccctgggagttcctggtcggctccgacgccttctgctgcaacttggctagtgccctactttcagacactgtccagcaccttcaggcctcggtgggagagcagggggaggggagcaccatcttgcaacacatcagcacccttgagagcatatatcagagggaccccctgaagctggtggccactttcagacaaatacttcaaggagagaaaaaagctgttatggaacagttccgccacttgccaatgcctttccactggaagcaggaagaactcaagtttaagacaggcttgcggaggctgcagcaccgagtaggggagatccaccttctccgagaagccctgcagaagggggctgaggctggccaagtgtctctgcacagcttgatagaaactcctgctaatgggactgggccaagtgaggccctggccatgctactgcaggagaccactggagagctagaggcagccaaagccctagtgctgaagaggatccagatttggaaacggcagcagcagctggcagggaatggcgcaccgtttgaggagagcctggccccactccaggagaggtgtgaaagcctggtggacatttattcccagctacagcaggaggtaggggcggctggtggggagcttgagcccaagacccgggcatcgctgactggccggctggatgaagtcctgagaaccctcgtcaccagttgcttcctggtggagaagcagcccccccaggtactgaagactcagaccaagttccaggctggagttcgattcctgttgggcttgaggttcctgggggccccagccaagcctccgctggtcagggccgacatggtgacagagaagcaggcgcgggagctgagtgtgcctcagggtcctggggctggagcagaaagcactggagaaatcatcaacaacactgtgcccttggagaacagcattcctgggaactgctgctctgccctgttcaagaacctgcttctcaagaagatcaagcggtgtgagcggaagggcactgagtctgtcacagaggagaagtgcgctgtgctcttctctgccagcttcacacttggccccggcaaactccccatccagctccaggccctgtctctgcccctggtggtcatcgtccatggcaaccaagacaacaatgccaaagccactatcctgtgggacaatgccttctctgagatggaccgcgtgccctttgtggtggctgagcgggtgccctgggagaagatgtgtgaaactctgaacctgaagttcatggctgaggtggggaccaaccgggggctgctcccagagcacttcctcttcctggcccagaagatcttcaatgacaacagcctcagtatggaggccttccagcaccgttctgtgtcctggtcgcagttcaacaaggagatcctgctgggccgtggcttcaccttttggcagtggtttgatggtgtcctggacctcaccaaacgctgtctccggagctactggtctgaccggctgatcattggcttcatcagcaaacagtacgttactagccttcttctcaatgagcccgacggaacctttctcctccgcttcagcgactcagagattgggggcatcaccattgcccatgtcatccggggccaggatggtgaggccaccccagccagtcctctgtctctgtgcctgtgccctctggggtttcttctgggaatgaaatgtcctgaccttcctgatgccgatcctgatcttcaggaagttcttccagcttctcttcttccttctgtggtctaaatgttcaccttctcactgtgagctctgtgggaacggagactagtgggtctctctccctcaggagccccaccctaggtcctctctcccttgccttggtggagtgagaacaggtcttatggtaggggttggggaaggggaagaaagtccggacagagggatctcagggtctccttcctaccataggctctccacagatagagaacatccagccattctctgccaaagacctgtccattcgctcactgggggaccgaatccgggatcttgctcagctcaaaaatctctatcccaagaagcccaaggatgaggctttccggagccactacaagcctgaacagatgggtaaggatggcaggggttatgtcccagctaccatcaagatgaccgtggaaagggaccaaccacttcctaccccagagctccagatgcctaccatggtgccttcttatgaccttggaatggcccctgattcctccatgagcatgcagcttggcccagatatggtgccccaggtgtacccaccacactctcactccatccccccgtatcaaggcctctccccagaagaatcagtcaacgtgttgtcagccttccaggagcctcacctgcagatgccccccagcctgggccagatgagcctgccctttgaccagcctcacccccagggcctgctgccgtgccagcctcaggagcatgctgtgtccagccctgaccccctgctctgctcagatgtgaccatggtggaagacagctgcctgagccagccagtgacagcgtttcctcagggcacttggattggtgaagacatattccctcctctgctgcctcccactgaacaggacctcactaagcttctcctggaggggcaaggggagtcggggggagggtccttgggggcacagcccctcctgcagccctcccactatgggcaatctgggatctcaatgtcccacatggacctaagggccaaccccagttggtgatcccagctggagggagaacccaaagagacagctcttctactacccccacagacctgctctggacacttgctcatgccctgccaagcagcagatggggagggtgccctcctatccccacctactcctgggtcaggaggaaaagactaacaggagaatgcacagtgggtggagccaatccactccttcctttctatcattcccctgcccacctccttccagcactgactggaagggaagttcaggctctgagacacgccccaacatgcctgcacctgcagcgcgcacacgcacgcacacacacatacagagctctctgagggtgatggggctgagcaggaggggggctgggtaagagcacaggttagggcatggaaggcttctccgcccattctgacccagggcctaggacggataggcaggaacatacagacacatttacactagaggccagggatagaggatattgggtctcagccctaggggaatgggaagcagctcaagggaccctgggtgggagcataggaggggtctggacatgtggttactagtacaggttttgccctgattaaaaaatctcccaaagccccaaattcctgttagccaggtggaggcttctgatacgtgtatgagactatgcaaaagtacaagggctgagattcttcgtgtatagctgtgtgaacgtgtatgtacctaggatatgttaaatatatagctggcaccttagttgcatgaccacatagaacatgtgtctatctgcttttgcctacgtgacaacacaaatttgggagggtgagacactgcacagaagacagcagcaagtgtgctggcctctctgacatatgctaacccccaaatactctgaatttggagtctgactgtgcccaagtgggtccaagtggctgtgacatctacgtatggctccacacctccaatgctgcctgggagccagggtgagagtctgggtccaggcctggccatgtggccctccagtgtatgagagggccctgcctgctgcatcttttctgttgccccatccaccgccagcttcccttcactcccctatcccattctccctctcaaggcaggggtcatagatcctaagccataaaataaattttattccaaaataacaaaataaataatctactgtacacaatctgaaaagaaa

SEQ ID NO: 406714 - DNA, 2593 bp, Homo sapiens
ccgatcccctggaacatgctgccaagcatggctgggacatcaacaaggatgcctgccctgtatgcagccccaattgggctcccttcaggcacggccctgtctctgcccctggtggtcatcgtccatggcaaccaagacaacaatgccaaagccactatcctgtgggacaatgccttctctgagatggaccgcgtgccctttgtggtggctgagcgggtgccctgggagaagatgtgtgaaactctgaacctgaagttcatggctgaggtggggaccaaccgggggctgctcccagagcacttcctcttcctggcccagaagatcttcaatgacaacagcctcagtatggaggccttccagcaccgttctgtgtcctggtcgcagttcaacaaggagatcctgctgggccgtggcttcaccttttggcagtggtttgatggtgtcctggacctcaccaaacgctgtctccggagctactggtctgaccggctgatcattggcttcatcagcaaacagtacgttactagccttcttctcaatgagcccgacggaacctttctcctccgcttcagcgactcagagattgggggcatcaccattgcccatgtcatccggggccaggatggctctccacagatagagaacatccagccattctctgccaaagacctgtccattcgctcactgggggaccgaatccgggatcttgctcagctcaaaaatctctatcccaagaagcccaaggatgaggctttccggagccactacaagcctgaacagatgggtaaggatggcaggggttatgtcccagctaccatcaagatgaccgtggaaagggaccaaccacttcctaccccagagctccagatgcctaccatggtgccttcttatgaccttggaatggcccctgattcctccatgagcatgcagcttggcccagatatggtgccccaggtgtacccaccacactctcactccatccccccgtatcaaggcctctccccagaagaatcagtcaacgtgttgtcagccttccaggagcctcacctgcagatgccccccagcctgggccagatgagcctgccctttgaccagcctcacccccagggcctgctgccgtgccagcctcaggagcatgctgtgtccagccctgaccccctgctctgctcagatgtgaccatggtggaagacagctgcctgagccagccagtgacagcgtttcctcagggcacttggattggtgaagacatattccctcctctgctgcctcccactgaacaggacctcactaagcttctcctggaggggcaaggggagtcggggggagggtccttgggggcacagcccctcctgcagccctcccactatgggcaatctgggatctcaatgtcccacatggacctaagggccaaccccagttggtgatcccagctggagggagaacccaaagagacagctcttctactacccccacagacctgctctggacacttgctcatgccctgccaagcagcagatggggagggtgccctcctatccccacctactcctgggtcaggaggaaaagactaacaggagaatgcacagtgggtggagccaatccactccttcctttctatcattcccctgcccacctccttccagcactgactggaagggaagttcaggctctgagacacgccccaacatgcctgcacctgcagcgcgcacacgcacgcacacacacatacagagctctctgagggtgatggggctgagcaggaggggggctgggtaagagcacaggttagggcatggaaggcttctccgcccattctgacccagggcctaggacggataggcaggaacatacagacacatttacactagaggccagggatagaggatattgggtctcagccctaggggaatgggaagcagctcaagggaccctgggtgggagcataggaggggtctggacatgtggttactagtacaggttttgccctgattaaaaaatctcccaaagccccaaattcctgttagccaggtggaggcttctgatacgtgtatgagactatgcaaaagtacaagggctgagattcttcgtgtatagctgtgtgaacgtgtatgtacctaggatatgttaaatatatagctggcaccttagttgcatgaccacatagaacatgtgtctatctgcttttgcctacgtgacaacacaaatttgggagggtgagacactgcacagaagacagcagcaagtgtgctggcctctctgacatatgctaacccccaaatactctgaatttggagtctgactgtgcccaagtgggtccaagtggctgtgacatctacgtatggctccacacctccaatgctgcctgggagccagggtgagagtctgggtccaggcctggccatgtggccctccagtgtatgagagggccctgcctgctgcatcttttctgttgccccatccaccgccagcttcccttcactcccctatcccattctccctctcaaggcaggggtcatagatcctaagccataaaataaattttattccaaaataacaaaataaataatctactgtacacaatctgaaaagaaa

SEQ ID NO: 406715 - DNA, 2431 bp, Homo sapiens
cttcgggcactctagcaggatcttgaccgcgtgccctttgtggtggctgagcgggtgccctgggagaagatgtgtgaaactctgaacctgaagttcatggctgaggtggggaccaaccgggggctgctcccagagcacttcctcttcctggcccagaagatcttcaatgacaacagcctcagtatggaggccttccagcaccgttctgtgtcctggtcgcagttcaacaaggagatcctgctgggccgtggcttcaccttttggcagtggtttgatggtgtcctggacctcaccaaacgctgtctccggagctactggtctgaccggctgatcattggcttcatcagcaaacagtacgttactagccttcttctcaatgagcccgacggaacctttctcctccgcttcagcgactcagagattgggggcatcaccattgcccatgtcatccggggccaggatggctctccacagatagagaacatccagccattctctgccaaagacctgtccattcgctcactgggggaccgaatccgggatcttgctcagctcaaaaatctctatcccaagaagcccaaggatgaggctttccggagccactacaagcctgaacagatgggtaaggatggcaggggttatgtcccagctaccatcaagatgaccgtggaaagggaccaaccacttcctaccccagagctccagatgcctaccatggtgccttcttatgaccttggaatggcccctgattcctccatgagcatgcagcttggcccagatatggtgccccaggtgtacccaccacactctcactccatccccccgtatcaaggcctctccccagaagaatcagtcaacgtgttgtcagccttccaggagcctcacctgcagatgccccccagcctgggccagatgagcctgccctttgaccagcctcacccccagggcctgctgccgtgccagcctcaggagcatgctgtgtccagccctgaccccctgctctgctcagatgtgaccatggtggaagacagctgcctgagccagccagtgacagcgtttcctcagggcacttggattggtgaagacatattccctcctctgctgcctcccactgaacaggacctcactaagcttctcctggaggggcaaggggagtcggggggagggtccttgggggcacagcccctcctgcagccctcccactatgggcaatctgggatctcaatgtcccacatggacctaagggccaaccccagttggtgatcccagctggagggagaacccaaagagacagctcttctactacccccacagacctgctctggacacttgctcatgccctgccaagcagcagatggggagggtgccctcctatccccacctactcctgggtcaggaggaaaagactaacaggagaatgcacagtgggtggagccaatccactccttcctttctatcattcccctgcccacctccttccagcactgactggaagggaagttcaggctctgagacacgccccaacatgcctgcacctgcagcgcgcacacgcacgcacacacacatacagagctctctgagggtgatggggctgagcaggaggggggctgggtaagagcacaggttagggcatggaaggcttctccgcccattctgacccagggcctaggacggataggcaggaacatacagacacatttacactagaggccagggatagaggatattgggtctcagccctaggggaatgggaagcagctcaagggaccctgggtgggagcataggaggggtctggacatgtggttactagtacaggttttgccctgattaaaaaatctcccaaagccccaaattcctgttagccaggtggaggcttctgatacgtgtatgagactatgcaaaagtacaagggctgagattcttcgtgtatagctgtgtgaacgtgtatgtacctaggatatgttaaatatatagctggcaccttagttgcatgaccacatagaacatgtgtctatctgcttttgcctacgtgacaacacaaatttgggagggtgagacactgcacagaagacagcagcaagtgtgctggcctctctgacatatgctaacccccaaatactctgaatttggagtctgactgtgcccaagtgggtccaagtggctgtgacatctacgtatggctccacacctccaatgctgcctgggagccagggtgagagtctgggtccaggcctggccatgtggccctccagtgtatgagagggccctgcctgctgcatcttttctgttgccccatccaccgccagcttcccttcactcccctatcccattctccctctcaaggcaggggtcatagatcctaagccataaaataaattttattccaaaataacaaaataaataatctactgtacacaatctgaaaagaaa

SEQ ID NO: 406716 - DNA, 4415 bp, Homo sapiens
tccagggagggacctgggtagaaggagaagccggaaacagcgggctggggcagccactgcttacactgaagagggaggacgggagaggagtgtgtgtgtgtgtgtgtgtgtgtgtgtgtatgtatgtgtgtgctttatcttatttttctttttggtggtggtggtggaaggggggaggtgctagcagggccagccttgaactcgctggacagagctacagacctatggggcctggaagtgcccgctgagaaagggagaagacagcagaggggttgccgaggcaacctccaagtcccagatcatgtctctgtggggtctggtctccaagatgcccccagaaaaagtgcagcggctctatgtcgactttccccaacacctgcggcatcttctgggtgactggctggagagccagccctgagcatatatcagagggaccccctgaagctggtggccactttcagacaaatacttcaaggagagaaaaaagctgttatggaacagttccgccacttgccaatgcctttccactggaagcaggaagaactcaagtttaagacaggcttgcggaggctgcagcaccgagtaggggagatccaccttctccgagaagccctgcagaagggggctgaggctggccaagtgtctctgcacagcttgatagaaactcctgctaatgggactgggccaagtgaggccctggccatgctactgcaggagaccactggagagctagaggcagccaaagccctagtgctgaagaggatccagatttggaaacggcagcagcagctggcagggaatggcgcaccgtttgaggagagcctggccccactccaggagaggtgtgaaagcctggtggacatttattcccagctacagcaggaggtaggggcggctggtggggagcttgagcccaagacccgggcatcgctgactggccggctggatgaagtcctgagaaccctcgtcaccagttgcttcctggtggagaagcagcccccccaggtactgaagactcagaccaagttccaggctggagttcgattcctgttgggcttgaggttcctgggggccccagccaagcctccgctggtcagggccgacatggtgacagagaagcaggcgcgggagctgagtgtgcctcagggtcctggggctggagcagaaagcactggagaaatcatcaacaacactgtgcccttggagaacagcattcctgggaactgctgctctgccctgttcaagaacctgcttctcaagaagatcaagcggtgtgagcggaagggcactgagtctgtcacagaggagaagtgcgctgtgctcttctctgccagcttcacacttggccccggcaaactccccatccagctccaggccctgtctctgcccctggtggtcatcgtccatggcaaccaagacaacaatgccaaagccactatcctgtgggacaatgccttctctgagatggaccgcgtgccctttgtggtggctgagcgggtgccctgggagaagatgtgtgaaactctgaacctgaagttcatggctgaggtggggaccaaccgggggctgctcccagagcacttcctcttcctggcccagaagatcttcaatgacaacagcctcagtatggaggccttccagcaccgttctgtgtcctggtcgcagttcaacaaggagatcctgctgggccgtggcttcaccttttggcagtggtttgatggtgtcctggacctcaccaaacgctgtctccggagctactggtctgaccggctgatcattggcttcatcagcaaacagtacgttactagccttcttctcaatgagcccgacggaacctttctcctccgcttcagcgactcagagattgggggcatcaccattgcccatgtcatccggggccaggatggtgaggccaccccagccagtcctctgtctctgtgcctgtgccctctggggtttcttctgggaatgaaatgtcctgaccttcctgatgccgatcctgatcttcaggaagttcttccagcttctcttcttccttctgtggtctaaatgttcaccttctcactgtgagctctgtgggaacggagactagtgggtctctctccctcaggagccccaccctaggtcctctctcccttgccttggtggagtgagaacaggtcttatggtaggggttggggaaggggaagaaagtccggacagagggatctcagggtctccttcctaccataggctctccacagatagagaacatccagccattctctgccaaagacctgtccattcgctcactgggggaccgaatccgggatcttgctcagctcaaaaatctctatcccaagaagcccaaggatgaggctttccggagccactacaagcgtgagctggaactggcagctctgattccttcctgtcacccacttcctccctgctccccgctgccctcctctccctgcccgtgtgtcatcctgatgtcactccctatttcatagctgtgcttctcttacttccccatgatccatgcccaccttttccacctcccttcctccctaaccccagagcactccatggctgtcttttccttctcacaacagctgaacagatgggtaaggatggcaggggttatgtcccagctaccatcaagatgaccgtggaaagggaccaaccacttcctaccccagagctccagatgcctaccatggtgccttcttatgaccttggaatggcccctgattcctccatgagcatgcagcttggcccagatatggtgccccaggtgtacccaccacactctcactccatccccccgtatcaaggcctctccccagaagaatcagtcaacgtgttgtcagccttccaggagcctcacctgcagatgccccccagcctgggccagatgagcctgccctttgaccagcctcacccccagggcctgctgccgtgccagcctcaggagcatgctgtgtccagccctgaccccctgctctgctcagatgtgaccatggtggaagacagctgcctgagccagccagtgacagcgtttcctcagggcacttggattggtgaagacatattccctcctctgctgcctcccactgaacaggacctcactaagcttctcctggaggggcaaggggagtcggggggagggtccttgggggcacagcccctcctgcagccctcccactatgggcaatctgggatctcaatgtcccacatggacctaagggccaaccccagttggtgatcccagctggagggagaacccaaagagacagctcttctactacccccacagacctgctctggacacttgctcatgccctgccaagcagcagatggggagggtgccctcctatccccacctactcctgggtcaggaggaaaagactaacaggagaatgcacagtgggtggagccaatccactccttcctttctatcattcccctgcccacctccttccagcactgactggaagggaagttcaggctctgagacacgccccaacatgcctgcacctgcagcgcgcacacgcacgcacacacacatacagagctctctgagggtgatggggctgagcaggaggggggctgggtaagagcacaggttagggcatggaaggcttctccgcccattctgacccagggcctaggacggataggcaggaacatacagacacatttacactagaggccagggatagaggatattgggtctcagccctaggggaatgggaagcagctcaagggaccctgggtgggagcataggaggggtctggacatgtggttactagtacaggttttgccctgattaaaaaatctcccaaagccccaaattcctgttagccaggtggaggcttctgatacgtgtatgagactatgcaaaagtacaagggctgagattcttcgtgtatagctgtgtgaacgtgtatgtacctaggatatgttaaatatatagctggcaccttagttgcatgaccacatagaacatgtgtctatctgcttttgcctacgtgacaacacaaatttgggagggtgagacactgcacagaagacagcagcaagtgtgctggcctctctgacatatgctaacccccaaatactctgaatttggagtctgactgtgcccaagtgggtccaagtggctgtgacatctacgtatggctccacacctccaatgctgcctgggagccagggtgagagtctgggtccaggcctggccatgtggccctccagtgtatgagagggccctgcctgctgcatcttttctgttgccccatccaccgccagcttcccttcactcccctatcccattctccctctcaaggcaggggtcatagatcctaagccataaaataaattttattccaaaataacaaaataaataatctactgtacacaatctgaaaagaaa

SEQ ID NO: 406717 - DNA, 3958 bp, Homo sapiens
tccagggagggacctgggtagaaggagaagccggaaacagcgggctggggcagccactgcttacactgaagagggaggacgggagaggagtgtgtgtgtgtgtgtgtgtgtgtgtgtgtatgtatgtgtgtgctttatcttatttttctttttggtggtggtggtggaaggggggaggtgctagcagggccagccttgaactcgctggacagagctacagacctatggggcctggaagtgcccgctgagaaagggagaagacagcagaggggttgccgaggcaacctccaagtcccagatcatgtctctgtggggtctggtctccaagatgcccccagaaaaagtgcagcggctctatgtcgactttccccaacacctgcggcatcttctgggtgactggctggagagccagccctgggagttcctggtcggctccgacgccttctgctgcaacttggctagtgccctactttcagacactgtccagcaccttcaggcctcggtgggagagcagggggaggggagcaccatcttgcaacacatcagcacccttgagagcatatatcagagggaccccctgaagctggtggccactttcagacaaatacttcaaggagagaaaaaagctgttatggaacagttccgccacttgccaatgcctttccactggaagcaggaagaactcaagtttaagacaggcttgcggaggctgcagcaccgagtaggggagatccaccttctccgagaagccctgcagaagggggctgaggctggccaagtgtctctgcacagcttgatagaaactcctgctaatgggactgggccaagtgaggccctggccatgctactgcaggagaccactggagagctagaggcagccaaagccctagtgctgaagaggatccagatttggaaacggcagcagcagctggcagggaatggcgcaccgtttgaggagagcctggccccactccaggagaggtgtgaaagcctggtggacatttattcccagctacagcaggaggtaggggcggctggtggggagcttgagcccaagacccgggcatcgctgactggccggctggatgaagtcctgagaaccctcgtcaccagttgcttcctggtggagaagcagcccccccaggtactgaagactcagaccaagttccaggctggagttcgattcctgttgggcttgaggttcctgggggccccagccaagcctccgctggtcagggccgacatggtgacagagaagcaggcgcgggagctgagtgtgcctcagggtcctggggctggagcagaaagcactggagaaatcatcaacaacactgtgcccttggagaacagcattcctgggaactgctgctctgccctgttcaagaacctgcttctcaagaagatcaagcggtgtgagcggaagggcactgagtctgtcacagaggagaagtgcgctgtgctcttctctgccagcttcacacttggccccggcaaactccccatccagctccaggccctgtctctgcccctggtggtcatcgtccatggcaaccaagacaacaatgccaaagccactatcctgtgggacaatgccttctctgagatggaccgcgtgccctttgtggtggctgagcgggtgccctgggagaagatgtgtgaaactctgaacctgaagttcatggctgaggtggggaccaaccgggggctgctcccagagcacttcctcttcctggcccagaagatcttcaatgacaacagcctcagtatggaggccttccagcaccgttctgtgtcctggtcgcagttcaacaaggagatcctgctgggccgtggcttcaccttttggcagtggtttgatggtgtcctggacctcaccaaacgctgtctccggagctactggtctgaccggctgatcattggcttcatcagcaaacagtacgttactagccttcttctcaatgagcccgacggaacctttctcctccgcttcagcgactcagagattgggggcatcaccattgcccatgtcatccggggccaggatggctctccacagatagagaacatccagccattctctgccaaagacctgtccattcgctcactgggggaccgaatccgggatcttgctcagctcaaaaatctctatcccaagaagcccaaggatgaggctttccggagccactacaagcctgaacagatgggtaaggatggcaggggttatgtcccagctaccatcaagatgaccgtggaaagggaccaaccacttcctaccccagagctccagatgcctaccatggtgccttcttatgaccttggaatggcccctgattcctccatgagcatgcagcttggcccagatatggtgccccaggtgtacccaccacactctcactccatccccccgtatcaaggcctctccccagaagaatcagtcaacgtgttgtcagccttccaggagcctcacctgcagatgccccccagcctgggccagatgagcctgccctttgaccagcctcacccccagggcctgctgccgtgccagcctcaggagcatgctgtgtccagccctgaccccctgctctgctcagatgtgaccatggtggaagacagctgcctgagccagccagtgacagcgtttcctcagggcacttggattggtgaagacatattccctcctctgctgcctcccactgaacaggacctcactaagcttctcctggaggggcaaggggagtcggggggagggtccttgggggcacagcccctcctgcagccctcccactatgggcaatctgggatctcaatgtcccacatggacctaagggccaaccccagttggtgatcccagctggagggagaacccaaagagacagctcttctactacccccacagacctgctctggacacttgctcatgccctgccaagcagcagatggggagggtgccctcctatccccacctactcctgggtcaggagtatcattcccctgcccacctccttccagcactgactggaagggaagttcaggctctgagacacgccccaacatgcctgcacctgcagcgcgcacacgcacgcacacacacatacagagctctctgagggtgatggggctgagcaggaggggggctgggtaagagcacaggttagggcatggaaggcttctccgcccattctgacccagggcctaggacggataggcaggaacatacagacacatttacactagaggccagggatagaggatattgggtctcagccctaggggaatgggaagcagctcaagggaccctgggtgggagcataggaggggtctggacatgtggttactagtacaggttttgccctgattaaaaaatctcccaaagccccaaattcctgttagccaggtggaggcttctgatacgtgtatgagactatgcaaaagtacaagggctgagattcttcgtgtatagctgtgtgaacgtgtatgtacctaggatatgttaaatatatagctggcaccttagttgcatgaccacatagaacatgtgtctatctgcttttgcctacgtgacaacacaaatttgggagggtgagacactgcacagaagacagcagcaagtgtgctggcctctctgacatatgctaacccccaaatactctgaatttggagtctgactgtgcccaagtgggtccaagtggctgtgacatctacgtatggctccacacctccaatgctgcctgggagccagggtgagagtctgggtccaggcctggccatgtggccctccagtgtatgagagggccctgcctgctgcatcttttctgttgccccatccaccgccagcttcccttcactcccctatcccattctccctctcaaggcaggggtcatagatcctaagccataaaataaattttattccaaaataacaaaataaataatctactgtacacaatctgaaaagaaa

SEQ ID NO: 406718 - DNA, 3486 bp, Homo sapiens
tccagggagggacctgggtagaaggagaagccggaaacagcgggctggggcagccactgcttacactgaagagggaggacgggagaggagtgtgtgtgtgtgtgtgtgtgtgtgtgtgtatgtatgtgtgtgctttatcttatttttctttttggtggtggtggtggaaggggggaggtgctagcagggccagccttgaactcgctggacagagctacagacctatggggcctggaagtgcccgctgagaaagggagaagacagcagaggggttgccgaggcaacctccaagtcccagatcatgtctctgtggggtctggtctccaagatgcccccagaaaaagtgcagcggctctatgtcgactttccccaacacctgcggcatcttctgggtgactggctggagagccagccctgggagttcctggtcggctccgacgccttctgctgcaacttggctagtgccctactttcagacactgtccagcaccttcaggcctcggtgggagagcagggggaggggagcaccatcttgcaacacatcagcacccttgagagcatatatcagagggaccccctgaagctggtggccactttcagacaaatacttcaaggagagaaaaaagctgttatggaacagttccgccacttgccaatgcctttccactggaagcaggaagaactcaagtttaagacaggcttgcggaggctgcagcaccgagtaggggagatccaccttctccgagaagccctgcagaagggggctgaggctggccaagtgtctctgcacagcttgatagaaactcctgctaatgggactgggccaagtgaggccctggccatgctactgcaggagaccactggagagctagaggcagccaaagccctagtgctgaagaggatccagatttggaaacggcagcagcagctggcagggaatggcgcaccgtttgaggagagcctggccccactccaggagaggtgtgaaagcctggtggacatttattcccagctacagcaggaggtaggggcggctggtggggagcttgagcccaagacccgggcatcgctgactggccggctggatgaagtcctgagaaccctcgtcaccagttgcttcctggtggagaagcagcccccccaggtactgaagactcagaccaagttccaggctggagttcgattcctgttgggcttgaggttcctgggggccccagccaagcctccgctggtcagggccgacatggtgacagagaagcaggcgcgggagctgagtgtgcctcagggtcctggggctggagcagaaagcactggagaaatcatcaacaacactgtgcccttggagaacagcattcctgggaactgctgctctgccctgttcaagaacctgcttctcaagaagatcaagcggtgtgagcggaagggcactgagtctgtcacagaggagaagtgcgctgtgctcttctctgccagcttcacacttggccccggcaaactccccatccagctccaggccctgtctctgcccctggtggtcatcgtccatggcaaccaagacaacaatgccaaagccactatcctgtgggacaatgccttctctgagatggaccgcgtgccctttgtggtggctgagcgggtgccctgggagaagatgtgtgaaactctgaacctgaagttcatggctgaggtggggaccaaccgggggctgctcccagagcacttcctcttcctggcccagaagatcttcaatgacaacagcctcagtatggaggccttccagcaccgttctgtgtcctggtcgcagttcaacaaggagatcctgctgggccgtggcttcaccttttggcagtggtttgatggtgtcctggacctcaccaaacgctgtctccggagctactggtctgaccggctgatcattggcttcatcagcaaacagtacgttactagccttcttctcaatgagcccgacggaacctttctcctccgcttcagcgactcagagattgggggcatcaccattgcccatgtcatccggggccaggatggctctccacagatagagaacatccagccattctctgccaaagacctgtccattcgctcactgggggaccgaatccgggatcttgctcagctcaaaaatctctatcccaagaagcccaaggatgaggctttccggagccactacaagcctgaacagatgggtaaggatggcaggggttatgtcccagctaccatcaagatgaccgtggaaagggaccaaccacttcctaccccagagctccagatgcctaccatggtgccttcttatgaccttggaatggcccctgattcctccatgagcatgcagcttggcccagatatggtgccccaggtgtacccaccacactctcactccatccccccgtatcaaggcctctccccagaagaatcagtcaacgtgttgtcagccttccaggagcctcacctgcagatgccccccagcctgggccagatgagcctgccctttgaccagcctcacccccagggcctgctgccgtgccagcctcaggagcatgctgtgtccagccctgaccccctgctctgctcagatgtgaccatggtggaagacagctgcctgagccagccagtgacagcgtttcctcagggcacttggattggtgaagacatattccctcctctgctgcctcccactgaacaggacctcactaagcttctcctggaggggcaaggggagtcggggggagggtccttgggggcacagcccctcctgcagccctcccactatgggcaatctgggatctcaatgtcccacatggacctaagggccaaccccagttggtgatcccagctggagggagaacccaaagagacagctcttctactacccccacagacctgctctggacacttgctcatgccctgccaagcagcagatggggagggtgccctcctatccccacctactcctgggtcaggaggaaaagactaacaggagaatgcacagtgggtggagccaatccactccttcctttctatcattcccctgcccacctccttccagcactgactggaagggaagttcaggctctgagacacgccccaacatgcctgcacctgcagcgcgcacacgcacgcacacacacatacagagctctctgagggtgatggggctgagcaggaggggggctgggtaagagcacaggttagggcatggaaggcttctccgcccattctgacccagggcctaggacggataggcaggaacatacagacacatttacactagaggccagggatagaggatattgggtctcagccctaggggaatgggaagcagctcaagggaccctgggcagaagcaggaagcaaggagcaggtggcactctcaaagtgggtaatttgagcagtttcatcaagagatgagtgtagaggtgtgagcagatgcaacggattagctgccaggagggacagcaacaagacctc

SEQ ID NO: 406719 - DNA, 2451 bp, Homo sapiens
gttatctatgaggatccccgaacatgtcgaggcttcgagatcctgctgggccgtggcttcaccttttggcagtggtttgatggtgtcctggacctcaccaaacgctgtctccggagctactggtctgaccggctgatcattggcttcatcagcaaacagtacgttactagccttcttctcaatgagcccgacggaacctttctcctccgcttcagcgactcagagattgggggcatcaccattgcccatgtcatccggggccaggatggctctccacagatagagaacatccagccattctctgccaaagacctgtccattcgctcactgggggaccgaatccgggatcttgctcagctcaaaaatctctatcccaagaagcccaaggatgaggctttccggagccactacaagcgtgagctggaactggcagctctgattccttcctgtcacccacttcctccctgctccccgctgccctcctctccctgcccgtgtgtcatcctgatgtcactccctatttcatagctgtgcttctcttacttccccatgatccatgcccaccttttccacctcccttcctccctaaccccagagcactccatggctgtcttttccttctcacaacagctgaacagatgggtaaggatggcaggggttatgtcccagctaccatcaagatgaccgtggaaagggaccaaccacttcctaccccagagctccagatgcctaccatggtgccttcttatgaccttggaatggcccctgattcctccatgagcatgcagcttggcccagatatggtgccccaggtgtacccaccacactctcactccatccccccgtatcaaggcctctccccagaagaatcagtcaacgtgttgtcagccttccaggagcctcacctgcagatgccccccagcctgggccagatgagcctgccctttgaccagcctcacccccagggcctgctgccgtgccagcctcaggagcatgctgtgtccagccctgaccccctgctctgctcagatgtgaccatggtggaagacagctgcctgagccagccagtgacagcgtttcctcagggcacttggattggtgaagacatattccctcctctgctgcctcccactgaacaggacctcactaagcttctcctggaggggcaaggggagtcggggggagggtccttgggggcacagcccctcctgcagccctcccactatgggcaatctgggatctcaatgtcccacatggacctaagggccaaccccagttggtgatcccagctggagggagaacccaaagagacagctcttctactacccccacagacctgctctggacacttgctcatgccctgccaagcagcagatggggagggtgccctcctatccccacctactcctgggtcaggaggaaaagactaacaggagaatgcacagtgggtggagccaatccactccttcctttctatcattcccctgcccacctccttccagcactgactggaagggaagttcaggctctgagacacgccccaacatgcctgcacctgcagcgcgcacacgcacgcacacacacatacagagctctctgagggtgatggggctgagcaggaggggggctgggtaagagcacaggttagggcatggaaggcttctccgcccattctgacccagggcctaggacggataggcaggaacatacagacacatttacactagaggccagggatagaggatattgggtctcagccctaggggaatgggaagcagctcaagggaccctgggtgggagcataggaggggtctggacatgtggttactagtacaggttttgccctgattaaaaaatctcccaaagccccaaattcctgttagccaggtggaggcttctgatacgtgtatgagactatgcaaaagtacaagggctgagattcttcgtgtatagctgtgtgaacgtgtatgtacctaggatatgttaaatatatagctggcaccttagttgcatgaccacatagaacatgtgtctatctgcttttgcctacgtgacaacacaaatttgggagggtgagacactgcacagaagacagcagcaagtgtgctggcctctctgacatatgctaacccccaaatactctgaatttggagtctgactgtgcccaagtgggtccaagtggctgtgacatctacgtatggctccacacctccaatgctgcctgggagccagggtgagagtctgggtccaggcctggccatgtggccctccagtgtatgagagggccctgcctgctgcatcttttctgttgccccatccaccgccagcttcccttcactcccctatcccattctccctctcaaggcaggggtcatagatcctaagccataaaataaattttattccaaaataacaaaataaataatctactgtacacaatctgaaaagaaa

SEQ ID NO: 406720 - DNA, 1789 bp, Homo sapiens
aagcaggctggtaccggtctggggtttatggaggaccaaccacttcctaccccagagctccagatgcctaccatggtgccttcttatgaccttggaatggcccctgattcctccatgagcatgcagcttggcccagatatggtgccccaggtgtacccaccacactctcactccatccccccgtatcaaggcctctccccagaagaatcagtcaacgtgttgtcagccttccaggagcctcacctgcagatgccccccagcctgggccagatgagcctgccctttgaccagcctcacccccagggcctgctgccgtgccagcctcaggagcatgctgtgtccagccctgaccccctgctctgctcagatgtgaccatggtggaagacagctgcctgagccagccagtgacagcgtttcctcagggcacttggattggtgaagacatattccctcctctgctgcctcccactgaacaggacctcactaagcttctcctggaggggcaaggggagtcggggggagggtccttgggggcacagcccctcctgcagccctcccactatgggcaatctgggatctcaatgtcccacatggacctaagggccaaccccagttggtgatcccagctggagggagaacccaaagagacagctcttctactacccccacagacctgctctggacacttgctcatgccctgccaagcagcagatggggagggtgccctcctatccccacctactcctgggtcaggaggaaaagactaacaggagaatgcacagtgggtggagccaatccactccttcctttctatcattcccctgcccacctccttccagcactgactggaagggaagttcaggctctgagacacgccccaacatgcctgcacctgcagcgcgcacacgcacgcacacacacatacagagctctctgagggtgatggggctgagcaggaggggggctgggtaagagcacaggttagggcatggaaggcttctccgcccattctgacccagggcctaggacggataggcaggaacatacagacacatttacactagaggccagggatagaggatattgggtctcagccctaggggaatgggaagcagctcaagggaccctgggtgggagcataggaggggtctggacatgtggttactagtacaggttttgccctgattaaaaaatctcccaaagccccaaattcctgttagccaggtggaggcttctgatacgtgtatgagactatgcaaaagtacaagggctgagattcttcgtgtatagctgtgtgaacgtgtatgtacctaggatatgttaaatatatagctggcaccttagttgcatgaccacatagaacatgtgtctatctgcttttgcctacgtgacaacacaaatttgggagggtgagacactgcacagaagacagcagcaagtgtgctggcctctctgacatatgctaacccccaaatactctgaatttggagtctgactgtgcccaagtgggtccaagtggctgtgacatctacgtatggctccacacctccaatgctgcctgggagccagggtgagagtctgggtccaggcctggccatgtggccctccagtgtatgagagggccctgcctgctgcatcttttctgttgccccatccaccgccagcttcccttcactcccctatcccattctccctctcaaggcaggggtcatagatcctaagccataaaataaattttattccaaaataacaaaataaataatctactgtacacaatctgaaaagaaa

SEQ ID NO: 406721 - DNA, 2741 bp, Homo sapiens
tccagggagggacctgggtagaaggagaagccggaaacagcgggctggggcagccactgcttacactgaagagggaggacgggagaggagtgtgtgtgtgtgtgtgtgtgtgtgtgtgtatgtatgtgtgtgctttatcttatttttctttttggtggtggtggtggaaggggggaggtgctagcagggccagccttgaactcgctggacagagctacagacctatggggcctggaagtgcccgctgagaaagggagaagacagcagaggggttgccgaggcaacctccaagtcccagatcatgtctctgtggggtctggtctccaagatgcccccagaaaaagtgcagcggctctatgtcgactttccccaacacctgcggcatcttctgggtgactggctggagagccagccctgggagttcctggtcggctccgacgccttctgctgcaacttggctagtgccctactttcagacactgtccagcaccttcaggcctcggtgggagagcagggggaggggagcaccatcttgcaacacatcagcacccttgagagcatatatcagagggaccccctgaagctggtggccactttcagacaaatacttcaaggagagaaaaaagctgttatggaacagttccgccacttgccaatgcctttccactggaagcaggaagaactcaagtttaagacaggcttgcggaggctgcagcaccgagtaggggagatccaccttctccgagaagccctgcagaagggggctgaggctggccaagtgtctctgcacagcttgatagaaactcctgctaatgggactgggccaagtgaggccctggccatgctactgcaggagaccactggagagctagaggcagccaaagccctagtgctgaagaggatccagatttggaaacggcagcagcagctggcagggaatggcgcaccgtttgaggagagcctggccccactccaggagaggtgtgaaagcctggtggacatttattcccagctacagcaggaggtaggggcggctggtggggagcttgagcccaagacccgggcatcgctgactggccggctggatgaagtcctgagaaccctcgtcaccagttgcttcctggtggagaagcagcccccccaggtactgaagactcagaccaagttccaggctggagttcgattcctgcctcacctgcagatgccccccagcctgggccagatgagcctgccctttgaccagcctcacccccagggcctgctgccgtgccagcctcaggagcatgctgtgtccagccctgaccccctgctctgctcagatgtgaccatggtggaagacagctgcctgagccagccagtgacagcgtttcctcagggcacttggattggtgaagacatattccctcctctgctgcctcccactgaacaggacctcactaagcttctcctggaggggcaaggggagtcggggggagggtccttgggggcacagcccctcctgcagccctcccactatgggcaatctgggatctcaatgtcccacatggacctaagggccaaccccagttggtgatcccagctggagggagaacccaaagagacagctcttctactacccccacagacctgctctggacacttgctcatgccctgccaagcagcagatggggagggtgccctcctatccccacctactcctgggtcaggaggaaaagactaacaggagaatgcacagtgggtggagccaatccactccttcctttctatcattcccctgcccacctccttccagcactgactggaagggaagttcaggctctgagacacgccccaacatgcctgcacctgcagcgcgcacacgcacgcacacacacatacagagctctctgagggtgatggggctgagcaggaggggggctgggtaagagcacaggttagggcatggaaggcttctccgcccattctgacccagggcctaggacggataggcaggaacatacagacacatttacactagaggccagggatagaggatattgggtctcagccctaggggaatgggaagcagctcaagggaccctgggtgggagcataggaggggtctggacatgtggttactagtacaggttttgccctgattaaaaaatctcccaaagccccaaattcctgttagccaggtggaggcttctgatacgtgtatgagactatgcaaaagtacaagggctgagattcttcgtgtatagctgtgtgaacgtgtatgtacctaggatatgttaaatatatagctggcaccttagttgcatgaccacatagaacatgtgtctatctgcttttgcctacgtgacaacacaaatttgggagggtgagacactgcacagaagacagcagcaagtgtgctggcctctctgacatatgctaacccccaaatactctgaatttggagtctgactgtgcccaagtgggtccaagtggctgtgacatctacgtatggctccacacctccaatgctgcctgggagccagggtgagagtctgggtccaggcctggccatgtggccctccagtgtatgagagggccctgcctgctgcatcttttctgttgccccatccaccgccagcttcccttcactcccctatcccattctccctctcaaggcaggggtcatagatcctaagccataaaataaattttattccaaaataacaaaataaataatctactgtacacaatctgaaaagaaa

SEQ ID NO: 406722 - DNA, 1680 bp, Homo sapiens
gtctcagagcctgaacttcccttccagtcagtgctggaaggaggtgggcaggggaatgatagaaaggaaggagtggattggctccacccactgtgcattctcctgttagccttttcctcctgacccaggagtaggtggggataggagggcaccctccccatctgctgcttggcagggcatgagcaagtgtccagagcaggtctgtgggggtagtagaagagcatgctgtgtccagccctgaccccctgctctgctcagatgtgaccatggtggaagacagctgcctgagccagccagtgacagcgtttcctcagggcacttggattggtgaagacatattccctcctctgctgcctcccactgaacaggacctcactaagcttctcctggaggggcaaggggagtcggggggagggtccttgggggcacagcccctcctgcagccctcccactatgggcaatctgggatctcaatgtcccacatggacctaagggccaaccccagttggtgatcccagctggagggagaacccaaagagacagctcttctactacccccacagacctgctctggacacttgctcatgccctgccaagcagcagatggggagggtgccctcctatccccacctactcctgggtcaggaggaaaagactaacaggagaatgcacagtgggtggagccaatccactccttcctttctatcattcccctgcccacctccttccagcactgactggaagggaagttcaggctctgagacacgccccaacatgcctgcacctgcagcgcgcacacgcacgcacacacacatacagagctctctgagggtgatggggctgagcaggaggggggctgggtaagagcacaggttagggcatggaaggcttctccgcccattctgacccagggcctaggacggataggcaggaacatacagacacatttacactagaggccagggatagaggatattgggtctcagccctaggggaatgggaagcagctcaagggaccctgggtgggagcataggaggggtctggacatgtggttactagtacaggttttgccctgattaaaaaatctcccaaagccccaaattcctgttagccaggtggaggcttctgatacgtgtatgagactatgcaaaagtacaagggctgagattcttcgtgtatagctgtgtgaacgtgtatgtacctaggatatgttaaatatatagctggcaccttagttgcatgaccacatagaacatgtgtctatctgcttttgcctacgtgacaacacaaatttgggagggtgagacactgcacagaagacagcagcaagtgtgctggcctctctgacatatgctaacccccaaatactctgaatttggagtctgactgtgcccaagtgggtccaagtggctgtgacatctacgtatggctccacacctccaatgctgcctgggagccagggtgagagtctgggtccaggcctggccatgtggccctccagtgtatgagagggccctgcctgctgcatcttttctgttgccccatccaccgccagcttcccttcactcccctatcccattctccctctcaaggcaggggtcatagatcctaagccataaaataaattttattccaaaataacaaaataaataatctactgtacacaatctgaaaagaaa

SEQ ID NO: 406723 - DNA, 3238 bp, Homo sapiens
tccagggagggacctgggtagaaggagaagccggaaacagcgggctggggcagccactgcttacactgaagagggaggacgggagaggagtgtgtgtgtgtgtgtgtgtgtgtgtgtgtatgtatgtgtgtgctttatcttatttttctttttggtggtggtggtggaaggggggaggtgctagcagggccagccttgaactcgctggacagagctacagacctatggggcctggaagtgcccgctgagaaagggagaagacagcagaggggttgccgaggcaacctccaagtcccagatcatgtctctgtggggtctggtctccaagatgcccccagaaaaagtgcagcggctctatgtcgactttccccaacacctgcggcatcttctgggtgactggctggagagccagccctgggagttcctggtcggctccgacgccttctgctgcaacttggctagtgccctactttcagacactgtccagcaccttcaggcctcggtgggagagcagggggaggggagcaccatcttgcaacacatcagcacccttgagagcatatatcagagggaccccctgaagctggtggccactttcagacaaatacttcaaggagagaaaaaagctgttatggaacagttccgccacttgccaatgcctttccactggaagcaggaagaactcaagtttaagacaggcttgcggaggctgcagcaccgagtaggggagatccaccttctccgagaagccctgcagaagggggctgaggctggccaagtgtctctgcacagcttgatagaaactcctgctaatgggactgggccaagtgaggccctggccatgctactgcaggagaccactggagagctagaggcagccaaagccctagtgctgaagaggatccagatttggaaacggcagcagcagctggcagggaatggcgcaccgtttgaggagagcctggccccactccaggagaggtgtgaaagcctggtggacatttattcccagctacagcaggaggtaggggcggctggtggggagcttgagcccaagacccgggcatcgctgactggccggctggatgaagtcctgagaaccctcgtcaccagttgcttcctggtggagaagcagcccccccaggtactgaagactcagaccaagttccaggctggagttcgattcctgttgggcttgaggttcctgggggccccagccaagcctccgctggtcagggccgacatggtgacagagaagcaggcgcgggagctgagtgtgcctcagggtcctggggctggagcagaaagcactggagaaatcatcaacaacactgtgcccttggagaacagcattcctgggaactgctgctctgccctgttcaagaacctgcttctcaagaagatcaagcggtgtgagcggaagggcactgagtctgtcacagaggagaagtgcgctgtgctcttctctgccagcttcacacttggccccggcaaactccccatccagctccaggccctgtctctgcccctggtggtcatcgtccatggcaaccaagacaacaatgccaaagccactatcctgtgggacaatgccttctctgagatggaccgcgtgccctttgtggtggctgagcgggtgccctgggagaagatgtgtgaaactctgaacctgaagttcatggctgaggtggggaccaaccgggggctgctcccagagcacttcctcttcctggcccagaagatcttcaatgacaacagcctcagtatggaggccttccagcaccgttctgtgtcctggtcgcagttcaacaaggagatcctgctgggccgtggcttcaccttttggcagtggtttgatggtgtcctggacctcaccaaacgctgtctccggagctactggtctgaccggctgatcattggcttcatcagcaaacagtacgttactagccttcttctcaatgagcccgacggaacctttctcctccgcttcagcgactcagagattgggggcatcaccattgcccatgtcatccggggccaggatggctctccacagatagagaacatccagccattctctgccaaagacctgtccattcgctcactgggggaccgaatccgggatcttgctcagctcaaaaatctctatcccaagaagcccaaggatgaggctttccggagccactacaagcctgaacagatgggtaaggatggcaggggttatgtcccagctaccatcaagatgaccgtggaaagggaccaaccacttcctaccccagagctccagatgcctaccatggtgccttcttatgaccttggaatggcccctgattcctccatgagcatgcagcttggcccagatatggtgccccaggtgtacccaccacactctcactccatccccccgtatcaaggcctctccccagaagaatcagtcaacgtgttgtcagccttccaggagcctcacctgcagatgccccccagcctgggccagatgagcctgccctttgaccagcctcacccccagggcctgctgccgtgccagcctcaggagcatgctgtgtccagccctgaccccctgctctgctcagatgtgaccatggtggaagacagctgcctgagccagccagtgacagcgtttcctcagggcacttgccaaattcctgttagccaggtggaggcttctgatacgtgtatgagactatgcaaaagtacaagggctgagattcttcgtgtatagctgtgtgaacgtgtatgtacctaggatatgttaaatatatagctggcaccttagttgcatgaccacatagaacatgtgtctatctgcttttgcctacgtgacaacacaaatttgggagggtgagacactgcacagaagacagcagcaagtgtgctggcctctctgacatatgctaacccccaaatactctgaatttggagtctgactgtgcccaagtgggtccaagtggctgtgacatctacgtatggctccacacctccaatgctgcctgggagccagggtgagagtctgggtccaggcctggccatgtggccctccagtgtatgagagggccctgcctgctgcatcttttctgttgccccatccaccgccagcttcccttcactcccctatcccattctccctctcaaggcaggggtcatagatcctaagccataaaataaattttattccaaaataacaaaataaataatctactgtacacaatctgaaaagaaa

SEQ ID NO: 406724 - DNA, 3773 bp, Homo sapiens
tccagggagggacctgggtagaaggagaagccggaaacagcgggctggggcagccactgcttacactgaagagggaggacgggagaggagtgtgtgtgtgtgtgtgtgtgtgtgtgtgtatgtatgtgtgtgctttatcttatttttctttttggtggtggtggtggaaggggggaggtgctagcagggccagccttgaactcgctggacagagctacagacctatggggcctggaagtgcccgctgagaaagggagaagacagcagaggggttgccgaggcaacctccaagtcccagatcatgtctctgtggggtctggtctccaagatgcccccagaaaaagtgcagcggctctatgtcgactttccccaacacctgcggcatcttctgggtgactggctggagagccagccctgggagttcctggtcggctccgacgccttctgctgcaacttggctagtgccctactttcagacactgtccagcaccttcaggcctcggtgggagagcagggggaggggagcaccatcttgcaacacatcagcacccttgagagcatatatcagagggaccccctgaagctggtggccactttcagacaaatacttcaaggagagaaaaaagctgttatggaacagttccgccacttgccaatgcctttccactggaagcaggaagaactcaagtttaagacaggcttgcggaggctgcagcaccgagtaggggagatccaccttctccgagaagccctgcagaagggggctgaggctggccaagtgtctctgcacagcttgatagaaactcctgctaatgggactgggccaagtgaggccctggccatgctactgcaggagaccactggagagctagaggcagccaaagccctagtgctgaagaggatccagatttggaaacggcagcagcagctggcagggaatggcgcaccgtttgaggagagcctggccccactccaggagaggtgtgaaagcctggtggacatttattcccagctacagcaggaggtaggggcggctggtggggagcttgagcccaagacccgggcatcgctgactggccggctggatgaagtcctgagaaccctcgtcaccagttgcttcctggtggagaagcagcccccccaggtactgaagactcagaccaagttccaggctggagttcgattcctgttgggcttgaggttcctgggggccccagccaagcctccgctggtcagggccgacatggtgacagagaagcaggcgcgggagctgagtgtgcctcagggtcctggggctggagcagaaagcactggagaaatcatcaacaacactgtgcccttggagaacagcattcctgggaactgctgctctgccctgttcaagaacctgcttctcaagaagatcaagcggtgtgagcggaagggcactgagtctgtcacagaggagaagtgcgctgtgctcttctctgccagcttcacacttggccccggcaaactccccatccagctccaggccctgtctctgcccctggtggtcatcgtccatggcaaccaagacaacaatgccaaagccactatcctgtgggacaatgccttctctgagatggaccgcgtgccctttgtggtggctgagcgggtgccctgggagaagatgtgtgaaactctgaacctgaagttcatggctgaggtggggaccaaccgggggctgctcccagagcacttcctcttcctggcccagaagatcttcaatgacaacagcctcagtatggaggccttccagcaccgttctgtgtcctggtcgcagttcaacaaggagatcctgctgggccgtggcttcaccttttggcagtggtttgatggtgtcctggacctcaccaaacgctgtctccggagctactggtctgaccggctgatcattggcttcatcagcaaacagtacgttactagccttcttctcaatgagcccgacggaacctttctcctccgcttcagcgactcagagattgggggcatcaccattgcccatgtcatccggggccaggatggctctccacagatagagaacatccagccattctctgccaaagacctgtccattcgctcactgggggaccgaatccgggatcttgctcagctcaaaaatctctatcccaagaagcccaaggatgaggctttccggagccactacaagcctgaacagatgggtaaggatggcaggggttatgtcccagctaccatcaagatgaccgtggaaagggaccaaccacttcctaccccagagctccagatgcctaccatggtgccttcttatgaccttggaatggcccctgattcctccatgagcatgcagcttggcccagatatggtgccccaggtgtacccaccacactctcactccatccccccgtatcaaggcctctccccagaagaatcagtcaacgtgttgtcagccttccaggagcttctgatacgtgtatgagactatgcaaaagtacaagggctgagattcttcgtgtatagctgtgtgaacgtgtatgtacctaggatatgttaaatatatagctggcaccttagttgcatgaccacatagaacatgtgtctatctgcttttgcctacgtgacaacacaaatttgggagggtgagacactgcacagaagacagcagcaagtgtgctggcctctctgacatatgctaacccccaaatactctgaatttggagtctgactgtgcccaagtgggtccaagtggctgtgacatctacgtatggctccacacctccaatgctgcctgggagccagggtgagagtctgggtccaggcctggccatgtggccctccagtgtatgagagggccctgcctgctgcatcttttctgttgccccatccaccgccagcttcccttcactcccctatcccattctccctctcaaggcaggggtcatagatcctaagccataaaataaattttattccaaaataacaaaataaataatctactgtacacaatctgaaaagaaagacgctctaactgctcagataggtgctgcggtccagcccccagctggaggagaccctgagtccaacccaggcctcccgagggggccagtgaagggatcccacacccaccgcccctatgtagggcagggaagaaattgcaaaggacttgggggatagatgggaatgggagggcaaactgcagcacttgttaaattaattaaagaaacaaaccagaagcacaaaaacggggaaggagaggggagaaggagcaggtccagtgttcccaggcccccaattctgggggcaaatgttgccacttttagctggaccttcccagggaagtccccctttcccccttgtccaaactgagtccaactgctcacaccactggtgcaaacctaaagagaatgggagtgtgttgtgtgagggaggggaaaaccccagatgccctggaggcagagtccttgccccctcgctctgggcaggggtgagggcaccacgcaccctccttgtgtcctctctccaggcctctgcttgttattgcttgaagccccacagtcttatgcccatggagcaggtggggaggcaggagaagggcagaggaaggatccagggttgtgactagattccggggatggagagcgtgggggtctgtgtgagccagaagtctgaggtcctgggtctgaagacaccagtccaaccctcactgccggctggcctcagcctccactttcacgctgctcctgcgaccctccaccagcgcgggatggggtcct

SEQ ID NO: 406725 - DNA, 1276 bp, Homo sapiens
tccagggagggacctgggtagaaggagaagccggaaacagcgggctggggcagccactgcttacactgaagagggaggacgggagaggagtgtgtgtgtgtgtgtgtgtgtgtgtgtgtatgtatgtgtgtgctttatcttatttttctttttggtggtggtggtggaaggggggaggtgctagcagggccagccttgaactcgctggacagagctacagacctatggggcctggaagtgcccgctgagaaagggagaagacagcagaggggttgccgaggcaacctccaagtcccagatcatgtctctgtggggtctggtctccaagatgcccccagaaaaagtgcagcggctctatgtcgactttccccaacacctgcggcatcttctgggtgactggctggagagccagccctgggagttcctggtcggctccgacgccttctgctgcaacttggctagtgccctactttcagacactgtccagcaccttcaggcctcggtgggagagcagggggaggggagcaccatcttgcaacacatttacactagaggccagggatagaggatattgggtctcagccctaggggaatgggaagcagctcaagggaccctgggtgggagcataggaggggtctggacatgtggttactagtacaggttttgccctgattaaaaaatctcccaaagccccaaattcctgttagccaggtggaggcttctgatacgtgtatgagactatgcaaaagtacaagggctgagattcttcgtgtatagctgtgtgaacgtgtatgtacctaggatatgttaaatatatagctggcaccttagttgcatgaccacatagaacatgtgtctatctgcttttgcctacgtgacaacacaaatttgggagggtgagacactgcacagaagacagcagcaagtgtgctggcctctctgacatatgctaacccccaaatactctgaatttggagtctgactgtgcccaagtgggtccaagtggctgtgacatctacgtatggctccacacctccaatgctgcctgggagccagggtgagagtctgggtccaggcctggccatgtggccctccagtgtatgagagggccctgcctgctgcatcttttctgttgccccatccaccgccagcttcccttcactcccctatcccattctccctctcaaggcaggggtcatagatcctaagccataaaataaattttattccaaaataacaaaataaataatctactgtacacaatctgaaaagaaa

SEQ ID NO: 406726 - DNA, 716 bp, Homo sapiens
ttctgaccagacttgatggttttaagtcggaaccgataaattttaaaaaggagaaaaaataatttgacctagtagtataaaacatgtggttactagtacaggttttgccctgattaaaaaatctcccaaagccccaaattcctgttagccaggtggaggcttctgatacgtgtatgagactatgcaaaagtacaagggctgagattcttcgtgtatagctgtgtgaacgtgtatgtacctaggatatgttaaatatatagctggcaccttagttgcatgaccacatagaacatgtgtctatctgcttttgcctacgtgacaacacaaatttgggagggtgagacactgcacagaagacagcagcaagtgtgctggcctctctgacatatgctaacccccaaatactctgaatttggagtctgactgtgcccaagtgggtccaagtggctgtgacatctacgtatggctccacacctccaatgctgcctgggagccagggtgagagtctgggtccaggcctggccatgtggccctccagtgtatgagagggccctgcctgctgcatcttttctgttgccccatccaccgccagcttcccttcactcccctatcccattctccctctcaaggcaggggtcatagatcctaagccataaaataaattttattccaaaataacaaaataaataatctactgtacacaatctgaaaagaaa

SEQ ID NO: 406727 - DNA, 2645 bp, Homo sapiens
tccagggagggacctgggtagaaggagaagccggaaacagcgggctggggcagccactgcttacactgaagagggaggacgggagaggagtgtgtgtgtgtgtgtgtgtgtgtgtgtgtatgtatgtgtgtgctttatcttatttttctttttggtggtggtggtggaaggggggaggtgctagcagggccagccttgaactcgctggacagagctacagacctatggggcctggaagtgcccgctgagaaagggagaagacagcagaggggttgccgaggcaacctccaagtcccagatcatgtctctgtggggtctggtctccaagatgcccccagaaaaagtgcagcggctctatgtcgactttccccaacacctgcggcatcttctgggtgactggctggagagccagccctgggagttcctggtcggctccgacgccttctgctgcaacttggctagtgccctactttcagacactgtccagcaccttcaggcctcggtgggagagcagggggaggggagcaccatcttgcaacacatcagcacccttgagagcatatatcagagggaccccctgaagctggtggccactttcagacaaatacttcaaggagagaaaaaagctgttatggaacagttccgccacttgccaatgcctttccactggaagcaggaagaactcaagtttaagacaggcttgcggaggctgcagcaccgagtaggggagatccaccttctccgagaagccctgcagaagggggctgaggctggccaagtgtctctgcacagcttgatagaaactcctgctaatgggactgggccaagtgaggccctggccatgctactgcaggagaccactggagagctagaggcagccaaagccctagtgctgaagaggatccagatttggaaacggcagcagcagctggcagggaatggcgcaccgtttgaggagagcctggccccactccaggagaggtgtgaaagcctggtggacatttattcccagctacagcaggaggtaggggcggctggtggggagcttgagcccaagacccgggcatcgctgactggccggctggatgaagtcctgagaaccctcgtcaccagttgcttcctggtggagaagcagcccccccaggtactgaagactcagaccaagttccaggctggagttcgattcctgttgggcttgaggttcctgggggccccagccaagcctccgctggtcagggccgacatggtgacagagaagcaggcgcgggagctgagtgtgcctcagggtcctggggctggagcagaaagcactggagaaatcatcaacaacactgtgcccttggagaacagcattcctgggaactgctgctctgccctgttcaagaacctgcttctcaagaagatcaagcggtgtgagcggaagggcactgagtctgtcacagaggagaagtgcgctgtgctcttctctgccagcttcacacttggccccggcaaactccccatccagctccaggccctgtctctgcccctggtggtcatcgtccatggcaaccaagacaacaatgccaaagccactatcctgtgggacaatgccttctctgagatggaccgcgtgccctttgtggtggctgagcgggtgccctgggagaagatgtgtgaaactctgaacctgaagttcatggctgaggtggggaccaaccgggggctgctcccagagcacttcctcttcctggcccagaagatcttcaatgacaacagcctcagtatggaggccttccagcaccgttctgtgtcctggtcgcagttcaacaaggagatcctgctgggccgtggcttcaccttttggcagtggtttgatggtgtcctggacctcaccaaacgctgtctccggagctactggtctgaccggctgatcattggcttcatcagcaaacagtacgttactagccttcttctcaatgagcccgacggaacctttctcctccgcttcagcgactcagagattgggggcatcaccattgcccatgtcatccggggccaggatggctctccacagatagagaacatccagccattctctgccaaagacctgtccattcgctcactgggggaccgaatccgggatcttgctcagctcaaaaatctctatcccaagaagcccaaggatgaggctttccggagccactacaagcctgaacagatgggtaaggatggcaggggttatgtcccagctaccatcaagatgaccgtggaaagggaccaaccacttcctaccccagagctccagatgcctaccatggtgccttcttatgaccttggaatggcccctgattcctccatgagcatgcagcttggcccagatatggtgccccaggtgtacccaccacactctcactccatccccccgtatcaaggcctctccccagaagaatcagtcaacgtgttgtcagccttccaggaagtaagtgaaaaacctcatggggataccatcccactctaagggggtgggcatttgaattgttagaagaggctcttctgtgagaaaggagcagcaaatgctaacagcctgtcttcttctcttctgtccactctaatgagggggtagtagttaagatctggactgcctaggtttgaattctagctcc

SEQ ID NO: 406728 - DNA, 2642 bp, Homo sapiens
tccagggagggacctgggtagaaggagaagccggaaacagcgggctggggcagccactgcttacactgaagagggaggacgggagaggagtgtgtgtgtgtgtgtgtgtgtgtgtgtgtatgtatgtgtgtgctttatcttatttttctttttggtggtggtggtggaaggggggaggtgctagcagggccagccttgaactcgctggacagagctacagacctatggggcctggaagtgcccgctgagaaagggagaagacagcagaggggttgccgaggcaacctccaagtcccagatcatgtctctgtggggtctggtctccaagatgcccccagaaaaagtgcagcggctctatgtcgactttccccaacacctgcggcatcttctgggtgactggctggagagccagccctgggagttcctggtcggctccgacgccttctgctgcaacttggctagtgccctactttcagacactgtccagcaccttcaggcctcggtgggagagcagggggaggggagcaccatcttgcaacacatcagcacccttgagagcatatatcagagggaccccctgaagctggtggccactttcagacaaatacttcaaggagagaaaaaagctgttatggaacagttccgccacttgccaatgcctttccactggaagcaggaagaactcaagtttaagacaggcttgcggaggctgcagcaccgagtaggggagatccaccttctccgagaagccctgcagaagggggctgaggctggccaagtgtctctgcacagcttgatagaaactcctgctaatgggactgggccaagtgaggccctggccatgctactgcaggagaccactggagagctagaggcagccaaagccctagtgctgaagaggatccagatttggaaacggcagcagcagctggcagggaatggcgcaccgtttgaggagagcctggccccactccaggagaggtgtgaaagcctggtggacatttattcccagctacagcaggaggtaggggcggctggtggggagcttgagcccaagacccgggcatcgctgactggccggctggatgaagtcctgagaaccctcgtcaccagttgcttcctggtggagaagcagcccccccaggtactgaagactcagaccaagttccaggctggagttcgattcctgttgggcttgaggttcctgggggccccagccaagcctccgctggtcagggccgacatggtgacagagaagcaggcgcgggagctgagtgtgcctcagggtcctggggctggagcagaaagcactggagaaatcatcaacaacactgtgcccttggagaacagcattcctgggaactgctgctctgccctgttcaagaacctgcttctcaagaagatcaagcggtgtgagcggaagggcactgagtctgtcacagaggagaagtgcgctgtgctcttctctgccagcttcacacttggccccggcaaactccccatccagctccaggccctgtctctgcccctggtggtcatcgtccatggcaaccaagacaacaatgccaaagccactatcctgtgggacaatgccttctctgagatggaccgcgtgccctttgtggtggctgagcgggtgccctgggagaagatgtgtgaaactctgaacctgaagttcatggctgaggtggggaccaaccgggggctgctcccagagcacttcctcttcctggcccagaagatcttcaatgacaacagcctcagtatggaggccttccagcaccgttctgtgtcctggtcgcagttcaacaaggagatcctgctgggccgtggcttcaccttttggcagtggtttgatggtgtcctggacctcaccaaacgctgtctccggagctactggtctgaccggctgatcattggcttcatcagcaaacagtacgttactagccttcttctcaatgagcccgacggaacctttctcctccgcttcagcgactcagagattgggggcatcaccattgcccatgtcatccggggccaggatggctctccacagatagagaacatccagccattctctgccaaagacctgtccattcgctcactgggggaccgaatccgggatcttgctcagctcaaaaatctctatcccaagaagcccaaggatgaggctttccggagccactacaagcgtgagctggaactggcagctctgattccttcctgtcacccacttcctccctgctccccgctgccctcctctccctgcccgtgtgtcatcctgatgtcactccctatttcatagctgtgcttctcttacttccccatgatccatgcccaccttttccacctcccttcctccctaaccccagagcactccatggctgtcttttccttctcacaacagctgaacagatgggtaaggatggcaggggttatgtcccagctaccatcaagatgaccgtggaaagggaccaaccacttcctaccccagagctccagatgcctaccatggtgccttcttatgaccttggaatggcccctgattcctccatgagcatgcagcttggcccagatatggtgtaaggagctggaaagacaggaatgggagtggtctgtgcagatgggctaatcttagcatg

SEQ ID NO: 406729 - DNA, 1377 bp, Homo sapiens
tccagggagggacctgggtagaaggagaagccggaaacagcgggctggggcagccactgcttacactgaagagggaggacgggagaggagtgtgtgtgtgtgtgtgtgtgtgtgtgtgtatgtatgtgtgtgctttatcttatttttctttttggtggtggtggtggaaggggggaggtgctagcagggccagccttgaactcgctggacagagctacagacctatggggcctggaagtgcccgctgagaaagggagaagacagcagaggggttgccgaggcaacctccaagtcccagatcatgtctctgtggggtctggtctccaagatgcccccagaaaaagtgcagcggctctatgtcgactttccccaacacctgcggcatcttctgggtgactggctggagagccagccctgggagttcctggtcggctccgacgccttctgctgcaacttggctagtgccctactttcagacactgtccagcaccttcaggcctcggtgggagagcagggggaggggagcaccatcttgcaacacatcagcacccttgagagcatatatcagagggaccccctgaagctggtggccactttcagacaaatacttcaaggagagaaaaaagctgttatggaacagttccgccacttgccaatgcctttccactggaagcaggaagaactcaagtttaagacaggcttgcggaggctgcagcaccgagtaggggagatccaccttctccgagaagccctgcagaagggggctgaggctggccaagtgtctctgcacagcttgatagaaactcctgctaatgggactgggccaagtgaggccctggccatgctactgcaggagaccactggagagctagaggcagccaaagccctagtgctgaagaggatccagatttggaaacggcagcagcagctggcagggaatggcgcaccgtttgaggagagcctggccccactccaggagaggtgtgaaagcctggtggacatttattcccagctacagcaggaggtaggggcggctggtggggagcttgagcccaagacccgggcatcgctgactggccggctggatgaagtcctgagaaccctcgtcaccagttgcttcctggtggagaagcagcccccccaggtactgaagactcagaccaagttccaggctggagttcgattcctgttgggcttgaggttcctgggggccccagccaagcctccgctggtcagggccgacatggtgacagagaagcaggcgcgggagctgagtgtgcctcagggtcctggggctggagcagaaacactgaaaatattcctcctctggtgctccatgaaggactcattagtttccggggggagggagcgggggag

SEQ ID NO: 406730 - DNA, 1010 bp, Homo sapiens
tccagggagggacctgggtagaaggagaagccggaaacagcgggctggggcagccactgcttacactgaagagggaggacgggagaggagtgtgtgtgtgtgtgtgtgtgtgtgtgtgtatgtatgtgtgtgctttatcttatttttctttttggtggtggtggtggaaggggggaggtgctagcagggccagccttgaactcgctggacagagctacagacctatggggcctggaagtgcccgctgagaaagggagaagacagcagaggggttgccgaggcaacctccaagtcccagatcatgtctctgtggggtctggtctccaagatgcccccagaaaaagtgcagcggctctatgtcgactttccccaacacctgcggcatcttctgggtgactggctggagagccagccctgggagttcctggtcggctccgacgccttctgctgcaacttggctagtgccctactttcagacactgtccagcaccttcaggcctcggtgggagagcagggggaggggagcaccatcttgcaacacatcagcacccttgagagcatatatcagagggaccccctgaagctggtggccactttcagacaaatacttcaaggagagaaaaaagctgttatggaacagttccgccacttgccaatgcctttccactggaagcaggaagaactcaagtttaagacaggcttgcggaggctgcagcaccgagtaggggagatccaccttctccgagaagccctgcagaagggggctgaggctggccaagtgtctctgcacagcttgatagaaactcctgctaatgggactgggccaagtgaggccctggccatgctactgcaggagaccactggagagctagaggcagccaaagccctagtgctgaagaggatccagatttggaaacggcagcagcagctggcagggaatggcgcaccgtttgaggagagcctggccccactccaggagaggttgggctagggctgatggggaagagggg

SEQ ID NO: 406731 - DNA, 265 bp, Homo sapiens
ccctgcagaagggggctgaggctggccaaggtgggggccagggtggttctggggagtgtgtaggagtggttgcctcttggatctcaaccttatctgaacctctaatctgtctgcacccttgatttctgcccccaaccctcagtgtctctgcacagcttgatagaaactcctgctaatgggactgggccaagtgaggtgagtaatgggctgacaggtggagaccttggtcaaagtgcagctggagggatggaagctagacctcaga

SEQ ID NO: 406732 - DNA, 3969 bp, Homo sapiens
tccagggagggacctgggtagaaggagaagccggaaacagcgggctggggcagccactgcttacactgaagagggaggacgggagaggagtgtgtgtgtgtgtgtgtgtgtgtgtgtgtatgtatgtgtgtgctttatcttatttttctttttggtggtggtggtggaaggggggaggtgctagcagggccagccttgaactcgctggacagagctacagacctatggggcctggaagtgcccgctgagaaagggagaagacagcagaggggttgccgaggcaacctccaagtcccagatcatgtctctgtggggtctggtctccaagatgcccccagaaaaagtgcagcggctctatgtcgactttccccaacacctgcggcatcttctgggtgactggctggagagccagccctgggagttcctggtcggctccgacgccttctgctgcaacttggctagtgccctactttcagacactgtccagcaccttcaggcctcggtgggagagcagggggaggggagcaccatcttgcaacacatcagcacccttgagagcatatatcagagggaccccctgaagctggtggccactttcagacaaatacttcaaggagagaaaaaagctgttatggaacagttccgccacttgccaatgcctttccactggaagcaggaagaactcaagtttaagacaggcttgcggaggctgcagcaccgagtaggggagatccaccttctccgagaagccctgcagaagggggctgaggctggccaagtgtctctgcacagcttgatagaaactcctgctaatgggactgggccaagtgaggccctggccatgctactgcaggagaccactggagagctagaggcagccaaagccctagtgctgaagaggatccagatttggaaacggcagcagcagctggcagggaatggcgcaccgtttgaggagagcctggccccactccaggagaggtgtgaaagcctggtggacatttattcccagctacagcaggaggtaggggcggctggtggggagcttgagcccaagacccgggcatcgctgactggccggctggatgaagtcctgagaaccctcgtcaccagttgcttcctggtggagaagcagcccccccaggtactgaagactcagaccaagttccaggctggagttcgattcctgttgggcttgaggttcctgggggccccagccaagcctccgctggtcagggccgacatggtgacagagaagcaggcgcgggagctgagtgtgcctcagggtcctggggctggagcagaaagcactggagaaatcatcaacaacactgtgcccttggagaacagcattcctgggaactgctgctctgccctgttcaagaacctgcttctcaagaagatcaagcggtgtgagcggaagggcactgagtctgtcacagaggagaagtgcgctgtgctcttctctgccagcttcacacttggccccggcaaactccccatccagctccaggccctgtctctgcccctggtggtcatcgtccatggcaaccaagacaacaatgccaaagccactatcctgtgggacaatgccttctctgagatggaccgcgtgccctttgtggtggctgagcgggtgccctgggagaagatgtgtgaaactctgaacctgaagttcatggctgaggtggggaccaaccgggggctgctcccagagcacttcctcttcctggcccagaagatcttcaatgacaacagcctcagtatggaggccttccagcaccgttctgtgtcctggtcgcagttcaacaaggagatcctgctgggccgtggcttcaccttttggcagtggtttgatggtgtcctggacctcaccaaacgctgtctccggagctactggtctgaccggctgatcattggcttcatcagcaaacagtacgttactagccttcttctcaatgagcccgacggaacctttctcctccgcttcagcgactcagagattgggggcatcaccattgcccatgtcatccggggccaggatggctctccacagatagagaacatccagccattctctgccaaagacctgtccattcgctcactgggggaccgaatccgggatcttgctcagctcaaaaatctctatcccaagaagcccaaggatgaggctttccggagccactacaagcctgaacagatgggtaaggatggcaggggttatgtcccagctaccatcaagatgaccgtggaaagggaccaaccacttcctaccccagagctccagatgcctaccatggtgccttcttatgaccttggaatggcccctgattcctccatgagcatgcagcttggcccagatatggtgccccaggtgtacccaccacactctcactccatccccccgtatcaaggcctctccccagaagaatcagtcaacgtgttgtcagccttccaggagcctcacctgcagatgccccccagcctgggccagatgagcctgccctttgaccagcctcacccccagggcctgctgccgtgccagcctcaggagcatgctgtgtccagccctgaccccctgctctgctcagatgtgaccatggtggaagacagctgcctgagccagccagtgacagcgtttcctcagggcacttggattggtgaagacatattccctcctctgctgcctcccactgaacaggacctcactaagcttctcctggaggggcaaggggagtcggggggagggtccttgggggcacagcccctcctgcagccctcccactatgggcaatctgggatctcaatgtcccacatggacctaagggccaaccccagttggtgatcccagctggagggagaacccaaagagacagctcttctactacccccacagacctgctctggacacttgctcatgccctgccaagcagcagatggggagggtgccctcctatccccacctactcctgggtcaggaggaaaagactaacaggagaatgcacagtgggtggagccaatccactccttcctttctatcattcccctgcccacctccttccagcactgactggaagggaagttcaggctctgagacacgccccaacatgcctgcacctgcagcgcgcacacgcacgcacacacacatacagagctctctgagggtgatggggctgagcaggaggggggctgggtaagagcacaggttagggcatggaaggcttctccgcccattctgacccagggcctaggacggataggcaggaacatacagacacatttacactagaggccagggatagaggatattgggtctcagccctaggggaatgggaagcagctcaagggaccctgggtgggagcataggaggggtctggacatgtggttactagtacaggttttgccctgattaaaaaatctcccaaagccccaaattcctgttagccaggtggaggcttctgatacgtgtatgagactatgcaaaagtacaagggctgagattcttcgtgtatagctgtgtgaacgtgtatgtacctaggatatgttaaatatatagctggcaccttagttgcatgaccacatagaacatgtgtctatctgcttttgcctacgtgacaacacaaatttgggagggtgagacactgcacagaagacagcagcaagtgtgctggcctctctgacatatgctaacccccaaatactctgaatttggagtctgactgtgcccaagtgggtccaagtggctgtgacatctacgtatggctccacacctccaatgctgcctgggagccagggtgagagtctgggtccaggcctggccatgtggccctccagtgtatgagagggccctgcctgctgcatcttttctgttgccccatccaccgccagcttcccttcactcccctatcccattctccctctcaaggcaggggtcatagatcctaagccataaaataaattttattcca

SEQ ID NO: 406733 - DNA, 4013 bp, Homo sapiens
tccagggagggacctgggtagaaggagaagccggaaacagcgggctggggcagccactgcttacactgaagagggaggacgggagaggagtgtgtgtgtgtgtgtgtgtgtgtgtgtgtatgtatgtgtgtgctttatcttatttttctttttggtggtggtggtggaaggggggaggtgctagcagggccagccttgaactcgctggacagagctacagacctatggggcctggaagtgcccgctgagaaagggagaagacagcagaggggttgccgaggcaacctccaagtcccagatcatgtctctgtggggtctggtctccaagatgcccccagaaaaagtgcagcggctctatgtcgactttccccaacacctgcggcatcttctgggtgactggctggagagccagccctgggagttcctggtcggctccgacgccttctgctgcaacttggctagtgccctactttcagacactgtccagcaccttcaggcctcggtgggagagcagggggaggggagcaccatcttgcaacacatcagcacccttgagagcatatatcagagggaccccctgaagctggtggccactttcagacaaatacttcaaggagagaaaaaagctgttatggaacagttccgccacttgccaatgcctttccactggaagcaggaagaactcaagtttaagacaggcttgcggaggctgcagcaccgagtaggggagatccaccttctccgagaagccctgcagaagggggctgaggctggccaagtgtctctgcacagcttgatagaaactcctgctaatgggactgggccaagtgaggccctggccatgctactgcaggagaccactggagagctagaggcagccaaagccctagtgctgaagaggatccagatttggaaacggcagcagcagctggcagggaatggcgcaccgtttgaggagagcctggccccactccaggagaggtgtgaaagcctggtggacatttattcccagctacagcaggaggtaggggcggctggtggggagcttgagcccaagacccgggcatcgctgactggccggctggatgaagtcctgagaaccctcgtcaccagttgcttcctggtggagaagcagcccccccaggtactgaagactcagaccaagttccaggctggagttcgattcctgttgggcttgaggttcctgggggccccagccaagcctccgctggtcagggccgacatggtgacagagaagcaggcgcgggagctgagtgtgcctcagggtcctggggctggagcagaaagcactggagaaatcatcaacaacactgtgcccttggagaacagcattcctgggaactgctgctctgccctgttcaagaacctgcttctcaagaagatcaagcggtgtgagcggaagggcactgagtctgtcacagaggagaagtgcgctgtgctcttctctgccagcttcacacttggccccggcaaactccccatccagctccaggccctgtctctgcccctggtggtcatcgtccatggcaaccaagacaacaatgccaaagccactatcctgtgggacaatgccttctctgagatggaccgcgtgccctttgtggtggctgagcgggtgccctgggagaagatgtgtgaaactctgaacctgaagttcatggctgaggtggggaccaaccgggggctgctcccagagcacttcctcttcctggcccagaagatcttcaatgacaacagcctcagtatggaggccttccagcaccgttctgtgtcctggtcgcagttcaacaaggagatcctgctgggccgtggcttcaccttttggcagtggtttgatggtgtcctggacctcaccaaacgctgtctccggagctactggtctgaccggctgatcattggcttcatcagcaaacagtacgttactagccttcttctcaatgagcccgacggaacctttctcctccgcttcagcgactcagagattgggggcatcaccattgcccatgtcatccggggccaggatggctctccacagatagagaacatccagccattctctgccaaagacctgtccattcgctcactgggggaccgaatccgggatcttgctcagctcaaaaatctctatcccaagaagcccaaggatgaggctttccggagccactacaagcctgaacagatgggtaaggatggcaggggttatgtcccagctaccatcaagatgaccgtggaaagggaccaaccacttcctaccccagagctccagatgcctaccatggtgccttcttatgaccttggaatggcccctgattcctccatgagcatgcagcttggcccagatatggtgccccaggtgtacccaccacactctcactccatccccccgtatcaaggcctctccccagaagaatcagtcaacgtgttgtcagccttccaggagcctcacctgcagatgccccccagcctgggccagatgagcctgccctttgaccagcctcacccccagggcctgctgccgtgccagcctcaggagcatgctgtgtccagccctgaccccctgctctgctcagatgtgaccatggtggaagacagctgcctgagccagccagtgacagcgtttcctcagggcacttggattggtgaagacatattccctcctctgctgcctcccactgaacaggacctcactaagcttctcctggaggggcaaggggagtcggggggagggtccttgggggcacagcccctcctgcagccctcccactatgggcaatctgggatctcaatgtcccacatggacctaagggccaaccccagttggtgatcccagctggagggagaacccaaagagacagctcttctactacccccacagacctgctctggacacttgctcatgccctgccaagcagcagatggggagggtgccctcctatccccacctactcctgggtcaggaggaaaagactaacaggagaatgcacagtgggtggagccaatccactccttcctttctatcattcccctgcccacctccttccagcactgactggaagggaagttcaggctctgagacacgccccaacatgcctgcacctgcagcgcgcacacgcacgcacacacacatacagagctctctgagggtgatggggctgagcaggaggggggctgggtaagagcacaggttagggcatggaaggcttctccgcccattctgacccagggcctaggacggataggcaggaacatacagacacatttacactagaggccagggatagaggatattgggtctcagccctaggggaatgggaagcagctcaagggaccctgggtgggagcataggaggggtctggacatgtggttactagtacaggttttgccctgattaaaaaatctcccaaagccccaaattcctgttagccaggtggaggcttctgatacgtgtatgagactatgcaaaagtacaagggctgagattcttcgtgtatagctgtgtgaacgtgtatgtacctaggatatgttaaatatatagctggcaccttagttgcatgaccacatagaacatgtgtctatctgcttttgcctacgtgacaacacaaatttgggagggtgagacactgcacagaagacagcagcaagtgtgctggcctctctgacatatgctaacccccaaatactctgaatttggagtctgactgtgcccaagtgggtccaagtggctgtgacatctacgtatggctccacacctccaatgctgcctgggagccagggtgagagtctgggtccaggcctggccatgtggccctccagtgtatgagagggccctgcctgctgcatcttttctgttgccccatccaccgccagcttcccttcactcccctatcccattctccctctcaaggcaggggtcatagatcctaagccataaaataaattttattccaaaataacaaaataaataatctactgtacacaatctgaaaagaaa

SEQ ID NO: 406734 - DNA, 4692 bp, Homo sapiens
tccagggagggacctgggtagaaggagaagccggaaacagcgggctggggcagccactgcttacactgaagagggaggacgggagaggagtgtgtgtgtgtgtgtgtgtgtgtgtgtgtatgtatgtgtgtgctttatcttatttttctttttggtggtggtggtggaaggggggaggtgctagcagggccagccttgaactcgctggacagagctacagacctatggggcctggaagtgcccgctgagaaagggagaagacagcagaggggttgccgaggcaacctccaagtcccagatcatgtctctgtggggtctggtctccaagatgcccccagaaaaagtgcagcggctctatgtcgactttccccaacacctgcggcatcttctgggtgactggctggagagccagccctgggagttcctggtcggctccgacgccttctgctgcaacttggctagtgccctactttcagacactgtccagcaccttcaggcctcggtgggagagcagggggaggggagcaccatcttgcaacacatcagcacccttgagagcatatatcagagggaccccctgaagctggtggccactttcagacaaatacttcaaggagagaaaaaagctgttatggaacagttccgccacttgccaatgcctttccactggaagcaggaagaactcaagtttaagacaggcttgcggaggctgcagcaccgagtaggggagatccaccttctccgagaagccctgcagaagggggctgaggctggccaagtgtctctgcacagcttgatagaaactcctgctaatgggactgggccaagtgaggccctggccatgctactgcaggagaccactggagagctagaggcagccaaagccctagtgctgaagaggatccagatttggaaacggcagcagcagctggcagggaatggcgcaccgtttgaggagagcctggccccactccaggagaggtgtgaaagcctggtggacatttattcccagctacagcaggaggtaggggcggctggtggggagcttgagcccaagacccgggcatcgctgactggccggctggatgaagtcctgagaaccctcgtcaccagttgcttcctggtggagaagcagcccccccaggtactgaagactcagaccaagttccaggctggagttcgattcctgttgggcttgaggttcctgggggccccagccaagcctccgctggtcagggccgacatggtgacagagaagcaggcgcgggagctgagtgtgcctcagggtcctggggctggagcagaaagcactggagaaatcatcaacaacactgtgcccttggagaacagcattcctgggaactgctgctctgccctgttcaagaacctgcttctcaagaagatcaagcggtgtgagcggaagggcactgagtctgtcacagaggagaagtgcgctgtgctcttctctgccagcttcacacttggccccggcaaactccccatccagctccaggccctgtctctgcccctggtggtcatcgtccatggcaaccaagacaacaatgccaaagccactatcctgtgggacaatgccttctctgagatggaccgcgtgccctttgtggtggctgagcgggtgccctgggagaagatgtgtgaaactctgaacctgaagttcatggctgaggtggggaccaaccgggggctgctcccagagcacttcctcttcctggcccagaagatcttcaatgacaacagcctcagtatggaggccttccagcaccgttctgtgtcctggtcgcagttcaacaaggagatcctgctgggccgtggcttcaccttttggcagtggtttgatggtgtcctggacctcaccaaacgctgtctccggagctactggtctgaccggctgatcattggcttcatcagcaaacagtacgttactagccttcttctcaatgagcccgacggaacctttctcctccgcttcagcgactcagagattgggggcatcaccattgcccatgtcatccggggccaggatggctctccacagatagagaacatccagccattctctgccaaagacctgtccattcgctcactgggggaccgaatccgggatcttgctcagctcaaaaatctctatcccaagaagcccaaggatgaggctttccggagccactacaagcctgaacagatgggtaaggatggcaggggttatgtcccagctaccatcaagatgaccgtggaaagggaccaaccacttcctaccccagagctccagatgcctaccatggtgccttcttatgaccttggaatggcccctgattcctccatgagcatgcagcttggcccagatatggtgccccaggtgtacccaccacactctcactccatccccccgtatcaaggcctctccccagaagaatcagtcaacgtgttgtcagccttccaggagcctcacctgcagatgccccccagcctgggccagatgagcctgccctttgaccagcctcacccccagggcctgctgccgtgccagcctcaggagcatgctgtgtccagccctgaccccctgctctgctcagatgtgaccatggtggaagacagctgcctgagccagccagtgacagcgtttcctcagggcacttggattggtgaagacatattccctcctctgctgcctcccactgaacaggacctcactaagcttctcctggaggggcaaggggagtcggggggagggtccttgggggcacagcccctcctgcagccctcccactatgggcaatctgggatctcaatgtcccacatggacctaagggccaaccccagttggtgatcccagctggagggagaacccaaagagacagctcttctactacccccacagacctgctctggacacttgctcatgccctgccaagcagcagatggggagggtgccctcctatccccacctactcctgggtcaggaggaaaagactaacaggagaatgcacagtgggtggagccaatccactccttcctttctatcattcccctgcccacctccttccagcactgactggaagggaagttcaggctctgagacacgccccaacatgcctgcacctgcagcgcgcacacgcacgcacacacacatacagagctctctgagggtgatggggctgagcaggaggggggctgggtaagagcacaggttagggcatggaaggcttctccgcccattctgacccagggcctaggacggataggcaggaacatacagacacatttacactagaggccagggatagaggatattgggtctcagccctaggggaatgggaagcagctcaagggaccctgggtgggagcataggaggggtctggacatgtggttactagtacaggttttgccctgattaaaaaatctcccaaagccccaaattcctgttagccaggtggaggcttctgatacgtgtatgagactatgcaaaagtacaagggctgagattcttcgtgtatagctgtgtgaacgtgtatgtacctaggatatgttaaatatatagctggcaccttagttgcatgaccacatagaacatgtgtctatctgcttttgcctacgtgacaacacaaatttgggagggtgagacactgcacagaagacagcagcaagttggctgtgacatctacgtatggctccacacctccaatgctgcctgggagccagggtgagagtctgggtccaggcctggccatgtggccctccagtgtatgagagggccctgcctgctgcatcttttctgttgccccatccaccgccagcttcccttcactcccctatcccattctccctctcaaggcaggggtcatagatcctaagccataaaataaattttattccaaaataacaaaataaataatctactgtacacaatctgaaaagaaagacgctctaactgctcagataggtgctgcggtccagcccccagctggaggagaccctgagtccaacccaggcctcccgagggggccagtgaagggatcccacacccaccgcccctatgtagggcagggaagaaattgcaaaggacttgggggatagatgggaatgggagggcaaactgcagcacttgttaaattaattaaagaaacaaaccagaagcacaaaaacggggaaggagaggggagaaggagcaggtccagtgttcccaggcccccaattctgggggcaaatgttgccacttttagctggaccttcccagggaagtccccctttcccccttgtccaaactgagtccaactgctcacaccactggtgcaaacctaaagagaatgggagtgtgttgtgtgagggaggggaaaaccccagatgccctggaggcagagtccttgccccctcgctctgggcaggggtgagggcaccacgcaccctccttgtgtcctctctccaggcctctgcttgttattgcttgaagccccacagtcttatgcccatggagcaggtggggaggcaggagaagggcagaggaaggatccagggttgtgactagattccggggatggagagcgtgggggtctgtgtgagccagaagtctgaggtcctgggtctgaagacaccagtccaaccctcactgccggctggcctcagcctccactttcacgctgctcctgcgaccctccaccagcgcgggatggggtcct

SEQ ID NO: 406735 - DNA, 4122 bp, Homo sapiens
tccagggagggacctgggtagaaggagaagccggaaacagcgggctggggcagccactgcttacactgaagagggaggacgggagaggagtgtgtgtgtgtgtgtgtgtgtgtgtgtgtatgtatgtgtgtgctttatcttatttttctttttggtggtggtggtggaaggggggaggtgctagcagggccagccttgaactcgctggacagagctacagacctatggggcctggaagtgcccgctgagaaagggagaagacagcagaggggttgccgaggcaacctccaagtcccagatcatgtctctgtggggtctggtctccaagatgcccccagaaaaagtgcagcggctctatgtcgactttccccaacacctgcggcatcttctgggtgactggctggagagccagccctgggagttcctggtcggctccgacgccttctgctgcaacttggctagtgccctactttcagacactgtccagcaccttcaggcctcggtgggagagcagggggaggggagcaccatcttgcaacacatcagcacccttgagagcatatatcagagggaccccctgaagctggtggccactttcagacaaatacttcaaggagagaaaaaagctgttatggaacagttccgccacttgccaatgcctttccactggaagcaggaagaactcaagtttaagacaggcttgcggaggctgcagcaccgagtaggggagatccaccttctccgagaagccctgcagaagggggctgaggctggccaagtgtctctgcacagcttgatagaaactcctgctaatgggactgggccaagtgaggccctggccatgctactgcaggagaccactggagagctagaggcagccaaagccctagtgctgaagaggatccagatttggaaacggcagcagcagctggcagggaatggcgcaccgtttgaggagagcctggccccactccaggagaggtgtgaaagcctggtggacatttattcccagctacagcaggaggtaggggcggctggtggggagcttgagcccaagacccgggcatcgctgactggccggctggatgaagtcctgagaaccctcgtcaccagttgcttcctggtggagaagcagcccccccaggtactgaagactcagaccaagttccaggctggagttcgattcctgttgggcttgaggttcctgggggccccagccaagcctccgctggtcagggccgacatggtgacagagaagcaggcgcgggagctgagtgtgcctcagggtcctggggctggagcagaaagcactggagaaatcatcaacaacactgtgcccttggagaacagcattcctgggaactgctgctctgccctgttcaagaacctgcttctcaagaagatcaagcggtgtgagcggaagggcactgagtctgtcacagaggagaagtgcgctgtgctcttctctgccagcttcacacttggccccggcaaactccccatccagctccaggccctgtctctgcccctggtggtcatcgtccatggcaaccaagacaacaatgccaaagccactatcctgtgggacaatgccttctctgagatggaccgcgtgccctttgtggtggctgagcgggtgccctgggagaagatgtgtgaaactctgaacctgaagttcatggctgaggtggggaccaaccgggggctgctcccagagcacttcctcttcctggcccagaagatcttcaatgacaacagcctcagtatggaggccttccagcaccgttctgtgtcctggtcgcagttcaacaaggagatcctgctgggccgtggcttcaccttttggcagtggtttgatggtgtcctggacctcaccaaacgctgtctccggagctactggtctgaccggctgatcattggcttcatcagcaaacagtacgttactagccttcttctcaatgagcccgacggaacctttctcctccgcttcagcgactcagagattgggggcatcaccattgcccatgtcatccggggccaggatggctctccacagatagagaacatccagccattctctgccaaagacctgtccattcgctcactgggggaccgaatccgggatcttgctcagctcaaaaatctctatcccaagaagcccaaggatgaggctttccggagccactacaagcctgaacagatgggtaaggatggcaggggttatgtcccagctaccatcaagatgaccgtggaaagggaccaaccacttcctaccccagagctccagatgcctaccatggtgccttcttatgaccttggaatggcccctgattcctccatgagcatgcagcttggcccagatatggtgccccaggtgtacccaccacactctcactccatccccccgtatcaaggcctctccccagaagaatcagtcaacgtgttgtcagccttccaggagcctcacctgcagatgccccccagcctgggccagatgagcctgccctttgaccagcctcacccccagggcctgctgccgtgccagcctcaggagcatgctgtgtccagccctgaccccctgctctgctcagatgtgaccatggtggaagacagctgcctgagccagccagtgacagcgtttcctcagggcacttggattggtgaagacatattccctcctctgctgcctcccactgaacaggacctcactaagcttctcctggaggggcaaggggagtcggggggagggtccttgggggcacagcccctcctgcagccctcccactatgggcaatctgggatctcaatgtcccacatggacctaagggccaaccccagttggtgatcccagctggagggagaacccaaagagacagctcttctactacccccacagacctgctctggacacttgctcatgccctgccaagcagcagatggggagggtgccctcctatccccacctactcctgggtcaggaggaaaagactaacaggagaatgcacagtgggtggagccaatccactccttcctttctatcattcccctgcccacctccttccagcactgactggaagggaagttcaggctctgagacacgccccaacatgcctgcacctgcagcgcgcacacgcacgcacacacacatacagagctctctgagggtgatggggctgagcaggaggggggctgggtaagagcacaggttagggcatggaaggcttctccgcccattctgacccagggcctaggacggataggcaggaacatacagacacatttacactagaggccagggatagaggatattgggtctcagccctaggggaatgggaagcagctcaagggaccctgggtgggagcataggaggggtctggacatgtggttactagtacaggttttgccctgattaaaaaatctcccaaagccccaaattcctgttagccaggtggaggcttctgatacgtgtatgagactatgcaaaagtacaagggctgagattcttcgtgtatagctgtgtgaacgtgtatgtacctaggatatgttaaatatatagctggcaccttagttgcatgaccacatagaacatgtgtctatctgcttttgcctacgtgacaacacaaatttgggagggtgagacactgcacagaagacagcagcaagtgtgctggcctctctgacatatgctaacccccaaatactctgaatttggagtctgactgtgcccaagtgggtccaagtggctgtgacatctacgtatggctccacacctccaatgctgcctgggagccagggtgagagtctgggtccaggcctggccatgtggccctccagtgtatgagagggccctgcctgctgcatcttttctgttgccccatccaccgccagcttcccttcactcccctatcccattctccctctcaaggcaggggtcatagatcctaagccataaaataaattttattccaaaataacaaaataaataatctactgtacacaatctgaaaagaaaaaaaaaacacacccccgggccttcggggggaaaaggccaacagcacggcaccgtcccgcccctctggcaaggagaaacggcccaaagagataacgcctgtacaaacaca

SEQ ID NO: 406736 - DNA, 3959 bp, Homo sapiens
tccagggagggacctgggtagaaggagaagccggaaacagcgggctggggcagccactgcttacactgaagagggaggacgggagaggagtgtgtgtgtgtgtgtgtgtgtgtgtgtgtatgtatgtgtgtgctttatcttatttttctttttggtggtggtggtggaaggggggaggtgctagcagggccagccttgaactcgctggacagagctacagacctatggggcctggaagtgcccgctgagaaagggagaagacagcagaggggttgccgaggcaacctccaagtcccagatcatgtctctgtggggtctggtctccaagatgcccccagaaaaagtgcagcggctctatgtcgactttccccaacacctgcggcatcttctgggtgactggctggagagccagccctgggagttcctggtcggctccgacgccttctgctgcaacttggctagtgccctactttcagacactgtccagcaccttcaggcctcggtgggagagcagggggaggggagcaccatcttgcaacacatcagcacccttgagagcatatatcagagggaccccctgaagctggtggccactttcagacaaatacttcaaggagagaaaaaagctgttatggaacagttccgccacttgccaatgcctttccactggaagcaggaagaactcaagtttaagacaggcttgcggaggctgcagcaccgagtaggggagatccaccttctccgagaagccctgcagaagggggctgaggctggccaagtgtctctgcacagcttgatagaaactcctgctaatgggactgggccaagtgaggccctggccatgctactgcaggagaccactggagagctagaggcagccaaagccctagtgctgaagaggatccagatttggaaacggcagcagcagctggcagggaatggcgcaccgtttgaggagagcctggccccactccaggagaggtgtgaaagcctggtggacatttattcccagctacagcaggaggtaggggcggctggtggggagcttgagcccaagacccgggcatcgctgactggccggctggatgaagtcctgagaaccctcgtcaccagttgcttcctggtggagaagcagcccccccaggtactgaagactcagaccaagttccaggctggagttcgattcctgttgggcttgaggttcctgggggccccagccaagcctccgctggtcagggccgacatggtgacagagaagcaggcgcgggagctgagtgtgcctcagggtcctggggctggagcagaaagcactggagaaatcatcaacaacactgtgcccttggagaacagcattcctgggaactgctgctctgccctgttcaagaacctgcttctcaagaagatcaagcggtgtgagcggaagggcactgagtctgtcacagaggagaagtgcgctgtgctcttctctgccagcttcacacttggccccggcaaactccccatccagctccaggccctgtctctgcccctggtggtcatcgtccatggcaaccaagacaacaatgccaaagccactatcctgtgggacaatgccttctctgagatggaccgcgtgccctttgtggtggctgagcgggtgccctgggagaagatgtgtgaaactctgaacctgaagttcatggctgaggtggggaccaaccgggggctgctcccagagcacttcctcttcctggcccagaagatcttcaatgacaacagcctcagtatggaggccttccagcaccgttctgtgtcctggtcgcagttcaacaaggagatcctgctgggccgtggcttcaccttttggcagtggtttgatggtgtcctggacctcaccaaacgctgtctccggagctactggtctgaccggctgatcattggcttcatcagcaaacagtacgttactagccttcttctcaatgagcccgacggaacctttctcctccgcttcagcgactcagagattgggggcatcaccattgcccatgtcatccggggccaggatggctctccacagatagagaacatccagccattctctgccaaagacctgtccattcgctcactgggggaccgaatccgggatcttgctcagctcaaaaatctctatcccaagaagcccaaggatgaggctttccggagccactacaagcctgaacagatgggtaaggatggcaggggttatgtcccagctaccatcaagatgaccgtggaaagggaccaaccacttcctaccccagagctccagatgcctaccatggtgccttcttatgaccttggaatggcccctgattcctccatgagcatgcagcttggcccagatatggtgccccaggtgtacccaccacactctcactccatccccccgtatcaaggcctctccccagaagaatcagtcaacgtgttgtcagccttccaggagcctcacctgcagatgccccccagcctgggccagatgagcctgccctttgaccagcctcacccccagggcctgctgccgtgccagcctcaggagcatgctgtgtccagccctgaccccctgctctgctcagatgtgaccatggtggaagacagctgcctgagccagccagtgacagcgtttcctcagggcacttggattggtgaagacatattccctcctctgctgcctcccactgaacaggacctcactaagcttctcctggaggggcaaggggagtcggggggagggtccttgggggcacagcccctcctgcagccctcccactatgggcaatctgggatctcaatgtcccacatggacctaagggccaaccccagttggtgatcccagctggagggagaacccaaagagacagctcttctactacccccacagacctgctctggacacttgctcatgccctgccaagcagcagatggggagggtgccctcctatccccacctactcctgggtcaggaggaaaagactaacaggagaatgcacagtgggtggagccaatccactccttcctttctatcattcccctgcccacctccttccagcactgactggaagggaagttcaggctctgagacacgccccaacatgcctgcacctgcagcgcgcacacgcacgcacacacacatacagagctctctgagggtgatggggctgagcaggaggggggctgggtaagagcacaggttagggcatggaaggcttctccgcccattctgacccagggcctaggacggataggcaggaacatacagacacatttacactagaggccagggatagaggatattgggtctcagccctaggggaatgggaagcagctcaagggaccctgggtgggagcataggaggggtctggacatgtggttactagtacaggttttgccctgattaaaaaatctcccaaagccccaaattcctgttagccaggtggaggcttctgatacgtgtatgagactatgctaggatatgttaaatatatagctggcaccttagttgcatgaccacatagaacatgtgtctatctgcttttgcctacgtgacaacacaaatttgggagggtgagacactgcacagaagacagcagcaagtgtgctggcctctctgacatatgctaacccccaaatactctgaatttggagtctgactgtgcccaagtgggtccaagtggctgtgacatctacgtatggctccacacctccaatgctgcctgggagccagggtgagagtctgggtccaggcctggccatgtggccctccagtgtatgagagggccctgcctgctgcatcttttctgttgccccatccaccgccagcttcccttcactcccctatcccattctccctctcaaggcaggggtcatagatcctaagccataaaataaattttattccaaaataacaaaataaataatctactgtacacaatctgaaaagaaa

SEQ ID NO: 406737 - DNA, 4228 bp, Homo sapiens
tccagggagggacctgggtagaaggagaagccggaaacagcgggctggggcagccactgcttacactgaagagggaggacgggagaggagtgtgtgtgtgtgtgtgtgtgtgtgtgtgtatgtatgtgtgtgctttatcttatttttctttttggtggtggtggtggaaggggggaggtgctagcagggccagccttgaactcgctggacagagctacagacctatggggcctggaagtgcccgctgagaaagggagaagacagcagaggggttgccgaggcaacctccaagtcccagatcatgtctctgtggggtctggtctccaagatgcccccagaaaaagtgcagcggctctatgtcgactttccccaacacctgcggcatcttctgggtgactggctggagagccagccctgggagttcctggtcggctccgacgccttctgctgcaacttggctagtgccctactttcagacactgtccagcaccttcaggcctcggtgggagagcagggggaggggagcaccatcttgcaacacatcagcacccttgagagcatatatcagagggaccccctgaagctggtggccactttcagacaaatacttcaaggagagaaaaaagctgttatggaacagttccgccacttgccaatgcctttccactggaagcaggaagaactcaagtttaagacaggcttgcggaggctgcagcaccgagtaggggagatccaccttctccgagaagccctgcagaagggggctgaggctggccaagtgtctctgcacagcttgatagaaactcctgctaatgggactgggccaagtgaggccctggccatgctactgcaggagaccactggagagctagaggcagccaaagccctagtgctgaagaggatccagatttggaaacggcagcagcagctggcagggaatggcgcaccgtttgaggagagcctggccccactccaggagaggtgtgaaagcctggtggacatttattcccagctacagcaggaggtaggggcggctggtggggagcttgagcccaagacccgggcatcgctgactggccggctggatgaagtcctgagaaccctcgtcaccagttgcttcctggtggagaagcagcccccccaggtactgaagactcagaccaagttccaggctggagttcgattcctgttgggcttgaggttcctgggggccccagccaagcctccgctggtcagggccgacatggtgacagagaagcaggcgcgggagctgagtgtgcctcagggtcctggggctggagcagaaagcactggagaaatcatcaacaacactgtgcccttggagaacagcattcctgggaactgctgctctgccctgttcaagaacctgcttctcaagaagatcaagcggtgtgagcggaagggcactgagtctgtcacagaggagaagtgcgctgtgctcttctctgccagcttcacacttggccccggcaaactccccatccagctccaggccctgtctctgcccctggtggtcatcgtccatggcaaccaagacaacaatgccaaagccactatcctgtgggacaatgccttctctgagatggaccgcgtgccctttgtggtggctgagcgggtgccctgggagaagatgtgtgaaactctgaacctgaagttcatggctgaggtggggaccaaccgggggctgctcccagagcacttcctcttcctggcccagaagatcttcaatgacaacagcctcagtatggaggccttccagcaccgttctgtgtcctggtcgcagttcaacaaggagatcctgctgggccgtggcttcaccttttggcagtggtttgatggtgtcctggacctcaccaaacgctgtctccggagctactggtctgaccggctgatcattggcttcatcagcaaacagtacgttactagccttcttctcaatgagcccgacggaacctttctcctccgcttcagcgactcagagattgggggcatcaccattgcccatgtcatccggggccaggatggctctccacagatagagaacatccagccattctctgccaaagacctgtccattcgctcactgggggaccgaatccgggatcttgctcagctcaaaaatctctatcccaagaagcccaaggatgaggctttccggagccactacaagcgtgagctggaactggcagctctgattccttcctgtcacccacttcctccctgctccccgctgccctcctctccctgcccgtgtgtcatcctgatgtcactccctatttcatagctgtgcttctcttacttccccatgatccatgcccaccttttccacctcccttcctccctaaccccagagcactccatggctgtcttttccttctcacaacagctgaacagatgggtaaggatggcaggggttatgtcccagctaccatcaagatgaccgtggaaagggaccaaccacttcctaccccagagctccagatgcctaccatggtgccttcttatgaccttggaatggcccctgattcctccatgagcatgcagcttggcccagatatggtgccccaggtgtacccaccacactctcactccatccccccgtatcaaggcctctccccagaagaatcagtcaacgtgttgtcagccttccaggagcctcacctgcagatgccccccagcctgggccagatgagcctgccctttgaccagcctcacccccagggcctgctgccgtgccagcctcaggagcatgctgtgtccagccctgaccccctgctctgctcagatgtgaccatggtggaagacagctgcctgagccagccagtgacagcgtttcctcagggcacttggattggtgaagacatattccctcctctgctgcctcccactgaacaggacctcactaagcttctcctggaggggcaaggggagtcggggggagggtccttgggggcacagcccctcctgcagccctcccactatgggcaatctgggatctcaatgtcccacatggacctaagggccaaccccagttggtgatcccagctggagggagaacccaaagagacagctcttctactacccccacagacctgctctggacacttgctcatgccctgccaagcagcagatggggagggtgccctcctatccccacctactcctgggtcaggaggaaaagactaacaggagaatgcacagtgggtggagccaatccactccttcctttctatcattcccctgcccacctccttccagcactgactggaagggaagttcaggctctgagacacgccccaacatgcctgcacctgcagcgcgcacacgcacgcacacacacatacagagctctctgagggtgatggggctgagcaggaggggggctgggtaagagcacaggttagggcatggaaggcttctccgcccattctgacccagggcctaggacggataggcaggaacatacagacacatttacactagaggccagggatagaggatattgggtctcagccctaggggaatgggaagcagctcaagggaccctgggtgggagcataggaggggtctggacatgtggttactagtacaggttttgccctgattaaaaaatctcccaaagccccaaattcctgttagccaggtggaggcttctgatacgtgtatgagactatgcaaaagtacaagggctgagattcttcgtgtatagctgtgtgaacgtgtatgtacctaggatatgttaaatatatagctggcaccttagttgcatgaccacatagaacatgtgtctatctgcttttgcctacgtgacaacacaaatttgggagggtgagacactgcacagaagacagcagcaagtgtgctggcctctctgacatatgctaacccccaaatactctgaatttggagtctgactgtgcccaagtgggtccaagtggctgtgacatctacgtatggctccacacctccaatgctgcctgggagccagggtgagagtctgggtccaggcctggccatgtggccctccagtgtatgagagggccctgcctgctgcatcttttctgttgccccatccaccgccagcttcccttcactcccctatcccattctccctctcaaggcaggggtcatagatcctaagccataaaataaattttattccaaaataacaaaataaataatctactgtacacaatctgaaaagaaa

SEQ ID NO: 406738 - DNA, 4415 bp, Homo sapiens
tccagggagggacctgggtagaaggagaagccggaaacagcgggctggggcagccactgcttacactgaagagggaggacgggagaggagtgtgtgtgtgtgtgtgtgtgtgtgtgtgtatgtatgtgtgtgctttatcttatttttctttttggtggtggtggtggaaggggggaggtgctagcagggccagccttgaactcgctggacagagctacagacctatggggcctggaagtgcccgctgagaaagggagaagacagcagaggggttgccgaggcaacctccaagtcccagatcatgtctctgtggggtctggtctccaagatgcccccagaaaaagtgcagcggctctatgtcgactttccccaacacctgcggcatcttctgggtgactggctggagagccagccctgggagttcctggtcggctccgacgccttctgctgcaacttggctagtgccctactttcagacactgtccagcaccttcaggcctcggtgggagagcagggggaggggagcaccatcttgcaacacatcagcacccttgagagcatatatcagagggaccccctgaagctggtggccactttcagacaaatacttcaaggagagaaaaaagctgttatggaacagttccgccacttgccaatgcctttccactggaagcaggaagaactcaagtttaagacaggcttgcggaggctgcagcaccgagtaggggagatccaccttctccgagaagccctgcagaagggggctgaggctggccaagtgtctctgcacagcttgatagaaactcctgctaatgggactgggccaagtgaggccctggccatgctactgcaggagaccactggagagctagaggcagccaaagccctagtgctgaagaggatccagatttggaaacggcagcagcagctggcagggaatggcgcaccgtttgaggagagcctggccccactccaggagaggtgtgaaagcctggtggacatttattcccagctacagcaggaggtaggggcggctggtggggagcttgagcccaagacccgggcatcgctgactggccggctggatgaagtcctgagaaccctcgtcaccagttgcttcctggtggagaagcagcccccccaggtactgaagactcagaccaagttccaggctggagttcgattcctgttgggcttgaggttcctgggggccccagccaagcctccgctggtcagggccgacatggtgacagagaagcaggcgcgggagctgagtgtgcctcagggtcctggggctggagcagaaagcactggagaaatcatcaacaacactgtgcccttggagaacagcattcctgggaactgctgctctgccctgttcaagaacctgcttctcaagaagatcaagcggtgtgagcggaagggcactgagtctgtcacagaggagaagtgcgctgtgctcttctctgccagcttcacacttggccccggcaaactccccatccagctccaggccctgtctctgcccctggtggtcatcgtccatggcaaccaagacaacaatgccaaagccactatcctgtgggacaatgccttctctgagatggaccgcgtgccctttgtggtggctgagcgggtgccctgggagaagatgtgtgaaactctgaacctgaagttcatggctgaggtggggaccaaccgggggctgctcccagagcacttcctcttcctggcccagaagatcttcaatgacaacagcctcagtatggaggccttccagcaccgttctgtgtcctggtcgcagttcaacaaggagatcctgctgggccgtggcttcaccttttggcagtggtttgatggtgtcctggacctcaccaaacgctgtctccggagctactggtctgaccggctgatcattggcttcatcagcaaacagtacgttactagccttcttctcaatgagcccgacggaacctttctcctccgcttcagcgactcagagattgggggcatcaccattgcccatgtcatccggggccaggatggctctccacagatagagaacatccagccattctctgccaaagacctgtccattcgctcactgggggaccgaatccgggatcttgctcagctcaaaaatctctatcccaagaagcccaaggatgaggctttccggagccactacaagcctgaacagatgggtaaggatggcaggggttatgtcccagctaccatcaagatgaccgtggaaagggaccaaccacttcctaccccagagctccagatgcctaccatggtgccttcttatgaccttggaatggcccctgattcctccatgagcatgcagcttggcccagatatggtgccccaggtgtacccaccacactctcactccatccccccgtatcaaggcctctccccagaagaatcagtcaacgtgttgtcagccttccaggagcctcacctgcagatgccccccagcctgggccagatgagcctgccctttgaccagcctcacccccagggcctgctgccgtgccagcctcaggagcatgctgtgtccagccctgaccccctgctctgctcagatgtgaccatggtggaagacagctgcctgagccagccagtgacagcgtttcctcagggcacttggattggtgaagacatattccctcctctgctgcctcccactgaacaggacctcactaagcttctcctggaggggcaaggggagtcggggggagggtccttgggggcacagcccctcctgcagccctcccactatgggcaatctgggatctcaatgtcccacatggacctaagggccaaccccagttggtgatcccagctggagggagaacccaaagagacagctcttctactacccccacagacctgctctggacacttgctcatgccctgccaagcagcagatggggagggtgccctcctatccccacctactcctgggtcaggaggaaaagactaacaggagaatgcacagtgggtggagccaatccactccttcctttctatcattcccctgcccacctccttccagcactgactggaagggaagttcaggctctgagacacgccccaacatgcctgcacctgcagcgcgcacacgcacgcacacacacatacagagctctctgagggtgatggggctgagcaggaggggggctgggtaagagcacaggttagggcatggaaggcttctccgcccattctgacccagggcctaggacggataggcaggaacatacagacacatttacactagaggccagggatagaggatattgggtctcagccctaggggaatgggaagcagctcaagggaccctgggtgggagcataggaggggtctggacatgtggttactagtacaggttttgccctgattaaaaaatctcccaaagccccaaattcctgttagccaggtggaggcttctgatacgtgtatgagactatgcaaaagtacaagggctgagattcttcgtgtatagctgtgtgaacgtgtatgtacctaggatatgttaaatatatagctggcaccttagttgcatgacaaaaaaaaaaaaaaaaaaaaaaaaaaaaaaaaaaaaaaaaaaaaaaaaaaaaaaaaaaaaaaaaaaaaaaaaaaaaggggggggggggtaaaaatatttttttggggggggcatattgcacccgtttttttttgaaaagggggggcctaaggggggtgtttttatattaaaccacaagggcggaccggcgcgcctgtatcataaccaaaccgcctctgtgtgcgggagcacaacacgacctgtacttgtcgcggaatctactcttctgagaaagacaaccaccaccctcatgcaggccgggcgggccacaaccatgtctggcgcgacccaccctcccaccaggacgaatatattctaaccgcgccctccggacgcctaatcaaacaagcacctccgggcttcatccatgttggcctcacccccccgccgcactatcttgctcctgggcgcctgccaaaactgtgcctcaccgtgcttttttttcatcagcacacccttttttcagcgcggggcctcagccgaacaaaaacaccccccccgatcagaccatacgcttccaccaaagcagaccagacaggatagtcgtaagccgcccaagaaggagccgacggcgacgtagaaacgcgacagataacgacacaaacgcgtaggttaggtcacgtattacgaccagcacaccacccccgctctaaccgatacgcatagagagcagcgatcttccagcacgtgccgtacccggctagccgaccagtacagacacatcataacgtacctgatcagcactatagtacacacatcattcagccgacctcctgcatcccgcaagcctcggcgcca

SEQ ID NO: 406739 - DNA, 2559 bp, Homo sapiens
tcactgtacaactggctaagctactgtactttgtaattctccaagaggggagccacggtgtggtgttgtacctcatttgaaatggtcggattggcgaccatttcaacaatgccaaagccactatcctgtgggacaatgccttctctgagatggaccgcgtgccctttgtggtggctgagcgggtgccctgggagaagatgtgtgaaactctgaacctgaagttcatggctgaggtggggaccaaccgggggctgctcccagagcacttcctcttcctggcccagaagatcttcaatgacaacagcctcagtatggaggccttccagcaccgttctgtgtcctggtcgcagttcaacaaggagatcctgctgggccgtggcttcaccttttggcagtggtttgatggtgtcctggacctcaccaaacgctgtctccggagctactggtctgaccggctgatcattggcttcatcagcaaacagtacgttactagccttcttctcaatgagcccgacggaacctttctcctccgcttcagcgactcagagattgggggcatcaccattgcccatgtcatccggggccaggatggctctccacagatagagaacatccagccattctctgccaaagacctgtccattcgctcactgggggaccgaatccgggatcttgctcagctcaaaaatctctatcccaagaagcccaaggatgaggctttccggagccactacaagcctgaacagatgggtaaggatggcaggggttatgtcccagctaccatcaagatgaccgtggaaagggaccaaccacttcctaccccagagctccagatgcctaccatggtgccttcttatgaccttggaatggcccctgattcctccatgagcatgcagcttggcccagatatggtgccccaggtgtacccaccacactctcactccatccccccgtatcaaggcctctccccagaagaatcagtcaacgtgttgtcagccttccaggagcctcacctgcagatgccccccagcctgggccagatgagcctgccctttgaccagcctcacccccagggcctgctgccgtgccagcctcaggagcatgctgtgtccagccctgaccccctgctctgctcagatgtgaccatggtggaagacagctgcctgagccagccagtgacagcgtttcctcagggcacttggattggtgaagacatattccctcctctgctgcctcccactgaacaggacctcactaagcttctcctggaggggcaaggggagtcggggggagggtccttgggggcacagcccctcctgcagccctcccactatgggcaatctgggatctcaatgtcccacatggacctaagggccaaccccagttggtgatcccagctggagggagaacccaaagagacagctcttctactacccccacagacctgctctggacacttgctcatgccctgccaagcagcagatggggagggtgccctcctatccccacctactcctgggtcaggaggaaaagactaacaggagaatgcacagtgggtggagccaatccactccttcctttctatcattcccctgcccacctccttccagcactgactggaagggaagttcaggctctgagacacgccccaacatgcctgcacctgcagcgcgcacacgcacgcacacacacatacagagctctctgagggtgatggggctgagcaggaggggggctgggtaagagcacaggttagggcatggaaggcttctccgcccattctgacccagggcctaggacggataggcaggaacatacagacacatttacactagaggccagggatagaggatattgggtctcagccctaggggaatgggaagcagctcaagggaccctgggtgggagcataggaggggtctggacatgtggttactagtacaggttttgccctgattaaaaaatctcccaaagccccaaattcctgttagccaggtggaggcttctgatacgtgtatgagactatgcaaaagtacaagggctgagattcttcgtgtatagctgtgtgaacgtgtatgtacctaggatatgttaaatatatagctggcaccttagttgcatgaccacatagaacatgtgtctatctgcttttgcctacgtgacaacacaaatttgggagggtgagacactgcacagaagacagcagcaagtgtgctggcctctctgacatatgctaacccccaaatactctgaatttggagtctgactgtgcccaagtgggtccaagtggctgtgacatctacgtatggctccacacctccaatgctgcctgggagccagggtgagagtctgggtccaggcctggccatgtggccctccagtgtatgagagggccctgcctgctgcatcttttctgttgccccatccaccgccagcttcccttcactcccctatcccattctccctctcaaggcaggggtcatagatcctaagccataaaataaattttattccaaaataacaaaataaataatctactgtacacaatctgaaaagaaa

SEQ ID NO: 406740 - DNA, 2334 bp, Homo sapiens
accgaactaacaacaataggcttagtaggagcccccggttattcctcttcctggcccagaagatcttcaatgacaacagcctcagtatggaggccttccagcaccgttctgtgtcctggtcgcagttcaacaaggagatcctgctgggccgtggcttcaccttttggcagtggtttgatggtgtcctggacctcaccaaacgctgtctccggagctactggtctgaccggctgatcattggcttcatcagcaaacagtacgttactagccttcttctcaatgagcccgacggaacctttctcctccgcttcagcgactcagagattgggggcatcaccattgcccatgtcatccggggccaggatggctctccacagatagagaacatccagccattctctgccaaagacctgtccattcgctcactgggggaccgaatccgggatcttgctcagctcaaaaatctctatcccaagaagcccaaggatgaggctttccggagccactacaagcctgaacagatgggtaaggatggcaggggttatgtcccagctaccatcaagatgaccgtggaaagggaccaaccacttcctaccccagagctccagatgcctaccatggtgccttcttatgaccttggaatggcccctgattcctccatgagcatgcagcttggcccagatatggtgccccaggtgtacccaccacactctcactccatccccccgtatcaaggcctctccccagaagaatcagtcaacgtgttgtcagccttccaggagcctcacctgcagatgccccccagcctgggccagatgagcctgccctttgaccagcctcacccccagggcctgctgccgtgccagcctcaggagcatgctgtgtccagccctgaccccctgctctgctcagatgtgaccatggtggaagacagctgcctgagccagccagtgacagcgtttcctcagggcacttggattggtgaagacatattccctcctctgctgcctcccactgaacaggacctcactaagcttctcctggaggggcaaggggagtcggggggagggtccttgggggcacagcccctcctgcagccctcccactatgggcaatctgggatctcaatgtcccacatggacctaagggccaaccccagttggtgatcccagctggagggagaacccaaagagacagctcttctactacccccacagacctgctctggacacttgctcatgccctgccaagcagcagatggggagggtgccctcctatccccacctactcctgggtcaggaggaaaagactaacaggagaatgcacagtgggtggagccaatccactccttcctttctatcattcccctgcccacctccttccagcactgactggaagggaagttcaggctctgagacacgccccaacatgcctgcacctgcagcgcgcacacgcacgcacacacacatacagagctctctgagggtgatggggctgagcaggaggggggctgggtaagagcacaggttagggcatggaaggcttctccgcccattctgacccagggcctaggacggataggcaggaacatacagacacatttacactagaggccagggatagaggatattgggtctcagccctaggggaatgggaagcagctcaagggaccctgggtgggagcataggaggggtctggacatgtggttactagtacaggttttgccctgattaaaaaatctcccaaagccccaaattcctgttagccaggtggaggcttctgatacgtgtatgagactatgcaaaagtacaagggctgagattcttcgtgtatagctgtgtgaacgtgtatgtacctaggatatgttaaatatatagctggcaccttagttgcatgaccacatagaacatgtgtctatctgcttttgcctacgtgacaacacaaatttgggagggtgagacactgcacagaagacagcagcaagtgtgctggcctctctgacatatgctaacccccaaatactctgaatttggagtctgactgtgcccaagtgggtccaagtggctgtgacatctacgtatggctccacacctccaatgctgcctgggagccagggtgagagtctgggtccaggcctggccatgtggccctccagtgtatgagagggccctgcctgctgcatcttttctgttgccccatccaccgccagcttcccttcactcccctatcccattctccctctcaaggcaggggtcatagatcctaagccataaaataaattttattccaaaataacaaaataaataatctactgtacacaatctgaaaagaaa

SEQ ID NO: 406741 - DNA, 2300 bp, Homo sapiens
gtgggttgaccgtggcttgtgggttgaccgtggcttgtgggttgaccgtggcttgtgggttgaccgtggcttgtgggttgaccgtggcttgtgggttgacgagatcctgctgggccgtggcttcaccttttggcagtggtttgatggtgtcctggacctcaccaaacgctgtctccggagctactggtctgaccggctgatcattggcttcatcagcaaacagtacgttactagccttcttctcaatgagcccgacggaacctttctcctccgcttcagcgactcagagattgggggcatcaccattgcccatgtcatccggggccaggatggctctccacagatagagaacatccagccattctctgccaaagacctgtccattcgctcactgggggaccgaatccgggatcttgctcagctcaaaaatctctatcccaagaagcccaaggatgaggctttccggagccactacaagcctgaacagatgggtaaggatggcaggggttatgtcccagctaccatcaagatgaccgtggaaagggaccaaccacttcctaccccagagctccagatgcctaccatggtgccttcttatgaccttggaatggcccctgattcctccatgagcatgcagcttggcccagatatggtgccccaggtgtacccaccacactctcactccatccccccgtatcaaggcctctccccagaagaatcagtcaacgtgttgtcagccttccaggagcctcacctgcagatgccccccagcctgggccagatgagcctgccctttgaccagcctcacccccagggcctgctgccgtgccagcctcaggagcatgctgtgtccagccctgaccccctgctctgctcagatgtgaccatggtggaagacagctgcctgagccagccagtgacagcgtttcctcagggcacttggattggtgaagacatattccctcctctgctgcctcccactgaacaggacctcactaagcttctcctggaggggcaaggggagtcggggggagggtccttgggggcacagcccctcctgcagccctcccactatgggcaatctgggatctcaatgtcccacatggacctaagggccaaccccagttggtgatcccagctggagggagaacccaaagagacagctcttctactacccccacagacctgctctggacacttgctcatgccctgccaagcagcagatggggagggtgccctcctatccccacctactcctgggtcaggaggaaaagactaacaggagaatgcacagtgggtggagccaatccactccttcctttctatcattcccctgcccacctccttccagcactgactggaagggaagttcaggctctgagacacgccccaacatgcctgcacctgcagcgcgcacacgcacgcacacacacatacagagctctctgagggtgatggggctgagcaggaggggggctgggtaagagcacaggttagggcatggaaggcttctccgcccattctgacccagggcctaggacggataggcaggaacatacagacacatttacactagaggccagggatagaggatattgggtctcagccctaggggaatgggaagcagctcaagggaccctgggtgggagcataggaggggtctggacatgtggttactagtacaggttttgccctgattaaaaaatctcccaaagccccaaattcctgttagccaggtggaggcttctgatacgtgtatgagactatgcaaaagtacaagggctgagattcttcgtgtatagctgtgtgaacgtgtatgtacctaggatatgttaaatatatagctggcaccttagttgcatgaccacatagaacatgtgtctatctgcttttgcctacgtgacaacacaaatttgggagggtgagacactgcacagaagacagcagcaagtgtgctggcctctctgacatatgctaacccccaaatactctgaatttggagtctgactgtgcccaagtgggtccaagtggctgtgacatctacgtatggctccacacctccaatgctgcctgggagccagggtgagagtctgggtccaggcctggccatgtggccctccagtgtatgagagggccctgcctgctgcatcttttctgttgccccatccaccgccagcttcccttcactcccctatcccattctccctctcaaggcaggggtcatagatcctaagccataaaataaattttattccaaaataacaaaataaataatctactgtacacaatctgaaaagaaa

SEQ ID NO: 406742 - DNA, 2403 bp, Homo sapiens
tagcttggctgaaggagtgagaacaggtcttatggtaggggttggggaaggggaagaaagtccggacagagggatctcagggtctccttcctaccataggctctccacagtgaggccaccccagccagtcctctgtctctgtgcctgtgccctctggggtttcttctgggaatgaaatgtcctgaccttcctgatgccgatcctgatcttcaggaagttcttccagcttctcttcttccttctgtggtctaaatgttcaccttctcactgtgagctctgtgggaacggagactagtgggtctctctccctcaggagccccaccctaggtcctctctcccttgccttggtggagtgagaacaggtcttatggtaggggttggggaaggggaagaaagtccggacagagggatctcagggtctccttcctaccataggctctccacagatagagaacatccagccattctctgccaaagacctgtccattcgctcactgggggaccgaatccgggatcttgctcagctcaaaaatctctatcccaagaagcccaaggatgaggctttccggagccactacaagcctgaacagatgggtaaggatggcaggggttatgtcccagctaccatcaagatgaccgtggaaagggaccaaccacttcctaccccagagctccagatgcctaccatggtgccttcttatgaccttggaatggcccctgattcctccatgagcatgcagcttggcccagatatggtgccccaggtgtacccaccacactctcactccatccccccgtatcaaggcctctccccagaagaatcagtcaacgtgttgtcagccttccaggagcctcacctgcagatgccccccagcctgggccagatgagcctgccctttgaccagcctcacccccagggcctgctgccgtgccagcctcaggagcatgctgtgtccagccctgaccccctgctctgctcagatgtgaccatggtggaagacagctgcctgagccagccagtgacagcgtttcctcagggcacttggattggtgaagacatattccctcctctgctgcctcccactgaacaggacctcactaagcttctcctggaggggcaaggggagtcggggggagggtccttgggggcacagcccctcctgcagccctcccactatgggcaatctgggatctcaatgtcccacatggacctaagggccaaccccagttggtgatcccagctggagggagaacccaaagagacagctcttctactacccccacagacctgctctggacacttgctcatgccctgccaagcagcagatggggagggtgccctcctatccccacctactcctgggtcaggaggaaaagactaacaggagaatgcacagtgggtggagccaatccactccttcctttctatcattcccctgcccacctccttccagcactgactggaagggaagttcaggctctgagacacgccccaacatgcctgcacctgcagcgcgcacacgcacgcacacacacatacagagctctctgagggtgatggggctgagcaggaggggggctgggtaagagcacaggttagggcatggaaggcttctccgcccattctgacccagggcctaggacggataggcaggaacatacagacacatttacactagaggccagggatagaggatattgggtctcagccctaggggaatgggaagcagctcaagggaccctgggtgggagcataggaggggtctggacatgtggttactagtacaggttttgccctgattaaaaaatctcccaaagccccaaattcctgttagccaggtggaggcttctgatacgtgtatgagactatgcaaaagtacaagggctgagattcttcgtgtatagctgtgtgaacgtgtatgtacctaggatatgttaaatatatagctggcaccttagttgcatgaccacatagaacatgtgtctatctgcttttgcctacgtgacaacacaaatttgggagggtgagacactgcacagaagacagcagcaagtgtgctggcctctctgacatatgctaacccccaaatactctgaatttggagtctgactgtgcccaagtgggtccaagtggctgtgacatctacgtatggctccacacctccaatgctgcctgggagccagggtgagagtctgggtccaggcctggccatgtggccctccagtgtatgagagggccctgcctgctgcatcttttctgttgccccatccaccgccagcttcccttcactcccctatcccattctccctctcaaggcaggggtcatagatcctaagccataaaataaattttattccaaaataacaaaataaataatctactgtacacaatctgaaaagaaa

SEQ ID NO: 406743 - DNA, 2010 bp, Homo sapiens
tccacgttttctgctacctggaaccgagagtctcttctccttcaagtccgtggttctggtggagcccgactgagcactaaggatcctctgcccaccatcgccccacagagcgagcgtcggatcttgctcagctcaaaaatctctatcccaagaagcccaaggatgaggctttccggagccactacaagcctgaacagatgggtaaggatggcaggggttatgtcccagctaccatcaagatgaccgtggaaagggaccaaccacttcctaccccagagctccagatgcctaccatggtgccttcttatgaccttggaatggcccctgattcctccatgagcatgcagcttggcccagatatggtgccccaggtgtacccaccacactctcactccatccccccgtatcaaggcctctccccagaagaatcagtcaacgtgttgtcagccttccaggagcctcacctgcagatgccccccagcctgggccagatgagcctgccctttgaccagcctcacccccagggcctgctgccgtgccagcctcaggagcatgctgtgtccagccctgaccccctgctctgctcagatgtgaccatggtggaagacagctgcctgagccagccagtgacagcgtttcctcagggcacttggattggtgaagacatattccctcctctgctgcctcccactgaacaggacctcactaagcttctcctggaggggcaaggggagtcggggggagggtccttgggggcacagcccctcctgcagccctcccactatgggcaatctgggatctcaatgtcccacatggacctaagggccaaccccagttggtgatcccagctggagggagaacccaaagagacagctcttctactacccccacagacctgctctggacacttgctcatgccctgccaagcagcagatggggagggtgccctcctatccccacctactcctgggtcaggaggaaaagactaacaggagaatgcacagtgggtggagccaatccactccttcctttctatcattcccctgcccacctccttccagcactgactggaagggaagttcaggctctgagacacgccccaacatgcctgcacctgcagcgcgcacacgcacgcacacacacatacagagctctctgagggtgatggggctgagcaggaggggggctgggtaagagcacaggttagggcatggaaggcttctccgcccattctgacccagggcctaggacggataggcaggaacatacagacacatttacactagaggccagggatagaggatattgggtctcagccctaggggaatgggaagcagctcaagggaccctgggtgggagcataggaggggtctggacatgtggttactagtacaggttttgccctgattaaaaaatctcccaaagccccaaattcctgttagccaggtggaggcttctgatacgtgtatgagactatgcaaaagtacaagggctgagattcttcgtgtatagctgtgtgaacgtgtatgtacctaggatatgttaaatatatagctggcaccttagttgcatgaccacatagaacatgtgtctatctgcttttgcctacgtgacaacacaaatttgggagggtgagacactgcacagaagacagcagcaagtgtgctggcctctctgacatatgctaacccccaaatactctgaatttggagtctgactgtgcccaagtgggtccaagtggctgtgacatctacgtatggctccacacctccaatgctgcctgggagccagggtgagagtctgggtccaggcctggccatgtggccctccagtgtatgagagggccctgcctgctgcatcttttctgttgccccatccaccgccagcttcccttcactcccctatcccattctccctctcaaggcaggggtcatagatcctaagccataaaataaattttattccaaaataacaaaataaataatctactgtacacaatctgaaaagaaa

SEQ ID NO: 406744 - DNA, 1750 bp, Homo sapiens
gctggtacggtccgagtggtatggatgcctaccatggtgccttcttatgaccttggaatggcccctgattcctccatgagcatgcagcttggcccagatatggtgccccaggtgtacccaccacactctcactccatccccccgtatcaaggcctctccccagaagaatcagtcaacgtgttgtcagccttccaggagcctcacctgcagatgccccccagcctgggccagatgagcctgccctttgaccagcctcacccccagggcctgctgccgtgccagcctcaggagcatgctgtgtccagccctgaccccctgctctgctcagatgtgaccatggtggaagacagctgcctgagccagccagtgacagcgtttcctcagggcacttggattggtgaagacatattccctcctctgctgcctcccactgaacaggacctcactaagcttctcctggaggggcaaggggagtcggggggagggtccttgggggcacagcccctcctgcagccctcccactatgggcaatctgggatctcaatgtcccacatggacctaagggccaaccccagttggtgatcccagctggagggagaacccaaagagacagctcttctactacccccacagacctgctctggacacttgctcatgccctgccaagcagcagatggggagggtgccctcctatccccacctactcctgggtcaggaggaaaagactaacaggagaatgcacagtgggtggagccaatccactccttcctttctatcattcccctgcccacctccttccagcactgactggaagggaagttcaggctctgagacacgccccaacatgcctgcacctgcagcgcgcacacgcacgcacacacacatacagagctctctgagggtgatggggctgagcaggaggggggctgggtaagagcacaggttagggcatggaaggcttctccgcccattctgacccagggcctaggacggataggcaggaacatacagacacatttacactagaggccagggatagaggatattgggtctcagccctaggggaatgggaagcagctcaagggaccctgggtgggagcataggaggggtctggacatgtggttactagtacaggttttgccctgattaaaaaatctcccaaagccccaaattcctgttagccaggtggaggcttctgatacgtgtatgagactatgcaaaagtacaagggctgagattcttcgtgtatagctgtgtgaacgtgtatgtacctaggatatgttaaatatatagctggcaccttagttgcatgaccacatagaacatgtgtctatctgcttttgcctacgtgacaacacaaatttgggagggtgagacactgcacagaagacagcagcaagtgtgctggcctctctgacatatgctaacccccaaatactctgaatttggagtctgactgtgcccaagtgggtccaagtggctgtgacatctacgtatggctccacacctccaatgctgcctgggagccagggtgagagtctgggtccaggcctggccatgtggccctccagtgtatgagagggccctgcctgctgcatcttttctgttgccccatccaccgccagcttcccttcactcccctatcccattctccctctcaaggcaggggtcatagatcctaagccataaaataaattttattccaaaataacaaaataaataatctactgtacacaatctgaaaagaaa

SEQ ID NO: 406745 - DNA, 3125 bp, Homo sapiens
tccagggagggacctgggtagaaggagaagccggaaacagcgggctggggcagccactgcttacactgaagagggaggacgggagaggagtgtgtgtgtgtgtgtgtgtgtgtgtgtgtatgtatgtgtgtgctttatcttatttttctttttggtggtggtggtggaaggggggaggtgctagcagggccagccttgaactcgctggacagagctacagacctatggggcctggaagtgcccgctgagaaagggagaagacagcagaggggttgccgaggcaacctccaagtcccagatcatgtctctgtggggtctggtctccaagatgcccccagaaaaagtgcagcggctctatgtcgactttccccaacacctgcggcatcttctgggtgactggctggagagccagccctgggagttcctggtcggctccgacgccttctgctgcaacttggctagtgccctactttcagacactgtccagcaccttcaggcctcggtgggagagcagggggaggggagcaccatcttgcaacacatcagcacccttgagagcatatatcagagggaccccctgaagctggtggccactttcagacaaatacttcaaggagagaaaaaagctgttatggaacagttccgccacttgccaatgcctttccactggaagcaggaagaactcaagtttaagacaggcttgcggaggctgcagcaccgagtaggggagatccaccttctccgagaagccctgcagaagggggctgaggctggccaagtgtctctgcacagcttgatagaaactcctgctaatgggactgggccaagtgaggccctggccatgctactgcaggagaccactggagagctagaggcagccaaagccctagtgctgaagaggatccagatttggaaacggcagcagcagctggcagggaatggcgcaccgtttgaggagagcctggccccactccaggagaggtgtgaaagcctggtggacatttattcccagctacagcaggaggtaggggcggctggtggggagcttgagcccaagacccgggcatcgctgactggccggctggatgaagtcctgagaaccctcgtcaccagttgcttcctggtggagaagcagcccccccaggtactgaagactcagaccaagttccaggctggagttcgattcctgttgggcttgaggttcctgggggccccagccaagcctccgctggtcagggccgacatggtgacagagaagcaggcgcgggagctgagtgtgcctcagggtcctggggctggagcagaaagcactggagaaatcatcaacaacactgtgcccttggagaacagcattcctgggaactgctgctctgccctgttcaagaacctgcttctcaagaagatcaagcggtgtgagcggaagggcactgagtctgtcacagaggagaagtgcgctgtgctcttctctgccagcttcacacttggccccggcaaactccccatccagctccaggccctgtctctgcccctggtggtcatcgtccatggcaaccaagacaacaatgccaaagccactatcctgtgggacaatgccttctctgagatggaccgcgtgccctttgtggtggctgagcgggtgccctgggagaagatgtgtgaaactctgaacctgaagttcatggctgaggtggggaccaaccgggggctgctcccagagcacttcctcttcctggcccagaagatcttcaatgacaacagcctcagtatggaggccttccagcaccgttctgtgtcctggtcgcagttcaacaaggagatcctgctgggccgtggcttcaccttttggcagtggtttgatggtgtcctggacctcaccaaacgctgtctccggagctactggtctgaccggctgatcattggcttcatcagcaaacagtacgttactagccttcttctcaatgagcccgacggaacctttctcctccgcttcagcgactcagagattgggggcatcaccattgcccatgtcatccggggccaggatggctctccacagatagagaacatccagccattctctgccaaagacctgtccattcgctcactgggggaccgaatccgggatcttgctcagctcaaaaatctctatcccaagaagcccaaggatgaggctttccggagccactacaagcctgaacagatgggtaaggatggcaggggttatgtcccagctaccatcaagatgaccgtggaaagggaccaaccacttcctaccccagagctccagatgcctaccatggtgccttcttatgaccttggaatggcccctgattcctccatgagcatgcagcttggcccagatatggtgccccaggtgtacccaccacactctcactccatccccccagggatagaggatattgggtctcagccctaggggaatgggaagcagctcaagggaccctgggtgggagcataggaggggtctggacatgtggttactagtacaggttttgccctgattaaaaaatctcccaaagccccaaattcctgttagccaggtggaggcttctgatacgtgtatgagactatgcaaaagtacaagggctgagattcttcgtgtatagctgtgtgaacgtgtatgtacctaggatatgttaaatatatagctggcaccttagttgcatgaccacatagaacatgtgtctatctgcttttgcctacgtgacaacacaaatttgggagggtgagacactgcacagaagacagcagcaagtgtgctggcctctctgacatatgctaacccccaaatactctgaatttggagtctgactgtgcccaagtgggtccaagtggctgtgacatctacgtatggctccacacctccaatgctgcctgggagccagggtgagagtctgggtccaggcctggccatgtggccctccagtgtatgagagggccctgcctgctgcatcttttctgttgccccatccaccgccagcttcccttcactcccctatcccattctccctctcaaggcaggggtcatagatcctaagccataaaataaattttattccaaaataacaaaataaataatctactgtacacaatctgaaaagaaa

SEQ ID NO: 406746 - DNA, 2583 bp, Homo sapiens
tccagggagggacctgggtagaaggagaagccggaaacagcgggctggggcagccactgcttacactgaagagggaggacgggagaggagtgtgtgtgtgtgtgtgtgtgtgtgtgtgtatgtatgtgtgtgctttatcttatttttctttttggtggtggtggtggaaggggggaggtgctagcagggccagccttgaactcgctggacagagctacagacctatggggcctggaagtgcccgctgagaaagggagaagacagcagaggggttgccgaggcaacctccaagtcccagatcatgtctctgtggggtctggtctccaagatgcccccagaaaaagtgcagcggctctatgtcgactttccccaacacctgcggcatcttctgggtgactggctggagagccagccctgggagttcctggtcggctccgacgccttctgctgcaacttggctagtgccctactttcagacactgtccagcaccttcaggcctcggtgggagagcagggggaggggagcaccatcttgcaacacatcagcacccttgagagcatatatcagagggaccccctgaagctggtggccactttcagacaaatacttcaaggagagaaaaaagctgttatggaacagttccgccacttgccaatgcctttccactggaagcaggaagaactcaagtttaagacaggcttgcggaggctgcagcaccgagtaggggagatccaccttctccgagaagccctgcagaagggggctgaggctggccaagtgtctctgcacagcttgatagaaactcctgctaatgggactgggccaagtgaggccctggccatgctactgcaggagaccactggagagctagaggcagccaaagccctagtgctgaagaggatccagatttggaaacggcagcagcagctggcagggaatggcgcaccgtttgaggagagcctggccccactccaggagaggtgtgaaagcctggtggacatttattcccagctacagcaggaggtaggggcggctggtggggagcttgagcccaagacccgggcatcgctgactggccggctggatgaagtcctgagaaccctcgtcaccagttgcttcctggtggagaagcagcccccccaggtactgaagactcagaccaagttccaggctggagttcgattcctgttgggcttgaggttcctgggggccccagccaagcctccgctggtcagggccgacatggtgacagagaagcaggcgcgggagctgagtgtgcctcagggtcctggggctggagcagaaagcactggagaaatcatcaacaacactgtgcccttggagaacagcattcctgggaactgctgctctgccctgttcaagaacctgcttctcaagaagatcaagcggtgtgagcggaagggcactgagtctgtcacagaggagaagtgcgctgtgctcttctctgccagcttcacacttggccccggcaaactccccatccagctccaggccctgtctctgcccctggtggtcatcgtccatggcaaccaagacaacaatgccaaagccactatcctgtgggacaatgccttctctgagatggaccgcgtgccctttgtggtggctgagcgggtgccctgggagaagatgtgtgaaactctgaacctgaagttcatggctgaggtggggaccaaccgggggctgctcccagagcacttcctcttcctggcccagaagatcttcaatgacaacagcctcagtatggaggccttccagcaccgttctgtgtcctggtcgcagttcaacaaggagatcctgctgggccgtggcttcaccttttggcagtggtttgatggtgtcctggacctcaccaaacgctgtctccggagctactggtctgaccggctgatcattggcttcatcagcaaacagtacgttactagccttcttctcaatgagcccgacggaacctttctcctccgcttcagcgactcagagattgggggcatcaccattgcccatgtcatccggggccaggatggctctccacagatagagaacatccagccattctctgccaaagacctgtccattcgctcactgggggaccgaatccgggatcttgctcagctcaaaaatctctatcccaagaagcccaaggatgaggctttccggagccactacaagcctgaacagatgggtaaggatggcaggggttatgtcccagctaccatcaagatgaccgtggaaagggaccaaccacttcctaccccagagctccagatgcctaccatggtgccttcttatgaccttggaatggcccctgattcctccatgagcatgcagcttggcccagatatggtgccccaggtgtacccaccacactctcactccatccccccgtatcaaggcctctccccagaagaatcagtcaacgtgttgtcagccttccaggagcttctgatacgtgtatgagactatgcaaaagtacaagggctgagattcttcgtgtatagctgtgtgaacgtgtatgtacctaggatatgttaaatatatagctggcaccttagttgcatgac

SEQ ID NO: 406747 - DNA, 2690 bp, Homo sapiens
tccagggagggacctgggtagaaggagaagccggaaacagcgggctggggcagccactgcttacactgaagagggaggacgggagaggagtgtgtgtgtgtgtgtgtgtgtgtgtgtgtatgtatgtgtgtgctttatcttatttttctttttggtggtggtggtggaaggggggaggtgctagcagggccagccttgaactcgctggacagagctacagacctatggggcctggaagtgcccgctgagaaagggagaagacagcagaggggttgccgaggcaacctccaagtcccagatcatgtctctgtggggtctggtctccaagatgcccccagaaaaagtgcagcggctctatgtcgactttccccaacacctgcggcatcttctgggtgactggctggagagccagccctgggagttcctggtcggctccgacgccttctgctgcaacttggctagtgccctactttcagacactgtccagcaccttcaggcctcggtgggagagcagggggaggggagcaccatcttgcaacacatcagcacccttgagagcatatatcagagggaccccctgaagctggtggccactttcagacaaatacttcaaggagagaaaaaagctgttatggaacagttccgccacttgccaatgcctttccactggaagcaggaagaactcaagtttaagacaggcttgcggaggctgcagcaccgagtaggggagatccaccttctccgagaagccctgcagaagggggctgaggctggccaagtgtctctgcacagcttgatagaaactcctgctaatgggactgggccaagtgaggccctggccatgctactgcaggagaccactggagagctagaggcagccaaagccctagtgctgaagaggatccagatttggaaacggcagcagcagctggcagggaatggcgcaccgtttgaggagagcctggccccactccaggagaggtgtgaaagcctggtggacatttattcccagctacagcaggaggtaggggcggctggtggggagcttgagcccaagacccgggcatcgctgactggccggctggatgaagtcctgagaaccctcgtcaccagttgcttcctggtggagaagcagcccccccaggtactgaagactcagaccaagttccaggctggagttcgattcctgttgggcttgaggttcctgggggccccagccaagcctccgctggtcagggccgacatggtgacagagaagcaggcgcgggagctgagtgtgcctcagggtcctggggctggagcagaaagcactggagaaatcatcaacaacactgtgcccttggagaacagcattcctgggaactgctgctctgccctgttcaagaacctgcttctcaagaagatcaagcggtgtgagcggaagggcactgagtctgtcacagaggagaagtgcgctgtgctcttctctgccagcttcacacttggccccggcaaactccccatccagctccaggccctgtctctgcccctggtggtcatcgtccatggcaaccaagacaacaatgccaaagccactatcctgtgggacaatgccttctctgagatggaccgcgtgccctttgtggtggctgagcgggtgccctgggagaagatgtgtgaaactctgaacctgaagttcatggctgaggtggggaccaaccgggggctgctcccagagcacttcctcttcctggcccagaagatcttcaatgacaacagcctcagtatggaggccttccagcaccgttctgtgtcctggtcgcagttcaacaaggagatcctgctgggccgtggcttcaccttttggcagtggtttgatggtgtcctggacctcaccaaacgctgtctccggagctactggtctgaccggctgatcattggcttcatcagcaaacagtacgttactagccttcttctcaatgagcccgacggaacctttctcctccgcttcagcgactcagagattgggggcatcaccattgcccatgtcatccggggccaggatggctctccacagatagagaacatccagccattctctgccaaagacctgtccattcgctcactgggggaccgaatccgggatcttgctcagctcaaaaatctctatcccaagaagcccaaggatgaggctttccggagccactacaagcctgaacagatgggtaaggatggcaggggttatgtcccagctaccatcaagatgaccgtggaaagggaccaaccacttcctaccccagagctccagatgcctaccatggtgccttcttatgaccttggaatggcccctgattcctccatgagcatgcagcttggcccagatatggtgccccaggtgtacccaccacactctcactccatccccccagggatagaggatattgggtctcagccctaggggaatgggaagcagctcaagggaccctgggtgggagcataggaggggtctggacatgtggttactagtacaggttttgccctgattaaaaaatctcccaaagccccaaattcctgttagccaggtggaggcttctgatacgtgtatgagactatgcaaaagtacaagggctgagattcttcgtgtatagctgtgtgaacgtgtatgtacctaggatatgttaaatatatagctggcaccttagttgcatgac

SEQ ID NO: 406748 - DNA, 1214 bp, Homo sapiens
tccagggagggacctgggtagaaggagaagccggaaacagcgggctggggcagccactgcttacactgaagagggaggacgggagaggagtgtgtgtgtgtgtgtgtgtgtgtgtgtgtatgtatgtgtgtgctttatcttatttttctttttggtggtggtggtggaaggggggaggtgctagcagggccagccttgaactcgctggacagagctacagacctatggggcctggaagtgcccgctgagaaagggagaagacagcagaggggttgccgaggcaacctccaagtcccagatcatgtctctgtggggtctggtctccaagatgcccccagaaaaagtgcagcggctctatgtcgactttccccaacacctgcggcatcttctgggtgactggctggagagccagccctgggagttcctggtcggctccgacgccttctgctgcaacttggctagtgccctactttcagacactgtccagcaccttcaggcctcggtgggagagcagggggaggggagcaccatcttgcaacacatcagcacccttgagagcatatatcagagggaccccctgaagctggtggccactttcagacaaatacttcaaggagagaaaaaagctgttatggaacagttccgccacttgccaatgcctttccactggaagcaggaagaactcaagtttaagacaggcttgcggaggctgcagcaccgagtaggggagatccaccttctccgagaagccctgcagaagggggctgaggctggccaagtgtctctgcacagcttgatagaaactcctgctaatgggactgggccaagtgaggccctggccatgctactgcaggagaccactggagagctagaggcagccaaagccctagtgctgaagaggatccagatttggaaacggcagcagcagctggcagggaatggcgcaccgtttgaggagagcctggccccactccaggagaggtgtgaaagcctggtggacatttattcccagctacagcaggaggtaggggcggctggtggggagcttgagcccaagacccgggcatcgctgactggccggctggatgaagtcctgagaaccctcgtcaccagttgcttcctggtggagaagcagcccccccaggtactgaagactcagaccaagttccaggctggagttcgattccttaccgtctaagggatcgtctagagcg

SEQ ID NO: 406749 - DNA, 2085 bp, Homo sapiens
gcccccgggccccagcctcggggacccccgccccttcccctagttcccgccccgctcccgggatcggccgcgcgggcgcctctaggaccccgcgtcccgcccgctctcctcccctcccgagccgcgaacttttccggaggcggcggcctcggctgccgctgggtcccggggtcgcgggccctgattgcgccgtttccccgcgcagagctcgccggcgccccgacgggccccggagcagcggcccccggccggcccggcctcagcctggagctccagctacccacatgcaccttacctgggttccgcccggtccctgagtccccacaaaatggctgatggaggaagccccttcctaggtcggagggactttgtctacccttcctcaacccgagaccctagtgcctctaacggagggggcagcccagccaggagggaagagaagaagagaaaggccgccaggctcaagtttgacttccaggcgcagtcccccaaggagctgactctgcagaagggtgacattgtctacatccacaaggaggtggacaagaactggctggagggagagcaccacggccgcctgggcatcttccctgctaattatgtggaggtgctgcccgcagatgagatccctaagcccatcaagcccccgacctaccaggtgctggagtatggagaggctgtggcccagtacaccttcaagggggacctggaggtggagctgtccttccgcaagggagagcacatctgcctgatccgcaaggtgaacgagaactggtacgagggacgcatcacgggcacggggcgccaaggcatattccctgccagctacgtgcaggtgtctcgtgaaccccggctccggctctgtgacgacggcccccagctccccacgtctccccgcctgaccgctgccgcccgctcagcccgtcaccccagctccccctcagccctgcgcagcccagctgaccccaccgacttggggggacagacctccccccgtcgcactggcttctccttccccacccaggagcctagaccccagacccagaatcttggcacccctggtccagctctgtcccactctcgaggtcccagccatcccctggacctggggacctcctctcctaacacctctcagatacactggaccccgtaccgggcgatgtaccagtacaggccccagaacgaagacgagctggagctgcgcgagggggacagggtggatgtcatgcagcagtgtgacgatggctggtttgtgggtgtctcccggaggacccagaaattcggaacgttccctggaaattacgttgccccggtgtgagtggtctccatggcaacttggagccagccaggatggggtggggagcggtggcactcgtgggagggagaggacccccgcccacatcctccttccccaggacctgagctcccagcatctgcagacgacccccgcagcctttccctcggacccccctcgaagccccctggactgattcccacccacgactcacaggcattcctcccacagccctttcatttcctccccaccccactccccaaatacagaggtctgctttgaagcggagaccatttccaggccttattgagaccagaccccaagtcccccacccccatcctgctccagcgtttcctctaacagggaccagctctccgctttgcccccacggggttcctctaaccagaaccagcttcctagcctcgtagagaccaaaggccgcccccgcctgctggggttcctcccagcaccccagcttgctggctgccctctttgccttctggcctccagctgggtgtgggggggcggagcaaggcgggggacagacgcagcaccttcttagcgatctaggcctggcaagagctctggccccaaggcctcctcttcccaggggctgccaagtcctggccctggccctggcatatcaccccgcactgtggggccaggcaccactagcctggctcaaatattccccagggagactgctgtgtgctgcccgcctgcctgctggctctcccccagccccacatcccctctggaagagaatgtaaaataaacctggacacaaggga

SEQ ID NO: 406750 - DNA, 417 bp, Homo sapiens
ccttgcccaggcagaaaagatggcagagggagggtgaacccagggcccatctgtgggtatgggctccaatttcctaaattgtttgtggttataaccatggcttccaccttgtctggcaccgggtccacatcttttctgagacctgctagaagacctgacagccacttgtttgtttcatctttcctgagaactaagagaggttcacccagctcagttcttctcaaagacaccccgtctgtgcattgtgcttgtttgctcatccatgaaaagaggaagagagaacagccgtggatgtgatgtcagtatcaaaacttccttgaggacaggcgggataaattgggcaaacggctgagttctcccgcagcctttgggagattggccctgagaacccagaatagatgcccattatacatcatg

SEQ ID NO: 406751 - DNA, 2541 bp, Homo sapiens
  misc_feature (2541)..(2541): n is a, c, g, or t
gcccccgggccccagcctcggggacccccgccccttcccctagttcccgccccgctcccgggatcggccgcgcgggcgcctctaggaccccgcgtcccgcccgctctcctcccctcccgagccgcgaacttttccggaggcggcggcctcggctgccgctgggtcccggggtcgcgggccctgattgcgccgtttccccgcgcagagctcgccggcgccccgacgggccccggagcagcggcccccggccggcccggcctcagcctggagctccagctacccacatgcaccttacctgggttccgcccggtccctgagtccccacaaaatggctgatggaggaagccccttcctaggtcggagggactttgtctacccttcctcaacccgagaccctagtgcctctaacggagggggcagcccagccaggagggaagagaagaagagaaaggccgccaggctcaagtttgacttccaggcgcagtcccccaaggagctgactctgcagaagggtgacattgtctacatccacaaggaggtggacaagaactggctggagggagagcaccacggccgcctgggcatcttccctgctaattatgtggaggtgctgcccgcagatgagatccctaagcccatcaagcccccgacctaccaggtgctggagtatggagaggctgtggcccagtacaccttcaagggggacctggaggtggagctgtccttccgcaagggagagcacatctgcctgatccgcaaggtgaacgagaactggtacgagggacgcatcacgggcacggggcgccaaggcatattccctgccagctacgtgcaggtgtctcgtgaaccccggctccggctctgtgacgacggcccccagctccccacgtctccccgcctgaccgctgccgcccgctcagcccgtcaccccagctccccctcagccctgcgcagcccagctgaccccaccgacttggggggacagacctccccccgtcgcactggcttctccttccccacccaggagcctagaccccagacccagaatcttggcacccctggtccagctctgtcccactctcgaggtcccagccatcccctggacctggggacctcctctcctaacacctctcagatacactggaccccgtaccgggcgatgtaccagtacaggccccagaacgaagacgagctggagctgcgcgagggggacagggtggatgtcatgcagcagtgtgacgatggctggtttgtgggtgtctcccggaggacccagaaattcggaacgttccctggaaattacgttgccccggtgtgagtggtctccatggcaacttggagccagccaggatggggtggggagcggtggcactcgtgggagggagaggacccccgcccacatcctccttccccaggacctgagctcccagcatctgcagacgacccccgcagcctttccctcggacccccctcgaagccccctggactgattcccacccacgactcacaggcattcctcccacagccctttcatttcctccccaccccactccccaaatacagaggtctgctttgaagcggagaccatttccaggccttattgagaccagaccccaagtcccccacccccatcctgctccagcgtttcctctaacagggaccagctctccgctttgcccccacggggttcctctaaccagaaccagcttcctagcctcgtagagaccaaaggccgcccccgcctgctggggttcctcccagcaccccagcttgctggctgccctctttgccttctggcctccagctgggtgtgggggggcggagcaaggcgggggacagacgcagcaccttcttagcgatctaggcctggcaagagctctggccccaaggcctcctcttcccaggggctgccaagtcctggccctggccctggcatatcaccccgcactgtggggccaggcaccactagcctggctcaaatattccccagggagactgctgtgtgctgcccgcctgcctgctggctctcccccagccccacatcccctctggaagagaatgtaaaataaacctggacacaagggaaaaaaaaaaaaaaaaaaaaaaaaaaaaaaaaaaaaaaaaaaaaaaacaaacaaacaacaacagggggggggcgcagcataaaaaagatacgccggggggggccaacaaatatgagcgcagtcaacccagcattttgtcgtgtagcacaggggggtgccaaagtaagagcctgcgagttattatatagagcagcaaggcgacgggcgccggtgttttaaacaaagcgttgtgtgaggtggggaaaaaatggtcgtgacggtggagcaatttttgggaaagagaacacatattgttgggggggggaaacaatatggggggcaaccacacacagagagagatttaagcctgagaggaaatataacatttgaggtgttatgtgagaaaccaggtcaattattggcggatgaaaatttgctcacgattgtgtttgaaacatatacgaggttatataaaggn

SEQ ID NO: 406752 - DNA, 3464 bp, Homo sapiens
ccttgcccaggcagaaaagatggcagagggagggtgaacccagggcccatctgtgggtatgggctccaatttcctaaattgtttgtggttataaccatggcttccaccttgtctggcaccgggtccacatcttttctgagacctgctagaaggtcagagccctagagaataagagaagcttgctgctggtgagggggtatggccaggattcctggagtcggaagagcttcagcttcaccatcttgggagaagaaggaagaaagtgaaagcgatgtggtccttcttagtcccaaggaccctgacagaggacacgcagaggagcagctggcttgcccggagtcctcccaccttgacccaagcatgcagggcccaccccgcagcctccgcgctgggctcagcctggacgacttcatccctggccacctccagtcccacatagggtcttcctcccgggggacacgggtgcccgtgatccggaatggtggctccaacacccttaatttccagttccacgaccccgcgcccaggactgtgtgcaatgggggctacacaccaagacgagatgcttcccagcacccggaccctgcgtggtatcagacctggccaggccctgggagcaagccctctgcaagcacaaagatccctgcctcccagcacacccagaactggtcagccacgtggaccaaggacagcaagcgtcgggacaagcgctgggtcaagtacgagggaatcgggcccgtggacgagagcggcatgcccattgccccccgatccagcgttgacagacccagagactggtaccggagaatgttccagcagattcaccggaaaatgccagacttgcagctggactggaccttcgaggagccacccagagaccccaggcatctaggagcccagcaaagacctgcccacaggcccggcccggcaacatcttccagtggaagaagctgggaccactctgaagagttacctagaagcaccttcaactacagacctggagcattctccactgtgctgcagccctcaaatcaggtgctcagacgccgggaaaaagtagacaatgtctggacggaagagtcctggaaccagtttctgcaggaactagagactgggcagaggcccaagaaaccgctggtggacgaccctggtgagaagccctcccagcccattgaggtgctgctggagagagagctggccgagctgagcgccgagctggacaaggacctgcgggcaattgagacccgactgccgtcccccaagagctcgccggcgccccgacgggccccggagcagcggcccccggccgggtgagtgggagacgcgggaggaggaagggggctgtcccaggccgggcgggagggaacgtggcgcggccgggcggggcggacgggggcgatcgcggggcccagccgggggaggaaggaaccgcagagccgtgtccgggagggaccgcagcgccactctctgcggggcgccgttcccgcgccaccgagggcagctaactcctagcagaggaccggggtcgcggccgccgggggcgcagcgcggttagggcggccccgccacggcccaggcactcccgctgggccctgccgggcctcacccttccccgcgcagcgactcgggaacccggcctcagcctggagctccagctacccacatgcaccttacctgggttccgcccggtccctgagtccccacaaaatggctgatggaggaagccccttcctaggtcggagggactttgtctacccttcctcaacccgagaccctagtgcctctaacggagggggcagcccagccaggagggaagagaagaagagaaaggccgccaggctcaagtttgacttccaggcgcagtcccccaaggagctgactctgcagaagggtgacattgtctacatccacaaggaggtggacaagaactggctggagggagagcaccacggccgcctgggcatcttccctgctaattatgtggaggtgctgcccgcagatgagatccctaagcccatcaagcccccgacctaccaggtgctggagtatggagaggctgtggcccagtacaccttcaagggggacctggaggtggagctgtccttccgcaagggagagcacatctgcctgatccgcaaggtgaacgagaactggtacgagggacgcatcacgggcacggggcgccaaggcatattccctgccagctacgtgcaggtgtctcgtgaaccccggctccggctctgtgacgacggcccccagctccccacgtctccccgcctgaccgctgccgcccgctcagcccgtcaccccagctccccctcagccctgcgcagcccagctgaccccaccgacttggggggacagacctccccccgtcgcactggcttctccttccccacccaggagcctagaccccagacccagaatcttggcacccctggtccagctctgtcccactctcgaggtcccagccatcccctggacctggggacctcctctcctaacacctctcagatacactggaccccgtaccgggcgatgtaccagtacaggccccagaacgaagacgagctggagctgcgcgagggggacagggtggatgtcatgcagcagtgtgacgatggctggtttgtgggtgtctcccggaggacccagaaattcggaacgttccctggaaattacgttgccccggtgtgagtggtctccatggcaacttggagccagccaggatggggtggggagcggtggcactcgtgggagggagaggacccccgcccacatcctccttccccaggacctgagctcccagcatctgcagacgacccccgcagcctttccctcggacccccctcgaagccccctggactgattcccacccacgactcacaggcattcctcccacagccctttcatttcctccccaccccactccccaaatacagaggtctgctttgaagcggagaccatttccaggccttattgagaccagaccccaagtcccccacccccatcctgctccagcgtttcctctaacagggaccagctctccgctttgcccccacggggttcctctaaccagaaccagcttcctagcctcgtagagaccaaaggccgcccccgcctgctggggttcctcccagcaccccagcttgctggctgccctctttgccttctggcctccagctgggtgtgggggggcggagcaaggcgggggacagacgcagcaccttcttagcgatctaggcctggcaagagctctggccccaaggcctcctcttcccaggggctgccaagtcctggccctggccctggcatatcaccccgcactgtggggccaggcaccactagcctggctcaaatattccccagggagactgctgtgtgctgcccgcctgcctgctggctctcccccagccccacatcccctctggaagagaatgtaaaataaacctggacacaaggga

SEQ ID NO: 406753 - DNA, 3096 bp, Homo sapiens
ccttgcccaggcagaaaagatggcagagggagggtgaacccagggcccatctgtgggtatgggctccaatttcctaaattgtttgtggttataaccatggcttccaccttgtctggcaccgggtccacatcttttctgagacctgctagaaggtcagagccctagagaataagagaagcttgctgctggtgagggggtatggccaggattcctggagtcggaagagcttcagcttcaccatcttgggagaagaaggaagaaagtgaaagcgatgtggtccttcttagtcccaaggaccctgacagaggacacgcagaggagcagctggcttgcccggagtcctcccaccttgacccaagcatgcagggcccaccccgcagcctccgcgctgggctcagcctggacgacttcatccctggccacctccagtcccacatagggtcttcctcccgggggacacgggtgcccgtgatccggaatggtggctccaacacccttaatttccagttccacgaccccgcgcccaggactgtgtgcaatgggggctacacaccaagacgagatgcttcccagcacccggaccctgcgtggtatcagacctggccaggccctgggagcaagccctctgcaagcacaaagatccctgcctcccagcacacccagaactggtcagccacgtggaccaaggacagcaagcgtcgggacaagcgctgggtcaagtacgagggaatcgggcccgtggacgagagcggcatgcccattgccccccgatccagcgttgacagacccagagactggtaccggagaatgttccagcagattcaccggaaaatgccagacttgcagctggactggaccttcgaggagccacccagagaccccaggcatctaggagcccagcaaagacctgcccacaggcccggcccggcaacatcttccagtggaagaagctgggaccactctgaagagttacctagaagcaccttcaactacagacctggagcattctccactgtgctgcagccctcaaatcaggtgctcagacgccgggaaaaagtagacaatgtctggacggaagagtcctggaaccagtttctgcaggaactagagactgggcagaggcccaagaaaccgctggtggacgaccctggtgagaagccctcccagcccattgaggtgctgctggagagagagctggccgagctgagcgccgagctggacaaggacctgcgggcaattgagacccgactgccgtcccccaagcccggcctcagcctggagctccagctacccacatgcaccttacctgggttccgcccggtccctgagtccccacaaaatggctgatggaggaagccccttcctaggtcggagggactttgtctacccttcctcaacccgagaccctagtgcctctaacggagggggcagcccagccaggagggaagagaagaagagaaaggccgccaggctcaagtttgacttccaggcgcagtcccccaaggagctgactctgcagaagggtgacattgtctacatccacaaggaggtggacaagaactggctggagggagagcaccacggccgcctgggcatcttccctgctaattatgtggaggtgctgcccgcagatgagatccctaagcccatcaagcccccgacctaccaggtgctggagtatggagaggctgtggcccagtacaccttcaagggggacctggaggtggagctgtccttccgcaagggagagcacatctgcctgatccgcaaggtgaacgagaactggtacgagggacgcatcacgggcacggggcgccaaggcatattccctgccagctacgtgcaggtgtctcgtgaaccccggctccggctctgtgacgacggcccccagctccccacgtctccccgcctgaccgctgccgcccgctcagcccgtcaccccagctccccctcagccctgcgcagcccagctgaccccaccgacttggggggacagacctccccccgtcgcactggcttctccttccccacccaggagcctagaccccagacccagaatcttggcacccctggtccagctctgtcccactctcgaggtcccagccatcccctggacctggggacctcctctcctaacacctctcagatacactggaccccgtaccgggcgatgtaccagtacaggccccagaacgaagacgagctggagctgcgcgagggggacagggtggatgtcatgcagcagtgtgacgatggctggtttgtgggtgtctcccggaggacccagaaattcggaacgttccctggaaattacgttgccccggtgtgagtggtctccatggcaacttggagccagccaggatggggtggggagcggtggcactcgtgggagggagaggacccccgcccacatcctccttccccaggacctgagctcccagcatctgcagacgacccccgcagcctttccctcggacccccctcgaagccccctggactgattcccacccacgactcacaggcattcctcccacagccctttcatttcctccccaccccactccccaaatacagaggtctgctttgaagcggagaccatttccaggccttattgagaccagaccccaagtcccccacccccatcctgctccagcgtttcctctaacagggaccagctctccgctttgcccccacggggttcctctaaccagaaccagcttcctagcctcgtagagaccaaaggccgcccccgcctgctggggttcctcccagcaccccagcttgctggctgccctctttgccttctggcctccagctgggtgtgggggggcggagcaaggcgggggacagacgcagcaccttcttagcgatctaggcctggcaagagctctggccccaaggcctcctcttcccaggggctgccaagtcctggccctggccctggcatatcaccccgcactgtggggccaggcaccactagcctggctcaaatattccccagggagactgctgtgtgctgcccgcctgcctgctggctctcccccagccccacatcccctctggaagagaatgtaaaataaacctggacacaaggga

SEQ ID NO: 406754 - DNA, 3570 bp, Homo sapiens
ccttgcccaggcagaaaagatggcagagggagggtgaacccagggcccatctgtgggtatgggctccaatttcctaaattgtttgtggttataaccatggcttccaccttgtctggcaccgggtccacatcttttctgagacctgctagaaggtcagagccctagagaataagagaagcttgctgctggtgagggggtatggccaggattcctggagtcggaagagcttcagcttcaccatcttgggagaagaaggaagaaagtgaaagcgatgtggtccttcttagtcccaaggaccctgacagaggacacgcagaggagcagctggcttgcccggagtcctcccaccttgacccaagcatgcagggcccaccccgcagcctccgcgctgggctcagcctggacgacttcatccctggccacctccagtcccacatagggtcttcctcccgggggacacggttccacgaccccgcgcccaggactgtgtgcaatgggggctacacaccaagacgagatgcttcccagcacccggaccctgcgtggtatcagacctggccaggccctgggagcaagccctctgcaagcacaaagatccctgcctcccagcacacccagaactggtcagccacgtggaccaaggacagcaagcgtcgggacaagcgctgggtcaagtacgagggaatcgggcccgtggacgagagcggcatgcccattgccccccgatccagcgttgacagacccagagactggtaccggagaatgttccagcagattcaccggaaaatgccagacttgcagctggactggaccttcgaggagccacccagagaccccaggcatctaggagcccagcaaagacctgcccacaggcccggcccggcaacatcttccagtggaagaagctgggaccactctgaagagttacctagaagcaccttcaactacagacctggagcattctccactgtgctgcagccctcaaatcaggtgctcagacgccgggaaaaagtagacaatgtctggacggaagagtcctggaaccagtttctgcaggaactagagactgggcagaggcccaagaaaccgctggtggacgaccctggtgagaagccctcccagcccattgaggtgctgctggagagagagctggccgagctgagcgccgagctggacaaggacctgcgggcaattgagacccgactgccgtcccccaagagctcgccggcgccccgacgggccccggagcagcggcccccggccgggtgagtgggagacgcgggaggaggaagggggctgtcccaggccgggcgggagggaacgtggcgcggccgggcggggcggacgggggcgatcgcggggcccagccgggggaggaaggaaccgcagagccgtgtccgggagggaccgcagcgccactctctgcggggcgccgttcccgcgccaccgagggcagctaactcctagcagaggaccggggtcgcggccgccgggggcgcagcgcggttagggcggccccgccacggcccaggcactcccgctgggccctgccgggcctcacccttccccgcgcagcgactcgggaagtaggacatcctgtggagagcccaggacccgggagacgccctgggaggaggtggcagggatgggggcgatggggggtcagagcggtctaggggtgaccagggtggggtgcggagccccaggctggaggctcagtctctgtgccccgtgcagcccggcctcagcctggagctccagctacccacatgcaccttacctgggttccgcccggtccctgagtccccacaaaatggctgatggaggaagccccttcctaggtcggagggactttgtctacccttcctcaacccgagaccctagtgcctctaacggagggggcagcccagccaggagggaagagaagaagagaaaggccgccaggctcaagtttgacttccaggcgcagtcccccaaggagctgactctgcagaagggtgacattgtctacatccacaaggaggtggacaagaactggctggagggagagcaccacggccgcctgggcatcttccctgctaattatgtggaggtgctgcccgcagatgagatccctaagcccatcaagcccccgacctaccaggtgctggagtatggagaggctgtggcccagtacaccttcaagggggacctggaggtggagctgtccttccgcaagggagagcacatctgcctgatccgcaaggtgaacgagaactggtacgagggacgcatcacgggcacggggcgccaaggcatattccctgccagctacgtgcaggtgtctcgtgaaccccggctccggctctgtgacgacggcccccagctccccacgtctccccgcctgaccgctgccgcccgctcagcccgtcaccccagctccccctcagccctgcgcagcccagctgaccccaccgacttggggggacagacctccccccgtcgcactggcttctccttccccacccaggagcctagaccccagacccagaatcttggcacccctggtccagctctgtcccactctcgaggtcccagccatcccctggacctggggacctcctctcctaacacctctcagatacactggaccccgtaccgggcgatgtaccagtacaggccccagaacgaagacgagctggagctgcgcgagggggacagggtggatgtcatgcagcagtgtgacgatggctggtttgtgggtgtctcccggaggacccagaaattcggaacgttccctggaaattacgttgccccggtgtgagtggtctccatggcaacttggagccagccaggatggggtggggagcggtggcactcgtgggagggagaggacccccgcccacatcctccttccccaggacctgagctcccagcatctgcagacgacccccgcagcctttccctcggacccccctcgaagccccctggactgattcccacccacgactcacaggcattcctcccacagccctttcatttcctccccaccccactccccaaatacagaggtctgctttgaagcggagaccatttccaggccttattgagaccagaccccaagtcccccacccccatcctgctccagcgtttcctctaacagggaccagctctccgctttgcccccacggggttcctctaaccagaaccagcttcctagcctcgtagagaccaaaggccgcccccgcctgctggggttcctcccagcaccccagcttgctggctgccctctttgccttctggcctccagctgggtgtgggggggcggagcaaggcgggggacagacgcagcaccttcttagcgatctaggcctggcaagagctctggccccaaggcctcctcttcccaggggctgccaagtcctggccctggccctggcatatcaccccgcactgtggggccaggcaccactagcctggctcaaatattccccagggagactgctgtgtgctgcccgcctgcctgctggctctcccccagccccacatcccctctggaagagaatgtaaaataaacctggacacaaggga

SEQ ID NO: 406755 - DNA, 3572 bp, Homo sapiens
ccttgcccaggcagaaaagatggcagagggagggtgaacccagggcccatctgtgggtatgggctccaatttcctaaattgtttgtggttataaccatggcttccaccttgtctggcaccgggtccacatcttttctgagacctgctagaaggtcagagccctagagaataagagaagcttgctgctggtgagggggtatggccaggattcctggagtcggaagagcttcagcttcaccatcttgggagaagaaggaagaaagtgaaagcgatgtggtccttcttagtcccaaggaccctgacagaggacacgcagaggagcagctggcttgcccggagtcctcccaccttgacccaagcatgcagggcccaccccgcagcctccgcgctgggctcagcctggacgacttcatccctggccacctccagtcccacatagggtcttcctcccgggggacacgggtgcccgtgatccggaatggtggctccaacacccttaatttccagttccacgaccccgcgcccaggactgtgtgcaatgggggctacacaccaagacgagatgcttcccagcacccggaccctgcgtggtatcagacctggccaggccctgggagcaagccctctgcaagcacaaagatccctgcctcccagcacacccagaactggtcagccacgtggaccaaggacagcaagcgtcgggacaagcgctgggtcaagtacgagggaatcgggcccgtggacgagagcggcatgcccattgccccccgatccagcgttgacagacccagagactggtaccggagaatgttccagcagattcaccggaaaatgccagacttgcagctggactggaccttcgaggagccacccagagaccccaggcatctaggagcccagcaaagacctgcccacaggcccggcccggcaacatcttccagtggaagaagctgggaccactctgaagagttacctagaagcaccttcaactacagacctggagcattctccactgtgctgcagccctcaaatcaggtgctcagacgccgggaaaaagtagacaatgtctggacggaagagtcctggaaccagtttctgcaggaactagagactgggcagaggcccaagaaaccgctggtggacgaccctggtgagaagccctcccagcccattgaggtgctgctggagagagagctggccgagctgagcgccgagctggacaaggacctgcgggcaattgagacccgactgccgtcccccaagagctcgccggcgccccgacgggccccggagcagcggcccccggccgggtgagtgggagacgcgggaggaggaagggggctgtcccaggccgggcgggagggaacgtggcgcggccgggcggggcggacgggggcgatcgcggggcccagccgggggaggaaggaaccgcagagccgtgtccgggagggaccgcagcgccactctctgcggggcgccgttcccgcgccaccgagggcagctaactcctagcagaggaccggggtcgcggccgccgggggcgcagcgcggttagggcggccccgccacggcccaggcactcccgctgggccctgccgggcctcacccttccccgcgcagcgactcgggaacccggcctcagcctggagctccagctacccacatgcaccttacctgggttccgcccggtccctgagtccccacaaaatggctgatggaggaagccccttcctaggtcggagggactttgtctacccttcctcaacccgagaccctagtgcctctaacggagggggcagcccagccaggagggaagagaagaaggtaaggaggggaccaggtgtgggggacctggagtggtcccaaggctgccatcctggatctgccacccgcccaactgagagagcccactctgtcctctcccctgcctagagaaaggccgccaggctcaagtttgacttccaggcgcagtcccccaaggagctgactctgcagaagggtgacattgtctacatccacaaggaggtggacaagaactggctggagggagagcaccacggccgcctgggcatcttccctgctaattatgtggaggtgctgcccgcagatgagatccctaagcccatcaagcccccgacctaccaggtgctggagtatggagaggctgtggcccagtacaccttcaagggggacctggaggtggagctgtccttccgcaagggagagcacatctgcctgatccgcaaggtgaacgagaactggtacgagggacgcatcacgggcacggggcgccaaggcatattccctgccagctacgtgcaggtgtctcgtgaaccccggctccggctctgtgacgacggcccccagctccccacgtctccccgcctgaccgctgccgcccgctcagcccgtcaccccagctccccctcagccctgcgcagcccagctgaccccaccgacttggggggacagacctccccccgtcgcactggcttctccttccccacccaggagcctagaccccagacccagaatcttggcacccctggtccagctctgtcccactctcgaggtcccagccatcccctggacctggggacctcctctcctaacacctctcagatacactggaccccgtaccgggcgatgtaccagtacaggccccagaacgaagacgagctggagctgcgcgagggggacagggtggatgtcatgcagcagtgtgacgatggctggtttgtgggtgtctcccggaggacccagaaattcggaacgttccctggaaattacgttgccccggtgtgagtggtctccatggcaacttggagccagccaggatggggtggggagcggtggcactcgtgggagggagaggacccccgcccacatcctccttccccaggacctgagctcccagcatctgcagacgacccccgcagcctttccctcggacccccctcgaagccccctggactgattcccacccacgactcacaggcattcctcccacagccctttcatttcctccccaccccactccccaaatacagaggtctgctttgaagcggagaccatttccaggccttattgagaccagaccccaagtcccccacccccatcctgctccagcgtttcctctaacagggaccagctctccgctttgcccccacggggttcctctaaccagaaccagcttcctagcctcgtagagaccaaaggccgcccccgcctgctggggttcctcccagcaccccagcttgctggctgccctctttgccttctggcctccagctgggtgtgggggggcggagcaaggcgggggacagacgcagcaccttcttagcgatctaggcctggcaagagctctggccccaaggcctcctcttcccaggggctgccaagtcctggccctggccctggcatatcaccccgcactgtggggccaggcaccactagcctggctcaaatattccccagggagactgctgtgtgctgcccgcctgcctgctggctctcccccagccccacatcccctctggaagagaatgtaaaataaacctggacacaaggga

SEQ ID NO: 406756 - DNA, 2142 bp, Homo sapiens
cgggggaacctggatgggcacagtgaagccaggccttggagggcgggagaagatgggagaggaaatggggaaccccattggtgctgtaacagagacacaacttggcagaaactggcaggactgcggaatcgcgggatcaggaagcgcgtaggcactcccggggcgtgctgggcaggtgctgctggagagagagctggccgagctgagcgccgagctggacaaggacctgcgggcaattgagacccgactgccgtcccccaagagctcgccggcgccccgacgggccccggagcagcggcccccggccggcccggcctcagcctggagctccagctacccacatgcaccttacctgggttccgcccggtccctgagtccccacaaaatggctgatggaggaagccccttcctaggtcggagggactttgtctacccttcctcaacccgagaccctagtgcctctaacggagggggcagcccagccaggagggaagagaagaagagaaaggccgccaggctcaagtttgacttccaggcgcagtcccccaaggagctgactctgcagaagggtgacattgtctacatccacaaggaggtggacaagaactggctggagggagagcaccacggccgcctgggcatcttccctgctaattatgtggaggtgctgcccgcagatgagatccctaagcccatcaagcccccgacctaccaggtgctggagtatggagaggctgtggcccagtacaccttcaagggggacctggaggtggagctgtccttccgcaagggagagcacatctgcctgatccgcaaggtgaacgagaactggtacgagggacgcatcacgggcacggggcgccaaggcatattccctgccagctacgtgcaggtgtctcgtgaaccccggctccggctctgtgacgacggcccccagctccccacgtctccccgcctgaccgctgccgcccgctcagcccgtcaccccagctccccctcagccctgcgcagcccagctgaccccaccgacttggggggacagacctccccccgtcgcactggcttctccttccccacccaggagcctagaccccagacccagaatcttggcacccctggtccagctctgtcccactctcgaggtcccagccatcccctggacctggggacctcctctcctaacacctctcagatacactggaccccgtaccgggcgatgtaccagtacaggccccagaacgaagacgagctggagctgcgcgagggggacagggtggatgtcatgcagcagtgtgacgatggctggtttgtgggtgtctcccggaggacccagaaattcggaacgttccctggaaattacgttgccccggtgtgagtggtctccatggcaacttggagccagccaggatggggtggggagcggtggcactcgtgggagggagaggacccccgcccacatcctccttccccaggacctgagctcccagcatctgcagacgacccccgcagcctttccctcggacccccctcgaagccccctggactgattcccacccacgactcacaggcattcctcccacagccctttcatttcctccccaccccactccccaaatacagaggtctgctttgaagcggagaccatttccaggccttattgagaccagaccccaagtcccccacccccatcctgctccagcgtttcctctaacagggaccagctctccgctttgcccccacggggttcctctaaccagaaccagcttcctagcctcgtagagaccaaaggccgcccccgcctgctggggttcctcccagcaccccagcttgctggctgccctctttgccttctggcctccagctgggtgtgggggggcggagcaaggcgggggacagacgcagcaccttcttagcgatctaggcctggcaagagctctggccccaaggcctcctcttcccaggggctgccaagtcctggccctggccctggcatatcaccccgcactgtggggccaggcaccactagcctggctcaaatattccccagggagactgctgtgtgctgcccgcctgcctgctggctctcccccagccccacatcccctctggaagagaatgtaaaataaacctggacacaaggga

SEQ ID NO: 406757 - DNA, 2193 bp, Homo sapiens
gcccccgggccccagcctcggggacccccgccccttcccctagttcccgccccgctcccgggatcggccgcgcgggcgcctctaggaccccgcgtcccgcccgctctcctcccctcccgagccgcgaacttttccggaggcggcggcctcggctgccgctgggtcccggggtcgcgggccctgattgcgccgtttccccgcgcagagctcgccggcgccccgacgggccccggagcagcggcccccggccggcccggcctcagcctggagctccagctacccacatgcaccttacctgggttccgcccggtccctgagtccccacaaaatggctgatggaggaagccccttcctaggtcggagggactttgtctacccttcctcaacccgagaccctagtgcctctaacggagggggcagcccagccaggagggaagagaagaaggtaaggaggggaccaggtgtgggggacctggagtggtcccaaggctgccatcctggatctgccacccgcccaactgagagagcccactctgtcctctcccctgcctagagaaaggccgccaggctcaagtttgacttccaggcgcagtcccccaaggagctgactctgcagaagggtgacattgtctacatccacaaggaggtggacaagaactggctggagggagagcaccacggccgcctgggcatcttccctgctaattatgtggaggtgctgcccgcagatgagatccctaagcccatcaagcccccgacctaccaggtgctggagtatggagaggctgtggcccagtacaccttcaagggggacctggaggtggagctgtccttccgcaagggagagcacatctgcctgatccgcaaggtgaacgagaactggtacgagggacgcatcacgggcacggggcgccaaggcatattccctgccagctacgtgcaggtgtctcgtgaaccccggctccggctctgtgacgacggcccccagctccccacgtctccccgcctgaccgctgccgcccgctcagcccgtcaccccagctccccctcagccctgcgcagcccagctgaccccaccgacttggggggacagacctccccccgtcgcactggcttctccttccccacccaggagcctagaccccagacccagaatcttggcacccctggtccagctctgtcccactctcgaggtcccagccatcccctggacctggggacctcctctcctaacacctctcagatacactggaccccgtaccgggcgatgtaccagtacaggccccagaacgaagacgagctggagctgcgcgagggggacagggtggatgtcatgcagcagtgtgacgatggctggtttgtgggtgtctcccggaggacccagaaattcggaacgttccctggaaattacgttgccccggtgtgagtggtctccatggcaacttggagccagccaggatggggtggggagcggtggcactcgtgggagggagaggacccccgcccacatcctccttccccaggacctgagctcccagcatctgcagacgacccccgcagcctttccctcggacccccctcgaagccccctggactgattcccacccacgactcacaggcattcctcccacagccctttcatttcctccccaccccactccccaaatacagaggtctgctttgaagcggagaccatttccaggccttattgagaccagaccccaagtcccccacccccatcctgctccagcgtttcctctaacagggaccagctctccgctttgcccccacggggttcctctaaccagaaccagcttcctagcctcgtagagaccaaaggccgcccccgcctgctggggttcctcccagcaccccagcttgctggctgccctctttgccttctggcctccagctgggtgtgggggggcggagcaaggcgggggacagacgcagcaccttcttagcgatctaggcctggcaagagctctggccccaaggcctcctcttcccaggggctgccaagtcctggccctggccctggcatatcaccccgcactgtggggccaggcaccactagcctggctcaaatattccccagggagactgctgtgtgctgcccgcctgcctgctggctctcccccagccccacatcccctctggaagagaatgtaaaataaacctggacacaaggga

SEQ ID NO: 406758 - DNA, 2053 bp, Homo sapiens
gcccccgggccccagcctcggggacccccgccccttcccctagttcccgccccgctcccgggatcggccgcgcgggcgcctctaggaccccgcgtcccgcccgctctcctcccctcccgagccgcgaacttttccggaggcggcggcctcggctgccgctgggtcccggggtcgcgggccctgattgcgccgtttccccgcgcagagctcgccggcgccccgacgggccccggagcagcggcccccggccggaccctagtgcctctaacggagggggcagcccagccaggagggaagagaagaaggtaaggaggggaccaggtgtgggggacctggagtggtcccaaggctgccatcctggatctgccacccgcccaactgagagagcccactctgtcctctcccctgcctagagaaaggccgccaggctcaagtttgacttccaggcgcagtcccccaaggagctgactctgcagaagggtgacattgtctacatccacaaggaggtggacaagaactggctggagggagagcaccacggccgcctgggcatcttccctgctaattatgtggaggtgctgcccgcagatgagatccctaagcccatcaagcccccgacctaccaggtgctggagtatggagaggctgtggcccagtacaccttcaagggggacctggaggtggagctgtccttccgcaagggagagcacatctgcctgatccgcaaggtgaacgagaactggtacgagggacgcatcacgggcacggggcgccaaggcatattccctgccagctacgtgcaggtgtctcgtgaaccccggctccggctctgtgacgacggcccccagctccccacgtctccccgcctgaccgctgccgcccgctcagcccgtcaccccagctccccctcagccctgcgcagcccagctgaccccaccgacttggggggacagacctccccccgtcgcactggcttctccttccccacccaggagcctagaccccagacccagaatcttggcacccctggtccagctctgtcccactctcgaggtcccagccatcccctggacctggggacctcctctcctaacacctctcagatacactggaccccgtaccgggcgatgtaccagtacaggccccagaacgaagacgagctggagctgcgcgagggggacagggtggatgtcatgcagcagtgtgacgatggctggtttgtgggtgtctcccggaggacccagaaattcggaacgttccctggaaattacgttgccccggtgtgagtggtctccatggcaacttggagccagccaggatggggtggggagcggtggcactcgtgggagggagaggacccccgcccacatcctccttccccaggacctgagctcccagcatctgcagacgacccccgcagcctttccctcggacccccctcgaagccccctggactgattcccacccacgactcacaggcattcctcccacagccctttcatttcctccccaccccactccccaaatacagaggtctgctttgaagcggagaccatttccaggccttattgagaccagaccccaagtcccccacccccatcctgctccagcgtttcctctaacagggaccagctctccgctttgcccccacggggttcctctaaccagaaccagcttcctagcctcgtagagaccaaaggccgcccccgcctgctggggttcctcccagcaccccagcttgctggctgccctctttgccttctggcctccagctgggtgtgggggggcggagcaaggcgggggacagacgcagcaccttcttagcgatctaggcctggcaagagctctggccccaaggcctcctcttcccaggggctgccaagtcctggccctggccctggcatatcaccccgcactgtggggccaggcaccactagcctggctcaaatattccccagggagactgctgtgtgctgcccgcctgcctgctggctctcccccagccccacatcccctctggaagagaatgtaaaataaacctggacacaaggga

SEQ ID NO: 406759 - DNA, 1080 bp, Homo sapiens
gcccccgggccccagcctcggggacccccgccccttcccctagttcccgccccgctcccgggatcggccgcgcgggcgcctctaggaccccgcgtcccgcccgctctcctcccctcccgagccgcgaacttttccggaggcggcggcctcggctgccgctgggtcccggggtcgcgggccctgattgcgccgtttccccgcgcagagctcgccggcgccccgacgggccccggagcagcggcccccggccggcccggcctcagcctggagctccagctacccacatgcaccttacctgggttccgcccggtccctgagtccccacaaaatggctgatggaggaagccccttcctaggtcggagggactttgtctacccttcctcaacccgagaccctagtgcctctaacggagggggcagcccagccaggagggaagagaagaagagaaaggccgccaggctcaagtttgacttccaggcgcagtcccccaaggagctgactctgcagaagggtgacattgtctacatccacaaggaggtggacaagaactggctggagggagagcaccacggccgcctgggcatcttccctgctaattatgtggaggtgctgcccgcagatgagatccctaagcccatcaagcccccgacctaccaggtgctggagtatggagaggctgtggcccagtacaccttcaagggggacctggaggtggagctgtccttccgcaagggagagcacatctgcctgatccgcaaggtgaacgagaactggtacgagggacgcatcacgggcacggggcgccaaggcatattccctgccagctacgtgcaggtgtctcgtgaaccccggctccggctctgtgacgacggcccccagctccccacgtctccccgcctgaccgctgccgcccgctcagcccgtcaccccagctccccctcagccctgcgcagcccagctgaccccaccgacttggggggacagacctccccccgtcgcactggcttctccttccccacccaggagcctagaccccagacccagacccgggatgggatcctgctagagtcgccgagcag

SEQ ID NO: 406760 - DNA, 2344 bp, Homo sapiens
ccttgcccaggcagaaaagatggcagagggagggtgaacccagggcccatctgtgggtatgggctccaatttcctaaattgtttgtggttataaccatggcttccaccttgtctggcaccgggtccacatcttttctgagacctgctagaaggtcagagccctagagaataagagaagcttgctgctggtgagggggtatggccaggattcctggagtcggaagagcttcagcttcaccatcttgggagaagaaggaagaaagtgaaagcgatgtggtccttcttagtcccaaggaccctgacagaggacacgcagaggagcagctggcttgcccggagtcctcccaccttgacccaagcatgcagggcccaccccgcagcctccgcgctgggctcagcctggacgacttcatccctggccacctccagtcccacatagggtcttcctcccgggggacacgggtgcccgtgatccggaatggtggctccaacacccttaatttccagttccacgaccccgcgcccaggactgtgtgcaatgggggctacacaccaagacgagatgcttcccagcacccggaccctgcgtggtatcagacctggccaggccctgggagcaagccctctgcaagcacaaagatccctgcctcccagcacacccagaactggtcagccacgtggaccaaggacagcaagcgtcgggacaagcgctgggtcaagtacgagggaatcgggcccgtggacgagagcggcatgcccattgccccccgatccagcgttgacagacccagagactggtaccggagaatgttccagcagattcaccggaaaatgccagacttgcagctggactggaccttcgaggagccacccagagaccccaggcatctaggagcccagcaaagacctgcccacaggcccggcccggcaacatcttccagtggaagaagctgggaccactctgaagagttacctagaagcaccttcaactacagacctggagcattctccactgtgctgcagccctcaaatcaggtgctcagacgccgggaaaaagtagacaatgtctggacggaagagtcctggaaccagtttctgcaggaactagagactgggcagaggcccaagaaaccgctggtggacgaccctggtgagaagccctcccagcccattgaggtgctgctggagagagagctggccgagctgagcgccgagctggacaaggacctgcgggcaattgagacccgactgccgtcccccaagagctcgccggcgccccgacgggccccggagcagcggcccccggccgggtgagtgggagacgcgggaggaggaagggggctgtcccaggccgggcgggagggaacgtggcgcggccgggcggggcggacgggggcgatcgcggggcccagccgggggaggaaggaaccgcagagccgtgtccgggagggaccgcagcgccactctctgcggggcgccgttcccgcgccaccgagggcagctaactcctagcagaggaccggggtcgcggccgccgggggcgcagcgcggttagggcggccccgccacggcccaggcactcccgctgggccctgccgggcctcacccttccccgcgcagcgactcgggaacccggcctcagcctggagctccagctacccacatgcaccttacctgggttccgcccggtccctgagtccccacaaaatggctgatggaggaagccccttcctaggtcggagggactttgtctacccttcctcaacccgagaccctagtgcctctaacggagggggcagcccagccaggagggaagagaagaagagaaaggccgccaggctcaagtttgacttccaggcgcagtcccccaaggagctgactctgcagaagggtgacattgtctacatccacaaggaggtggacaagaactggctggagggagagcaccacggccgcctgggcatcttccctgctaattatgtggaggtgctgcccgcagatgagatccctaagcccatcaagcccccgacctaccaggtgctggagtatggagaggctgtggcccagtacaccttcaagggggacctggaggtggagctgtccttccgcaagggagagcacatctgcctgatccgcaaggtgaacgagaactggtacgcgagccactctgggaggaatgtggggggagcttgtagttcctggctcagtcttttctcaggggagcggccctcgagtgtctcgctaaaacaatgattgattctaaggtctcatatgtcccctttatcaatatatcaaactttattttgagatgggggaacactccgggatcctcaagagcgatcta

SEQ ID NO: 406761 - DNA, 627 bp, Homo sapiens
ccttgcccaggcagaaaagatggcagagggagggtgaacccagggcccatctgtgggtatgggctccaatttcctaaattgtttgtggttataaccatggcttccaccttgtctggcaccgggtccacatcttttctgagacctgctagaagacctgacagccacttgtttgtttcatctttcctgagaactaagagaggttcacccagctcagttcttctcaaagacaccccgtctgtgcattgtgcttgtttgctcatccatgaaaagaggaagagagaacagccgtggatgtgatgagcaggaatcaacagaggacccaggagaaagggatggagcccagggcatgaaacatagtccagattcctgctggtcagagccctagagaataagagaagcttgctgctggtgagggggtatggccaggattcctggagtcggaagagcttcagcttcaccatcttgggagaagaaggaagaaagtgaaagcgatgtggtccttcttagtcccaaggaccctgacagctttcacatgtgatgtttcaaggcaacggggagagcttctttaccagaacgagggagaagataagactaaagcagtaatggtggtagggactgaaaatcact

SEQ ID NO: 406762 - DNA, 456 bp, Homo sapiens
tatcacaactttcaggctttagaaagaaaatgtaattttgatacagtagatgaataatttaatggtaaatgaagcagactttttaatgttgatgctattaaggcgaaggttcatcatagaattcaaggaggtgggaagacaaggttcttctttgtttggaggccagagccgtactttatggtatccactgggccaacagatcagccctcttatcctacccatcgcagtctacctgagctgggaaagaaggctgatgcagacctaatttcccagctcctgggtctgtgccctcctttgtggctgagttgacttggcttggttttccctctgaggtcatcacttacttatccttcccttataaaatctactttctagacctgacagccacttgtttgtttcatctttcctgagaactaagagaggttcacccagctcagttcttctcaaagacacccc

SEQ ID NO: 406763 - DNA, 287 bp, Homo sapiens
tgccagtgcctgccctaggtgggggtgcaaccccatcccccaggtatggcctccccaagctgaggttgtgcttctccacagaccctagtgcctctaacggagggggcagcccagccaggagggaagagaagaaggtaaggaggggaccaggtgtgggggacctggagtggtcccaaggctgccatcctggatctgccacccgcccaactgagagagcccactctgtcctctcccctgcctagagaaaggccgccaggctcaagtttgacttccaggcgcagtccccc

SEQ ID NO: 406764 - DNA, 2924 bp, Homo sapiens
  misc_feature (3)..(4): n is a, c, g, or t
  misc_feature (8)..(9): n is a, c, g, or t
  misc_feature (12)..(12): n is a, c, g, or t
cgnncgcnnggncaggcagcagccgggcagggatgctcctgcgctcccgggcggcctcgggcccagccacctgctcgccggggaagaggacacgcagaggagcagctggcttgcccggagtcctcccaccttgacccaagcatgcagggcccaccccgcagcctccgcgctgggctcagcctggacgacttcatccctggccacctccagtcccacatagggtcttcctcccgggggacacgggtgcccgtgatccggaatggtggctccaacacccttaatttccagttccacgaccccgcgcccaggactgtgtgcaatgggggctacacaccaagacgagatgcttcccagcacccggaccctgcgtggtatcagacctggccaggccctgggagcaagccctctgcaagcacaaagatccctgcctcccagcacacccagaactggtcagccacgtggaccaaggacagcaagcgtcgggacaagcgctgggtcaagtacgagggaatcgggcccgtggacgagagcggcatgcccattgccccccgatccagcgttgacagacccagagactggtaccggagaatgttccagcagattcaccggaaaatgccagacttgcagctggactggaccttcgaggagccacccagagaccccaggcatctaggagcccagcaaagacctgcccacaggcccggcccggcaacatcttccagtggaagaagctgggaccactctgaagagttacctagaagcaccttcaactacagacctggagcattctccactgtgctgcagccctcaaatcaggtgctcagacgccgggaaaaagtagacaatgtctggacggaagagtcctggaaccagtttctgcaggaactagagactgggcagaggcccaagaaaccgctggtggacgaccctggtgagaagccctcccagcccattgaggtgctgctggagagagagctggccgagctgagcgccgagctggacaaggacctgcgggcaattgagacccgactgccgtcccccaagagctcgccggcgccccgacgggccccggagcagcggcccccggccggcccggcctcagcctggagctccagctacccacatgcaccttacctgggttccgcccggtccctgagtccccacaaaatggctgatggaggaagccccttcctaggtcggagggactttgtctacccttcctcaacccgagaccctagtgcctctaacggagggggcagcccagccaggagggaagagaagaagagaaaggccgccaggctcaagtttgacttccaggcgcagtcccccaaggagctgactctgcagaagggtgacattgtctacatccacaaggaggtggacaagaactggctggagggagagcaccacggccgcctgggcatcttccctgctaattatgtggaggtgctgcccgcagatgagatccctaagcccatcaagcccccgacctaccaggtgctggagtatggagaggctgtggcccagtacaccttcaagggggacctggaggtggagctgtccttccgcaagggagagcacatctgcctgatccgcaaggtgaacgagaactggtacgagggacgcatcacgggcacggggcgccaaggcatattccctgccagctacgtgcaggtgtctcgtgaaccccggctccggctctgtgacgacggcccccagctccccacgtctccccgcctgaccgctgccgcccgctcagcccgtcaccccagctccccctcagccctgcgcagcccagctgaccccaccgacttggggggacagacctccccccgtcgcactggcttctccttccccacccaggagcctagaccccagacccagaatcttggcacccctggtccagctctgtcccactctcgaggtcccagccatcccctggacctggggacctcctctcctaacacctctcagatacactggaccccgtaccgggcgatgtaccagtacaggccccagaacgaagacgagctggagctgcgcgagggggacagggtggatgtcatgcagcagtgtgacgatggctggtttgtgggtgtctcccggaggacccagaaattcggaacgttccctggaaattacgttgccccggtgtgagtggtctccatggcaacttggagccagccaggatggggtggggagcggtggcactcgtgggagggagaggacccccgcccacatcctccttccccaggacctgagctcccagcatctgcagacgacccccgcagcctttccctcggacccccctcgaagccccctggactgattcccacccacgactcacaggcattcctcccacagccctttcatttcctccccaccccactccccaaatacagaggtctgctttgaagcggagaccatttccaggccttattgagaccagaccccaagtcccccacccccatcctgctccagcgtttcctctaacagggaccagctctccgctttgcccccacggggttcctctaaccagaaccagcttcctagcctcgtagagaccaaaggccgcccccgcctgctggggttcctcccagcaccccagcttgctggctgccctctttgccttctggcctccagctgggtgtgggggggcggagcaaggcgggggacagacgcagcaccttcttagcgatctaggcctggcaagagctctggccccaaggcctcctcttcccaggggctgccaagtcctggccctggccctggcatatcaccccgcactgtggggccaggcaccactagcctggctcaaatattccccagggagactgctgtgtgctgcccgcctgcctgctggctctcccccagccccacatcccctctggaagagaatgtaaaataaacctggacacaaggga

SEQ ID NO: 406765 - DNA, 3615 bp, Homo sapiens
ccttgcccaggcagaaaagatggcagagggagggtgaacccagggcccatctgtgggtatgggctccaatttcctaaattgtttgtggttataaccatggcttccaccttgtctggcaccgggtccacatcttttctgagacctgctagaaggtcagagccctagagaataagagaagcttgctgctggtgagggggtatggccaggattcctggagtcggaagagcttcagcttcaccatcttgggagaagaaggaagaaagtgaaagcgatgtggtccttcttagtcccaaggaccctgacagaggacacgcagaggagcagctggcttgcccggagtcctcccaccttgacccaagcatgcagggcccaccccgcagcctccgcgctgggctcagcctggacgacttcatccctggccacctccagtcccacatagggtcttcctcccgggggacacgggtgcccgtgatccggaatggtggctccaacacccttaatttccagttccacgaccccgcgcccaggactgtgtgcaatgggggctacacaccaagacgagatgcttcccagcacccggaccctgcgtggtatcagacctggccaggccctgggagcaagccctctgcaagcacaaagatccctgcctcccagcacacccagaactggtcagccacgtggaccaaggacagcaagcgtcgggacaagcgctgggtcaagtacgagggaatcgggcccgtggacgagagcggcatgcccattgccccccgatccagcgttgacagacccagagactggtaccggagaatgttccagcagattcaccggaaaatgccagacttgcagctggactggaccttcgaggagccacccagagaccccaggcatctaggagcccagcaaagacctgcccacaggcccggcccggcaacatcttccagtggaagaagctgggaccactctgaagagttacctagaagcaccttcaactacagacctggagcattctccactgtgctgcagccctcaaatcaggtgctcagacgccgggaaaaagtagacaatgtctggacggaagagtcctggaaccagtttctgcaggaactagagactgggcagaggcccaagaaaccgctggtggacgaccctggtgagaagccctcccagcccattgaggtgctgctggagagagagctggccgagctgagcgccgagctggacaaggacctgcgggcaattgagacccgactgccgtcccccaagagctcgccggcgccccgacgggccccggagcagcggcccccggccgggtgagtgggagacgcgggaggaggaagggggctgtcccaggccgggcgggagggaacgtggcgcggccgggcggggcggacgggggcgatcgcggggcccagccgggggaggaaggaaccgcagagccgtgtccgggagggaccgcagcgccactctctgcggggcgccgttcccgcgccaccgagggcagctaactcctagcagaggaccggggtcgcggccgccgggggcgcagcgcggttagggcggccccgccacggcccaggcactcccgctgggccctgccgggcctcacccttccccgcgcagcgactcgggaagtaggacatcctgtggagagcccaggacccgggagacgccctgggaggaggtggcagggatgggggcgatggggggtcagagcggtctaggggtgaccagggtggggtgcggagccccaggctggaggctcagtctctgtgccccgtgcagcccggcctcagcctggagctccagctacccacatgcaccttacctgggttccgcccggtccctgagtccccacaaaatggctgatggaggaagccccttcctaggtcggagggactttgtctacccttcctcaacccgagaccctagtgcctctaacggagggggcagcccagccaggagggaagagaagaagagaaaggccgccaggctcaagtttgacttccaggcgcagtcccccaaggagctgactctgcagaagggtgacattgtctacatccacaaggaggtggacaagaactggctggagggagagcaccacggccgcctgggcatcttccctgctaattatgtggaggtgctgcccgcagatgagatccctaagcccatcaagcccccgacctaccaggtgctggagtatggagaggctgtggcccagtacaccttcaagggggacctggaggtggagctgtccttccgcaagggagagcacatctgcctgatccgcaaggtgaacgagaactggtacgagggacgcatcacgggcacggggcgccaaggcatattccctgccagctacgtgcaggtgtctcgtgaaccccggctccggctctgtgacgacggcccccagctccccacgtctccccgcctgaccgctgccgcccgctcagcccgtcaccccagctccccctcagccctgcgcagcccagctgaccccaccgacttggggggacagacctccccccgtcgcactggcttctccttccccacccaggagcctagaccccagacccagaatcttggcacccctggtccagctctgtcccactctcgaggtcccagccatcccctggacctggggacctcctctcctaacacctctcagatacactggaccccgtaccgggcgatgtaccagtacaggccccagaacgaagacgagctggagctgcgcgagggggacagggtggatgtcatgcagcagtgtgacgatggctggtttgtgggtgtctcccggaggacccagaaattcggaacgttccctggaaattacgttgccccggtgtgagtggtctccatggcaacttggagccagccaggatggggtggggagcggtggcactcgtgggagggagaggacccccgcccacatcctccttccccaggacctgagctcccagcatctgcagacgacccccgcagcctttccctcggacccccctcgaagccccctggactgattcccacccacgactcacaggcattcctcccacagccctttcatttcctccccaccccactccccaaatacagaggtctgctttgaagcggagaccatttccaggccttattgagaccagaccccaagtcccccacccccatcctgctccagcgtttcctctaacagggaccagctctccgctttgcccccacggggttcctctaaccagaaccagcttcctagcctcgtagagaccaaaggccgcccccgcctgctggggttcctcccagcaccccagcttgctggctgccctctttgccttctggcctccagctgggtgtgggggggcggagcaaggcgggggacagacgcagcaccttcttagcgatctaggcctggcaagagctctggccccaaggcctcctcttcccaggggctgccaagtcctggccctggccctggcatatcaccccgcactgtggggccaggcaccactagcctggctcaaatattccccagggagactgctgtgtgctgcccgcctgcctgctggctctcccccagccccacatcccctctggaagagaatgtaaaataaacctggacacaaggga

SEQ ID NO: 406766 - DNA, 3514 bp, Homo sapiens
ccttgcccaggcagaaaagatggcagagggagggtgaacccagggcccatctgtgggtatgggctccaatttcctaaattgtttgtggttataaccatggcttccaccttgtctggcaccgggtccacatcttttctgagacctgctagaaggtcagagccctagagaataagagaagcttgctgctggtgagggggtatggccaggattcctggagtcggaagagcttcagcttcaccatcttgggagaagaaggaagaaagtgaaagcgatgtggtccttcttagtcccaaggaccctgacagaggacacgcagaggagcagctggcttgcccggagtcctcccaccttgacccaagcatgcagggcccaccccgcagcctccgcgctgggctcagcctggacgacttcatccctggccacctccagtcccacatagggtcttcctcccgggggacacgggtgcccgtgatccggaatggtggctccaacacccttaatttccagttccacgaccccgcgcccaggactgtgtgcaatgggggctacacaccaagacgagatgcttcccagcacccggaccctgcgtggtatcagacctggccaggccctgggagcaagccctctgcaagcacaaagatccctgcctcccagcacacccagaactggtcagccacgtggaccaaggacagcaagcgtcgggacaagcgctgggtcaagtacgagggaatcgggcccgtggacgagagcggcatgcccattgccccccgatccagcgttgacagacccagagactggtaccggagaatgttccagcagattcaccggaaaatgccagacttgcagctggactggaccttcgaggagccacccagagaccccaggcatctaggagcccagcaaagacctgcccacaggcccggcccggcaacatcttccagtggaagaagctgggaccactctgaagagttacctagaagcaccttcaactacagacctggagcattctccactgtgctgcagccctcaaatcaggtgctcagacgccgggaaaaagtagacaatgtctggacggaagagtcctggaaccagtttctgcaggaactagagactgggcagaggcccaagaaaccgctggtggacgaccctggtgagaagccctcccagcccattgaggtgctgctggagagagagctggccgagctgagcgccgagctggacaaggacctgcgggcaattgagacccgactgccgtcccccaagagctcgccggcgccccgacgggccccggagcagcggcccccggccgggtgagtgggagacgcgggaggaggaagggggctgtcccaggccgggcgggagggaacgtggcgcggccgggcggggcggacgggggcgatcgcggggcccagccgggggaggaaggaaccgcagagccgtgtccgggagggaccgcagcgccactctctgcggggcgccgttcccgcgccaccgagggcagctaactcctagcagaggaccggggtcgcggccgccgggggcgcagcgcggttagggcggccccgccacggcccaggcactcccgctgggccctgccgggcctcacccttccccgcgcagcgactcgggaagtaggacatcctgtggagagcccaggacccgggagacgccctgggaggagcccggcctcagcctggagctccagctacccacatgcaccttacctgggttccgcccggtccctgagtccccacaaaatggctgatggaggaagccccttcctaggtcggagggactttgtctacccttcctcaacccgagaccctagtgcctctaacggagggggcagcccagccaggagggaagagaagaagagaaaggccgccaggctcaagtttgacttccaggcgcagtcccccaaggagctgactctgcagaagggtgacattgtctacatccacaaggaggtggacaagaactggctggagggagagcaccacggccgcctgggcatcttccctgctaattatgtggaggtgctgcccgcagatgagatccctaagcccatcaagcccccgacctaccaggtgctggagtatggagaggctgtggcccagtacaccttcaagggggacctggaggtggagctgtccttccgcaagggagagcacatctgcctgatccgcaaggtgaacgagaactggtacgagggacgcatcacgggcacggggcgccaaggcatattccctgccagctacgtgcaggtgtctcgtgaaccccggctccggctctgtgacgacggcccccagctccccacgtctccccgcctgaccgctgccgcccgctcagcccgtcaccccagctccccctcagccctgcgcagcccagctgaccccaccgacttggggggacagacctccccccgtcgcactggcttctccttccccacccaggagcctagaccccagacccagaatcttggcacccctggtccagctctgtcccactctcgaggtcccagccatcccctggacctggggacctcctctcctaacacctctcagatacactggaccccgtaccgggcgatgtaccagtacaggccccagaacgaagacgagctggagctgcgcgagggggacagggtggatgtcatgcagcagtgtgacgatggctggtttgtgggtgtctcccggaggacccagaaattcggaacgttccctggaaattacgttgccccggtgtgagtggtctccatggcaacttggagccagccaggatggggtggggagcggtggcactcgtgggagggagaggacccccgcccacatcctccttccccaggacctgagctcccagcatctgcagacgacccccgcagcctttccctcggacccccctcgaagccccctggactgattcccacccacgactcacaggcattcctcccacagccctttcatttcctccccaccccactccccaaatacagaggtctgctttgaagcggagaccatttccaggccttattgagaccagaccccaagtcccccacccccatcctgctccagcgtttcctctaacagggaccagctctccgctttgcccccacggggttcctctaaccagaaccagcttcctagcctcgtagagaccaaaggccgcccccgcctgctggggttcctcccagcaccccagcttgctggctgccctctttgccttctggcctccagctgggtgtgggggggcggagcaaggcgggggacagacgcagcaccttcttagcgatctaggcctggcaagagctctggccccaaggcctcctcttcccaggggctgccaagtcctggccctggccctggcatatcaccccgcactgtggggccaggcaccactagcctggctcaaatattccccagggagactgctgtgtgctgcccgcctgcctgctggctctcccccagccccacatcccctctggaagagaatgtaaaataaacctggacacaaggga

SEQ ID NO: 406767 - DNA, 2557 bp, Homo sapiens
gcccccgggccccagcctcggggacccccgccccttcccctagttcccgccccgctcccgggatcggccgcgcgggcgcctctaggaccccgcgtcccgcccgctctcctcccctcccgagccgcgaacttttccggaggcggcggcctcggctgccgctgggtcccggggtcgcgggccctgattgcgccgtttccccgcgcagagctcgccggcgccccgacgggccccggagcagcggcccccggccgggtgagtgggagacgcgggaggaggaagggggctgtcccaggccgggcgggagggaacgtggcgcggccgggcggggcggacgggggcgatcgcggggcccagccgggggaggaaggaaccgcagagccgtgtccgggagggaccgcagcgccactctctgcggggcgccgttcccgcgccaccgagggcagctaactcctagcagaggaccggggtcgcggccgccgggggcgcagcgcggttagggcggccccgccacggcccaggcactcccgctgggccctgccgggcctcacccttccccgcgcagcgactcgggaagtaggacatcctgtggagagcccaggacccgggagacgccctgggaggaggtggcagggatgggggcgatggggggtcagagcggtctaggggtgaccagggtggggtgcggagccccaggctggaggctcagtctctgtgccccgtgcagcccggcctcagcctggagctccagctacccacatgcaccttacctgggttccgcccggtccctgagtccccacaaaatggctgatggaggaagccccttcctaggtcggagggactttgtctacccttcctcaacccgagaccctagtgcctctaacggagggggcagcccagccaggagggaagagaagaagagaaaggccgccaggctcaagtttgacttccaggcgcagtcccccaaggagctgactctgcagaagggtgacattgtctacatccacaaggaggtggacaagaactggctggagggagagcaccacggccgcctgggcatcttccctgctaattatgtggaggtgctgcccgcagatgagatccctaagcccatcaagcccccgacctaccaggtgctggagtatggagaggctgtggcccagtacaccttcaagggggacctggaggtggagctgtccttccgcaagggagagcacatctgcctgatccgcaaggtgaacgagaactggtacgagggacgcatcacgggcacggggcgccaaggcatattccctgccagctacgtgcaggtgtctcgtgaaccccggctccggctctgtgacgacggcccccagctccccacgtctccccgcctgaccgctgccgcccgctcagcccgtcaccccagctccccctcagccctgcgcagcccagctgaccccaccgacttggggggacagacctccccccgtcgcactggcttctccttccccacccaggagcctagaccccagacccagaatcttggcacccctggtccagctctgtcccactctcgaggtcccagccatcccctggacctggggacctcctctcctaacacctctcagatacactggaccccgtaccgggcgatgtaccagtacaggccccagaacgaagacgagctggagctgcgcgagggggacagggtggatgtcatgcagcagtgtgacgatggctggtttgtgggtgtctcccggaggacccagaaattcggaacgttccctggaaattacgttgccccggtgtgagtggtctccatggcaacttggagccagccaggatggggtggggagcggtggcactcgtgggagggagaggacccccgcccacatcctccttccccaggacctgagctcccagcatctgcagacgacccccgcagcctttccctcggacccccctcgaagccccctggactgattcccacccacgactcacaggcattcctcccacagccctttcatttcctccccaccccactccccaaatacagaggtctgctttgaagcggagaccatttccaggccttattgagaccagaccccaagtcccccacccccatcctgctccagcgtttcctctaacagggaccagctctccgctttgcccccacggggttcctctaaccagaaccagcttcctagcctcgtagagaccaaaggccgcccccgcctgctggggttcctcccagcaccccagcttgctggctgccctctttgccttctggcctccagctgggtgtgggggggcggagcaaggcgggggacagacgcagcaccttcttagcgatctaggcctggcaagagctctggccccaaggcctcctcttcccaggggctgccaagtcctggccctggccctggcatatcaccccgcactgtggggccaggcaccactagcctggctcaaatattccccagggagactgctgtgtgctgcccgcctgcctgctggctctcccccagccccacatcccctctggaagagaatgtaaaataaacctggacacaaggga

SEQ ID NO: 406768 - DNA, 2614 bp, Homo sapiens
cgggggaacctggatgggcacagtgaagccaggccttggagggcgggagaagatgggagaggaaatggggaaccccattggtgctgtaacagagacacaacttggcagaaactggcaggactgcggaatcgcgggatcaggaagcgcgtaggcactcccggggcgtgctgggcaggtgctgctggagagagagctggccgagctgagcgccgagctggacaaggacctgcgggcaattgagacccgactgccgtcccccaagagctcgccggcgccccgacgggccccggagcagcggcccccggccgggtgagtgggagacgcgggaggaggaagggggctgtcccaggccgggcgggagggaacgtggcgcggccgggcggggcggacgggggcgatcgcggggcccagccgggggaggaaggaaccgcagagccgtgtccgggagggaccgcagcgccactctctgcggggcgccgttcccgcgccaccgagggcagctaactcctagcagaggaccggggtcgcggccgccgggggcgcagcgcggttagggcggccccgccacggcccaggcactcccgctgggccctgccgggcctcacccttccccgcgcagcgactcgggaagtaggacatcctgtggagagcccaggacccgggagacgccctgggaggaggtggcagggatgggggcgatggggggtcagagcggtctaggggtgaccagggtggggtgcggagccccaggctggaggctcagtctctgtgccccgtgcagcccggcctcagcctggagctccagctacccacatgcaccttacctgggttccgcccggtccctgagtccccacaaaatggctgatggaggaagccccttcctaggtcggagggactttgtctacccttcctcaacccgagaccctagtgcctctaacggagggggcagcccagccaggagggaagagaagaagagaaaggccgccaggctcaagtttgacttccaggcgcagtcccccaaggagctgactctgcagaagggtgacattgtctacatccacaaggaggtggacaagaactggctggagggagagcaccacggccgcctgggcatcttccctgctaattatgtggaggtgctgcccgcagatgagatccctaagcccatcaagcccccgacctaccaggtgctggagtatggagaggctgtggcccagtacaccttcaagggggacctggaggtggagctgtccttccgcaagggagagcacatctgcctgatccgcaaggtgaacgagaactggtacgagggacgcatcacgggcacggggcgccaaggcatattccctgccagctacgtgcaggtgtctcgtgaaccccggctccggctctgtgacgacggcccccagctccccacgtctccccgcctgaccgctgccgcccgctcagcccgtcaccccagctccccctcagccctgcgcagcccagctgaccccaccgacttggggggacagacctccccccgtcgcactggcttctccttccccacccaggagcctagaccccagacccagaatcttggcacccctggtccagctctgtcccactctcgaggtcccagccatcccctggacctggggacctcctctcctaacacctctcagatacactggaccccgtaccgggcgatgtaccagtacaggccccagaacgaagacgagctggagctgcgcgagggggacagggtggatgtcatgcagcagtgtgacgatggctggtttgtgggtgtctcccggaggacccagaaattcggaacgttccctggaaattacgttgccccggtgtgagtggtctccatggcaacttggagccagccaggatggggtggggagcggtggcactcgtgggagggagaggacccccgcccacatcctccttccccaggacctgagctcccagcatctgcagacgacccccgcagcctttccctcggacccccctcgaagccccctggactgattcccacccacgactcacaggcattcctcccacagccctttcatttcctccccaccccactccccaaatacagaggtctgctttgaagcggagaccatttccaggccttattgagaccagaccccaagtcccccacccccatcctgctccagcgtttcctctaacagggaccagctctccgctttgcccccacggggttcctctaaccagaaccagcttcctagcctcgtagagaccaaaggccgcccccgcctgctggggttcctcccagcaccccagcttgctggctgccctctttgccttctggcctccagctgggtgtgggggggcggagcaaggcgggggacagacgcagcaccttcttagcgatctaggcctggcaagagctctggccccaaggcctcctcttcccaggggctgccaagtcctggccctggccctggcatatcaccccgcactgtggggccaggcaccactagcctggctcaaatattccccagggagactgctgtgtgctgcccgcctgcctgctggctctcccccagccccacatcccctctggaagagaatgtaaaataaacctggacacaaggga

SEQ ID NO: 406769 - DNA, 2114 bp, Homo sapiens
ctggacccttgagaagctccgagggcctgattcggcgaagacccatagcagaggctggcaggaagcagcgtggggtcgatctttgaccgctgcctcccacccccacggtgcgctgcccctcactgcccagcctctccccgcccccaggtgctgctggagagagagctggccgagctgagcgccgagctggacaaggacctgcgggcaattgagacccgactgccgtcccccaagagctcgccggcgccccgacgggccccggagcagcggcccccggccggcccggcctcagcctggagctccagctacccacatgcaccttacctgggttccgcccggtccctgagtccccacaaaatggctgatggaggaagccccttcctaggtcggagggactttgtctacccttcctcaacccgagaccctagtgcctctaacggagggggcagcccagccaggagggaagagaagaagagaaaggccgccaggctcaagtttgacttccaggcgcagtcccccaaggagctgactctgcagaagggtgacattgtctacatccacaaggaggtggacaagaactggctggagggagagcaccacggccgcctgggcatcttccctgctaattatgtggaggtgctgcccgcagatgagatccctaagcccatcaagcccccgacctaccaggtgctggagtatggagaggctgtggcccagtacaccttcaagggggacctggaggtggagctgtccttccgcaagggagagcacatctgcctgatccgcaaggtgaacgagaactggtacgagggacgcatcacgggcacggggcgccaaggcatattccctgccagctacgtgcaggtgtctcgtgaaccccggctccggctctgtgacgacggcccccagctccccacgtctccccgcctgaccgctgccgcccgctcagcccgtcaccccagctccccctcagccctgcgcagcccagctgaccccaccgacttggggggacagacctccccccgtcgcactggcttctccttccccacccaggagcctagaccccagacccagaatcttggcacccctggtccagctctgtcccactctcgaggtcccagccatcccctggacctggggacctcctctcctaacacctctcagatacactggaccccgtaccgggcgatgtaccagtacaggccccagaacgaagacgagctggagctgcgcgagggggacagggtggatgtcatgcagcagtgtgacgatggctggtttgtgggtgtctcccggaggacccagaaattcggaacgttccctggaaattacgttgccccggtgtgagtggtctccatggcaacttggagccagccaggatggggtggggagcggtggcactcgtgggagggagaggacccccgcccacatcctccttccccaggacctgagctcccagcatctgcagacgacccccgcagcctttccctcggacccccctcgaagccccctggactgattcccacccacgactcacaggcattcctcccacagccctttcatttcctccccaccccactccccaaatacagaggtctgctttgaagcggagaccatttccaggccttattgagaccagaccccaagtcccccacccccatcctgctccagcgtttcctctaacagggaccagctctccgctttgcccccacggggttcctctaaccagaaccagcttcctagcctcgtagagaccaaaggccgcccccgcctgctggggttcctcccagcaccccagcttgctggctgccctctttgccttctggcctccagctgggtgtgggggggcggagcaaggcgggggacagacgcagcaccttcttagcgatctaggcctggcaagagctctggccccaaggcctcctcttcccaggggctgccaagtcctggccctggccctggcatatcaccccgcactgtggggccaggcaccactagcctggctcaaatattccccagggagactgctgtgtgctgcccgcctgcctgctggctctcccccagccccacatcccctctggaagagaatgtaaaataaacctggacacaaggga

SEQ ID NO: 406770 - DNA, 947 bp, Homo sapiens
ctgcccacgaagtggcggtgcacgatggctggtttgtggacaagaagaaaaagtaccacttttgtattaggagccacaagcgctttgagaggaatgggcgagacctgtgccctttccggtgtctcccggaggacccagaaattcggaacgttccctggaaattacgttgccccggtgtgagtggtctccatggcaacttggagccagccaggatggggtggggagcggtggcactcgtgggagggagaggacccccgcccacatcctccttccccaggacctgagctcccagcatctgcagacgacccccgcagcctttccctcggacccccctcgaagccccctggactgattcccacccacgactcacaggcattcctcccacagccctttcatttcctccccaccccactccccaaatacagaggtctgctttgaagcggagaccatttccaggccttattgagaccagaccccaagtcccccacccccatcctgctccagcgtttcctctaacagggaccagctctccgctttgcccccacggggttcctctaaccagaaccagcttcctagcctcgtagagaccaaaggccgcccccgcctgctggggttcctcccagcaccccagcttgctggctgccctctttgccttctggcctccagctgggtgtgggggggcggagcaaggcgggggacagacgcagcaccttcttagcgatctaggcctggcaagagctctggccccaaggcctcctcttcccaggggctgccaagtcctggccctggccctggcatatcaccccgcactgtggggccaggcaccactagcctggctcaaatattccccagggagactgctgtgtgctgcccgcctgcctgctggctctcccccagccccacatcccctctggaagagaatgtaaaataaacctggacacaaggga

SEQ ID NO: 406771 - DNA, 898 bp, Homo sapiens
ctcccagcaccccagcttgctggctgccctctttgcccacccaggagcctagaccccagaatcttggcacccctggtccagctctgtcccactctcgaggtcccagccatcccctggacctggggacctcctctcctaacacctctcagatacactggaccccgtaccgggcgatgtaccagtacaggccccagaacgaagacgagctggagctgcgcgagggggacagggtggatgtcatgcagcagtgtgacgatggctggtttgtgggtgtctcccggaggacccagaaattcggaacgttccctggaaattacgttgccccggtgtgagtggtctccatggcaacttggagccacccactccccaaatacagaggtctgctttgaagcggagaccatttccaggccttattgagaccagaccccaagtcccccacccccatcctgctccagcgtttcctctaacagggaccagctctccgctttgcccccacggggttcctctaaccagaaccagcttcctagcctcgtagagaccaaaggccgcccccgcctgctggggttcctcccagcaccccagcttgctggctgccctctttgccttctggcctccagctgggtgtgggggggcggagcaaggcgggggacagacgcagcaccttcttagcgatctaggcctggcaagagctctggccccaaggcctcctcttcccaggggctgccaagtcctggccctggccctggcatatcaccccgcactgtggggccaggcaccactagcctggctcaaatattccccagggagactgctgtgtgctgcccgcctgcctgctggctctcccccagccccacatcccctctggaagagaatgtaaaataaacctggacacaaggga

SEQ ID NO: 406772 - DNA, 4745 bp, Homo sapiens
gggaagggtcgggggcgaggccgcgtcgccgcctccccgaagccttttcctgttgggggggagggcccgccagtgacggccgggcctgtcacgtgggcctgacagctggggagggggtggccggcgacaatgtggtcccgaagcggccagcgccgggagctgcagcgctgagacccccagcccgccccctcgggctcccggccggggccccatcatgttctccaggaagaaacgagagctcatgaaaaccccttccatctcgaaaaagaaccgcgcgggaagccccagcccgcagccctcgggggagctgcccaggaaggatggggctgacgcggtgttccccggaccaagcctggagccgcccgctgggtcctccggcgtcaaggccacagggaccctcaagcggcccaccagcctgagccgccacgccagcgcggctggcttccccctgtcgggtgctgcctcctggacactgggccggagccaccggagcccactgacagccgccagcccgggcgagctgcccaccgagggtgccggcccggacgtcgtcgaggacatctcccatctgctggcggacgtggcccgcttcgctgagggccttgagaaacttaaggagtgtgtgttgcgtgacgacctccttgaggcccgccgcccgcgggcccacgagtgcctgggtgaggctctgcgtgtcatgcatcagatcatctccaagtacccgctgctgaacaccgtggagacgctcaccgcagccggcaccctcattgccaaggtcaaagccttccattatgagagcaacaatgatctggagaaacaggagttcgagaaggccctggagacgattgctgtggccttcagtagcacagtgtccgagttcctcatgggtgaagtggacagcagcaccctcctagcagtgcctcctggggactcgagccagtccatggaaagcctgtatggaccgggcagtgagggcacgcctcccagcctggatgactgtgacgccggctgcctgcccgccgaggaggtggacgtgctgctacagcgctgtgaggggggcgtggatgccgcactgctgtatgccaagaacatggccaagtacatgaaggacctcatcagctacctggagaagcggacgacgctggagatggagtttgccaagggcctgcagaagatcgctcacaactgcagacagagcgtcatgcaggagccccacatgccgctcctgtccatctactcgctggccctggagcaggacctggagttcggccacagcatggtgcaggcggtgggcaccttgcagacccagaccttcatgcagcccctgaccctgcggcggcttgaacacgagaagcgcaggaaggagatcaaggaggcctggcaccgtgcccagaggaagctgcaagaggcggagtccaacctgcgcaaggccaagcagggttacgtgcagcgctgcgaggaccacgacaaggctcgcttcctcgtggccaaggcggaggaggagcaggctggcagcgcgccgggagcaggcggcacggccaccaagaccctggacaagcggcggcggctggaggaggaggccaagaacaaggcggaggaagctatggccacctaccgcacctgcgtggccgacgcgaagacgcagaagcaggagctggaggataccaaggtgacggcgctgcggcagatccaggaggtcatccggcagagcgaccaaaccatcaagtcggccacgatctcctactaccagatgatgcatatgcagacggcgccgctgcccgtgcacttccagatgctgtgtgagagcagcaagctgtatgacccaggccagcagtacgcctcccacgtgcgccagctgcagcgggaccaggagcccgatgtgcactacgactttgagccccacgtctccgccaacgcctggtcccccgtcatgcgtgcccggaagagcagcttcaacgtgagtgatgtggcgcggccggaggctgccgggagccccccagaagaaggcgggtgcactgagggcacacctgccaaggaccacagggccgggcgaggacaccaggttcacaagtcatggccgctctcgatctcagactcggacagtgggctggaccccggccctggcgcaggggactttaagaagttcgagcggacgtcatccagtggtaccatgtcgtccacggaggagctggtggacccagacggtggagccggggcttcagcctttgagcaggctgacctcaacggcatgacccccgagctgccggtggccgtgcccagtggaccgttccgccacgaggggctgtccaaggcggcccgtactcaccggctccggaagctccgcacgcccgccaagtgccgcgagtgcaacagctacgtctacttccagggtgctgagtgtgaagagtgctgcctggcctgccacaagaaatgtctggagacgctggccatacagtgcgggcacaagaagctgcaaggccgcctgcagctgttcggccaggacttcagccacgcggcccgcagcgcccccgacggcgtgcccttcatcgtcaagaagtgcgtctgcgagatcgagcggcgggcgctgcgcaccaagggcatctaccgggtcaatggggtaaagacacgcgtggagaagctgtgccaggccttcgagaacggcaaggagctggtcgagctgtcgcaggcctcgccccacgacatcagcaacgtcctcaagctctacctgcgtcagcttcccgagccgctcatctccttccgcctctaccacgagctcgtagggctggccaaggacagcctgaaggcagaggccgaggccaaggcggcgtcccggggccggcaggacggctcggagagcgaggcagtggcggtggccctggcaggtcggctgcgggagctcctgcgggacctgccgcctgagaaccgggcctcgctgcagtacctgctgcgtcacctacgcaggatcgtggaggtggagcaggacaacaagatgacccccgggaacctgggcatcgtgttcgggcccacgctgcttcggccacggcccaccgaggccaccgtgtccctctcctccctggtggattatccccatcaggcccgcgtcatcgagactctcatcgtccactacggcctggtcttcgaggaggagccggaggagacccccgggggccaggacgagtcatccaaccagcgagctgaggtagtcgtccaggtgccgtacctggaggcgggcgaggcggtggtctacccgctgcaggaggcggcggcggacgggtgcagagaatcccgagttgtgtccaacgattcggactcggacctagaggaggcctccgagctgctgtcctcatcggaggccagtgccctgggccacctcagcttcctggagcagcagcagagcgaggccagcctagaggtggcttctggcagccacagcggcagtgaggagcagctggaggccacagcccgggaggacggggacggggacgaggacggcccggcccagcagctctcaggattcaacaccaaccagtccaacaacgtgctgcaggccccactgccccccatgaggctccgtggcgggcggatgacgctgggctcctgcagggaaaggcagccggaattcgtgtgagctggggtggggctgggaccacaggtggcttctctcttgcctgctcctgtccctccagcacgtcccctgcaccacggcatagcttaggtgcgccgtcctggggtcgctgccgagagcgcctggacttcgacgtcccaccagcgggcgcctcctcccagaggcttccaggagcacgagggccttgcggcacaggactgtgccctgtgctgtcccctgcaccccggctcagctgagctggggaacactgctgtcgtgtgaagtcacagtggccttgttggtgcccacagggctgtgtggatggaggaagctgtccctgcccagtgcatcccccaggtcatcacggggacgcaggaggcaggccctgccctgccctctcctcacaggtctgttgcagggactccagaaaccattctgggagccgtggatgggggcggagctggggtttggtgcagtttccagggtgcagtacagcagggcctgaatactggccctggactcccttttccagaacaccaggtgtggccacctggggctcaggtacacagtggggtctctcggaagccaccgtgtggttctttcacaggcacgtttattttgctgaaataaaaagtttttaatcgggcggaaaaaaaaaaaaaaaaaaaaaaaaaaaaaaaaaaaaaaaaaaaaaaaagggggggcgcggcgccctaaaaatactccccccggggggcccccattttccgctcccccccattttttttttcaaggggggcccccatagagggggggccgaattattataagacgcaggcagcgcgcgggcggagcgcgtgtgttaaacacgcgtggtgggagagtgtcgggaaaaagactcttgttccagccgtgggggacccttggtgaggaggggaaacccacatatgtcgtggggggcgggagacacttggtgtgggaacaacaatcccgagagggaaaatttaaacgccctcaggggggacaatttaacaaatgtttgaagggtttagtactggggttaaaaccaaggcggcataatttgggcgcggccttaaaaaagttttgtgtgcgcggggaataatattataagacaatttttttcgcggggctgtgtataaatata

SEQ ID NO: 406773 - DNA, 4230 bp, Homo sapiens
aggtaaccaggtgtcctcagcatattctgccgatggtggggtccacaccacactttggggacccctgtgcaggcagcccaggaccaggtggacgtggggacccagacggacgtggggaccacctccttgaggcccgccgcccgcgggcccacgagtgcctgggtgaggctctgcgtgtcatgcatcagatcatctccaagtacccgctgctgaacaccgtggagacgctcaccgcagccggcaccctcattgccaaggtcaaagccttccattatgagagcaacaatgatctggagaaacaggagttcgagaaggccctggagacgattgctgtggccttcagtagcacagtgtccgagttcctcatgggtgaagtggacagcagcaccctcctagcagtgcctcctggggactcgagccagtccatggaaagcctgtatggaccgggcagtgagggcacgcctcccagcctggatgactgtgacgccggctgcctgcccgccgaggaggtggacgtgctgctacagcgctgtgaggggggcgtggatgccgcactgctgtatgccaagaacatggccaagtacatgaaggacctcatcagctacctggagaagcggacgacgctggagatggagtttgccaagggcctgcagaagatcgctcacaactgcagacagagcgtcatgcaggagccccacatgccgctcctgtccatctactcgctggccctggagcaggacctggagttcggccacagcatggtgcaggcggtgggcaccttgcagacccagaccttcatgcagcccctgaccctgcggcggcttgaacacgagaagcgcaggaaggagatcaaggaggcctggcaccgtgcccagaggaagctgcaagaggcggagtccaacctgcgcaaggccaagcagggttacgtgcagcgctgcgaggaccacgacaaggctcgcttcctcgtggccaaggcggaggaggagcaggctggcagcgcgccgggagcaggcggcacggccaccaagaccctggacaagcggcggcggctggaggaggaggccaagaacaaggcggaggaagctatggccacctaccgcacctgcgtggccgacgcgaagacgcagaagcaggagctggaggataccaaggtgacggcgctgcggcagatccaggaggtcatccggcagagcgaccaaaccatcaagtcggccacgatctcctactaccagatgatgcatatgcagacggcgccgctgcccgtgcacttccagatgctgtgtgagagcagcaagctgtatgacccaggccagcagtacgcctcccacgtgcgccagctgcagcgggaccaggagcccgatgtgcactacgactttgagccccacgtctccgccaacgcctggtcccccgtcatgcgtgcccggaagagcagcttcaacgtgagtgatgtggcgcggccggaggctgccgggagccccccagaagaaggcgggtgcactgagggcacacctgccaaggaccacagggccgggcgaggacaccaggttcacaagtcatggccgctctcgatctcagactcggacagtgggctggaccccggccctggcgcaggggactttaagaagttcgagcggacgtcatccagtggtaccatgtcgtccacggaggagctggtggacccagacggtggagccggggcttcagcctttgagcaggctgacctcaacggcatgacccccgagctgccggtggccgtgcccagtggaccgttccgccacgaggggctgtccaaggcggcccgtactcaccggctccggaagctccgcacgcccgccaagtgccgcgagtgcaacagctacgtctacttccagggtgctgagtgtgaagagtgctgcctggcctgccacaagaaatgtctggagacgctggccatacagtgcgggcacaagaagctgcaaggccgcctgcagctgttcggccaggacttcagccacgcggcccgcagcgcccccgacggcgtgcccttcatcgtcaagaagtgcgtctgcgagatcgagcggcgggcgctgcgcaccaagggcatctaccgggtcaatggggtaaagacacgcgtggagaagctgtgccaggccttcgagaacggcaaggagctggtcgagctgtcgcaggcctcgccccacgacatcagcaacgtcctcaagctctacctgcgtcagcttcccgagccgctcatctccttccgcctctaccacgagctcgtagggctggccaaggacagcctgaaggcagaggccgaggccaaggcggcgtcccggggccggcaggacggctcggagagcgaggcagtggcggtggccctggcaggtcggctgcgggagctcctgcgggacctgccgcctgagaaccgggcctcgctgcagtacctgctgcgtcacctacgcaggatcgtggaggtggagcaggacaacaagatgacccccgggaacctgggcatcgtgttcgggcccacgctgcttcggccacggcccaccgaggccaccgtgtccctctcctccctggtggattatccccatcaggcccgcgtcatcgagactctcatcgtccactacggcctggtcttcgaggaggagccggaggagacccccgggggccaggacgagtcatccaaccagcgagctgaggtagtcgtccaggtgccgtacctggaggcgggcgaggcggtggtctacccgctgcaggaggcggcggcggacgggtgcagagaatcccgagttgtgtccaacgattcggactcggacctagaggaggcctccgagctgctgtcctcatcggaggccagtgccctgggccacctcagcttcctggagcagcagcagagcgaggccagcctagaggtggcttctggcagccacagcggcagtgaggagcagctggaggccacagcccgggaggacggggacggggacgaggacggcccggcccagcagctctcaggattcaacaccaaccagtccaacaacgtgctgcaggccccactgccccccatgaggctccgtggcgggcggatgacgctgggctcctgcagggaaaggcagccggaattcgtgtgagctggggtggggctgggaccacaggtggcttctctcttgcctgctcctgtccctccagcacgtcccctgcaccacggcatagcttaggtgcgccgtcctggggtcgctgccgagagcgcctggacttcgacgtcccaccagcgggcgcctcctcccagaggcttccaggagcacgagggccttgcggcacaggactgtgccctgtgctgtcccctgcaccccggctcagctgagctggggaacactgctgtcgtgtgaagtcacagtggccttgttggtgcccacagggctgtgtggatggaggaagctgtccctgcccagtgcatcccccaggtcatcacggggacgcaggaggcaggccctgccctgccctctcctcacaggtctgttgcagggactccagaaaccattctgggagccgtggatgggggcggagctggggtttggtgcagtttccagggtgcagtacagcagggcctgaatactggccctggactcccttttccagaacaccaggtgtggccacctggggctcaggtacacagtggggtctctcggaagccaccgtgtggttctttcacaggcacgtttattttgctgaaataaaaagtttttaatcgggcggaaaaaaaaaaaaaaaaaaaaaaaaaaaaaaaaaaaaaaaaaaaaaaaagggggggcgcggcgccctaaaaatactccccccggggggcccccattttccgctcccccccattttttttttcaaggggggcccccatagagggggggccgaattattataagacgcaggcagcgcgcgggcggagcgcgtgtgttaaacacgcgtggtgggagagtgtcgggaaaaagactcttgttccagccgtgggggacccttggtgaggaggggaaacccacatatgtcgtggggggcgggagacacttggtgtgggaacaacaatcccgagagggaaaatttaaacgccctcaggggggacaatttaacaaatgtttgaagggtttagtactggggttaaaaccaaggcggcataatttgggcgcggccttaaaaaagttttgtgtgcgcggggaataatattataagacaatttttttcgcggggctgtgtataaatata

SEQ ID NO: 406774 - DNA, 4612 bp, Homo sapiens
gggaagggtcgggggcgaggccgcgtcgccgcctccccgaagccttttcctgttgggggggagggcccgccagtgacggccgggcctgtcacgtgggcctgacagctggggagggggtggccggcgacaatgtggtcccgaagcggccagcgccgggagctgcagcgctgagacccccagcccgccccctcgggctcccggccggggccccatcatgttctccaggaagaaacgagagctcatgaaaaccccttccatctcgaaaaagaaccgcgcgggaagccccagcccgcagccctcgggggagctgcccaggaaggatggggctgacgcggtgttccccggaccaagcctggagccgcccgctgggtcctccggcgtcaaggccacagggaccctcaagcggcccaccagcctgagccgccacgccagcgcggctggcttccccctgtcgggtgctgcctcctggacactgggccggagccaccggagcccactgacagccgccagcccgggcgagctgcccaccgagggtgccggcccggacgtcgtcgaggacatctcccatctgctggcggacgtggcccgcttcgctgagggccttgagaaacttaaggagtgtgtgttgcgtgacgacctccttgaggcccgccgcccgcgggcccacgagtgcctgggtgaggctctgcgtgtcatgcatcagatcatctccaagtacccgctgctgaacaccgtggagacgctcaccgcagccggcaccctcattgccaaggtcaaagccttccattatgagagcaacaatgatctggagaaacaggagttcgagaaggccctggagacgattgctgtggccttcagtagcacagtgtccgagttcctcatgggtgaagtggacagcagcaccctcctagcagtgcctcctggggactcgagccagtccatggaaagcctgtatggaccgggcagtgagggcacgcctcccagcctggatgactgtgacgccggctgcctgcccgccgaggaggtggacgtgctgctacagcgctgtgaggggggcgtggatgccgcactgctgtatgccaagaacatggccaagtacatgaaggacctcatcagctacctggagaagcggacgacgctggagatggagtttgccaagggcctgcagaagatcgctcacaactgcagacagagcgtcatgcaggagccccacatgccgctcctgtccatctactcgctggccctggagcaggacctggagttcggccacagcatggtgcaggcggtgggcaccttgcagacccagaccttcatgcagcccctgaccctgcggcggcttgaacacgagaagcgcaggaaggagatcaaggaggcctggcaccgtgcccagaggaagctgcaagaggcggagtccaacctgcgcaaggccaagcagggttacgtgcagcgctgcgaggaccacgacaaggctcgcttcctcgtggccaaggcggaggaggagcaggctggcagcgcgccgggagcaggcggcacggccaccaagaccctggacaagcggcggcggctggaggaggaggccaagaacaaggcggaggaagctatggccacctaccgcacctgcgtggccgacgcgaagacgcagaagcaggagctggaggataccaaggtgacggcgctgcggcagatccaggaggtcatccggcagagcgaccaaaccatcaagtcggccacgatctcctactaccagatgatgcatatgcagacggcgccgctgcccgtgcacttccagatgctgtgtgagagcagcaagctgtatgacccaggccagcagtacgcctcccacgtgcgccagctgcagcgggaccaggagcccgatgtgcactacgactttgagccccacgtctccgccaacgcctggtcccccgtcatgcgtgcccggaagagcagcttcaacgtgagtgatgtggcgcggccggaggctgccgggagccccccagaagaaggcgggtgcactgagggcacacctgccaaggaccacagggccgggcgaggacaccaggttcacaagtcatggccgctctcgatctcagactcggacagtgggctggaccccggccctggcgcaggggactttaagaagttcgagcggacgtcatccagtggtaccatgtcgtccacggaggagctggtggacccagacggtggagccggggcttcagcctttgagcaggctgacctcaacggcatgacccccgagctgccggtggccgtgcccagtggaccgttccgccacgaggggctgtccaaggcggcccgtactcaccggctccggaagctccgcacgcccgccaagtgccgcgagtgcaacagctacgtctacttccagggtgctgagtgtgaagagtgctgcctggcctgccacaagaaatgtctggagacgctggccatacagtgcgggcacaagaagctgcaaggccgcctgcagctgttcggccaggacttcagccacgcggcccgcagcgcccccgacggcgtgcccttcatcgtcaagaagtgcgtctgcgagatcgagcggcgggcgctgcgcaccaagggcatctaccgggtcaatggggtaaagacacgcgtggagaagctgtgccaggccttcgagaacggcaaggagctggtcgagctgtcgcaggcctcgccccacgacatcagcaacgtcctcaagctctacctgcgtcagcttcccgagccgctcatctccttccgcctctaccacgagctcgtagggctggccaaggacagcctgaaggcagaggccgaggccaaggcggcgtcccggggccggcaggacggctcggagagcgaggcagtggcggtggccctggcaggtcggctgcgggagctcctgcgggacctgccgcctgagaaccgggcctcgctgcagtacctgctgcgtcacctacgcaggcccgcgtcatcgagactctcatcgtccactacggcctggtcttcgaggaggagccggaggagacccccgggggccaggacgagtcatccaaccagcgagctgaggtagtcgtccaggtgccgtacctggaggcgggcgaggcggtggtctacccgctgcaggaggcggcggcggacgggtgcagagaatcccgagttgtgtccaacgattcggactcggacctagaggaggcctccgagctgctgtcctcatcggaggccagtgccctgggccacctcagcttcctggagcagcagcagagcgaggccagcctagaggtggcttctggcagccacagcggcagtgaggagcagctggaggccacagcccgggaggacggggacggggacgaggacggcccggcccagcagctctcaggattcaacaccaaccagtccaacaacgtgctgcaggccccactgccccccatgaggctccgtggcgggcggatgacgctgggctcctgcagggaaaggcagccggaattcgtgtgagctggggtggggctgggaccacaggtggcttctctcttgcctgctcctgtccctccagcacgtcccctgcaccacggcatagcttaggtgcgccgtcctggggtcgctgccgagagcgcctggacttcgacgtcccaccagcgggcgcctcctcccagaggcttccaggagcacgagggccttgcggcacaggactgtgccctgtgctgtcccctgcaccccggctcagctgagctggggaacactgctgtcgtgtgaagtcacagtggccttgttggtgcccacagggctgtgtggatggaggaagctgtccctgcccagtgcatcccccaggtcatcacggggacgcaggaggcaggccctgccctgccctctcctcacaggtctgttgcagggactccagaaaccattctgggagccgtggatgggggcggagctggggtttggtgcagtttccagggtgcagtacagcagggcctgaatactggccctggactcccttttccagaacaccaggtgtggccacctggggctcaggtacacagtggggtctctcggaagccaccgtgtggttctttcacaggcacgtttattttgctgaaataaaaagtttttaatcgggcggaaaaaaaaaaaaaaaaaaaaaaaaaaaaaaaaaaaaaaaaaaaaaaaagggggggcgcggcgccctaaaaatactccccccggggggcccccattttccgctcccccccattttttttttcaaggggggcccccatagagggggggccgaattattataagacgcaggcagcgcgcgggcggagcgcgtgtgttaaacacgcgtggtgggagagtgtcgggaaaaagactcttgttccagccgtgggggacccttggtgaggaggggaaacccacatatgtcgtggggggcgggagacacttggtgtgggaacaacaatcccgagagggaaaatttaaacgccctcaggggggacaatttaacaaatgtttgaagggtttagtactggggttaaaaccaaggcggcataatttgggcgcggccttaaaaaagttttgtgtgcgcggggaataatattataagacaatttttttcgcggggctgtgtataaatata

SEQ ID NO: 406775 - DNA, 3251 bp, Homo sapiens
gggaagggtcgggggcgaggccgcgtcgccgcctccccgaagccttttcctgttgggggggagggcccgccagtgacggccgggcctgtcacgtgggcctgacagctggggagggggtggccggcgacaatgtggtcccgaagcggccagcgccgggagctgcagcgctgagacccccagcccgccccctcgggctcccggccggggccccatcatgttctccaggaagaaacgagagctcatgaaaaccccttccatctcgaaaaagaaccgcgcgggaagccccagcccgcagccctcgggggagctgcccaggaaggatggggctgacgcggtgttccccggaccaagcctggagccgcccgctgggtcctccggcgtcaaggccacagggaccctcaagcggcccaccagcctgagccgccacgccagcgcggctggcttccccctgtcgggtgctgcctcctggacactgggccggagccaccggagcccactgacagccgccagcccgggcgagctgcccaccgagggtgccggcccggacgtcgtcgaggacatctcccatctgctggcggacgtggcccgcttcgctgagggccttgagaaacttaaggagtgtgtgttgcgtgacgacctccttgaggcccgccgcccgcgggcccacgagtgcctgggtgaggctctgcgtgtcatgcatcagatcatctccaagtacccgctgctgaacaccgtggagacgctcaccgcagccggcaccctcattgccaaggtcaaagccttccattatgagagcaacaatgatctggagaaacaggagttcgagaaggccctggagacgattgctgtggccttcagtagcacagtgtccgagttcctcatgggtgaagtggacagcagcaccctcctagcagtgcctcctggggactcgagccagtccatggaaagcctgtatggaccgggcagtgagggcacgcctcccagcctggatgactgtgacgccggctgcctgcccgccgaggaggtggacgtgctgctacagcgctgtgaggggggcgtggatgccgcactgctgtatgccaagaacatggccaagtacatgaaggacctcatcagctacctggagaagcggacgacgctggagatggagtttgccaagggcctgcagaagatcgctcacaactgcagacagagcgtcatgcaggagccccacatgccgctcctgtccatctactcgctggccctggagcaggacctggagttcggccacagcatggtgcaggcggtgggcaccttgcagacccagaccttcatgcagcccctgaccctgcggcggcttgaacacgagaagcgcaggaaggagatcaaggaggcctggcaccgtgcccagaggaagctgctcctgcgggacctgccgcctgagaaccgggcctcgctgcagtacctgctgcgtcacctacgcaggatcgtggaggtggagcaggacaacaagatgacccccgggaacctgggcatcgtgttcgggcccacgctgcttcggccacggcccaccgaggccaccgtgtccctctcctccctggtggattatccccatcaggcccgcgtcatcgagactctcatcgtccactacggcctggtcttcgaggaggagccggaggagacccccgggggccaggacgagtcatccaaccagcgagctgaggtagtcgtccaggtgccgtacctggaggcgggcgaggcggtggtctacccgctgcaggaggcggcggcggacgggtgcagagaatcccgagttgtgtccaacgattcggactcggacctagaggaggcctccgagctgctgtcctcatcggaggccagtgccctgggccacctcagcttcctggagcagcagcagagcgaggccagcctagaggtggcttctggcagccacagcggcagtgaggagcagctggaggccacagcccgggaggacggggacggggacgaggacggcccggcccagcagctctcaggattcaacaccaaccagtccaacaacgtgctgcaggccccactgccccccatgaggctccgtggcgggcggatgacgctgggctcctgcagggaaaggcagccggaattcgtgtgagctggggtggggctgggaccacaggtggcttctctcttgcctgctcctgtccctccagcacgtcccctgcaccacggcatagcttaggtgcgccgtcctggggtcgctgccgagagcgcctggacttcgacgtcccaccagcgggcgcctcctcccagaggcttccaggagcacgagggccttgcggcacaggactgtgccctgtgctgtcccctgcaccccggctcagctgagctggggaacactgctgtcgtgtgaagtcacagtggccttgttggtgcccacagggctgtgtggatggaggaagctgtccctgcccagtgcatcccccaggtcatcacggggacgcaggaggcaggccctgccctgccctctcctcacaggtctgttgcagggactccagaaaccattctgggagccgtggatgggggcggagctggggtttggtgcagtttccagggtgcagtacagcagggcctgaatactggccctggactcccttttccagaacaccaggtgtggccacctggggctcaggtacacagtggggtctctcggaagccaccgtgtggttctttcacaggcacgtttattttgctgaaataaaaagtttttaatcgggcggaaaaaaaaaaaaaaaaaaaaaaaaaaaaaaaaaaaaaaaaaaaaaaaagggggggcgcggcgccctaaaaatactccccccggggggcccccattttccgctcccccccattttttttttcaaggggggcccccatagagggggggccgaattattataagacgcaggcagcgcgcgggcggagcgcgtgtgttaaacacgcgtggtgggagagtgtcgggaaaaagactcttgttccagccgtgggggacccttggtgaggaggggaaacccacatatgtcgtggggggcgggagacacttggtgtgggaacaacaatcccgagagggaaaatttaaacgccctcaggggggacaatttaacaaatgtttgaagggtttagtactggggttaaaaccaaggcggcataatttgggcgcggccttaaaaaagttttgtgtgcgcggggaataatattataagacaatttttttcgcggggctgtgtataaatata

SEQ ID NO: 406776 - DNA, 2505 bp, Homo sapiens
gggaagggtcgggggcgaggccgcgtcgccgcctccccgaagccttttcctgttgggggggagggcccgccagtgacggccgggcctgtcacgtgggcctgacagctggggagggggtggccggcgacaatgtggtcccgaagcggccagcgccgggagctgcagcgctgagacccccagcccgccccctcgggctcccggccggggccccatcatgttctccaggaagaaacgagagctcatgaaaaccccttccatctcgaaaaagaaccgcgcgggaagccccagcccgcagccctcgggggagctgcccaggaaggatggggctgacgcggtgttccccggaccaagcctggagccgcccgctgggtcctccggcgtcaaggccacagggaccctcaagcggcccaccagcctgagccgccacgccagcgcggctggcttccccctgtcgggtgctgcctcctggacactgggccggagccaccggagcccactgacagccgccagcccgggcgagctgcccaccgagggtgccggcccggacgtcgtcgaggacatctcccatctgctggcggacgtggcccgcttcgctgagggccttgagaaacttaaggagtgtgtgttgcgtgacgacctccttgaggcccgccgcccgcgggcccacgagtgcctgggtgaggctctgcgtgtcatgcatcagatcatctccaagtacccgctgctgaacaccgtggagacgctcaccgcagccggcaccctcattgccaaggtcaaagccttccattatgagagcaacaatgatctggagaaacaggagttcgagaaggccctggagacgattgctgtggccttcagtagcacagtgtccgagttcctcatgggtgaagtggacagcagcaccctcctagcagtgcctcctggggactcgagccagtccatggaaagcctgtatggaccgggcagtgagggcacgcctcccagcctggatgactgtgacgccggctgcctgcccgccgaggaggtggacgtgctgctacagcgctgtgaggggggcgtggatgccgcactgctgtatgccaagaacatggccaagtacatgaaggacctcatcagctacctggagaagcggacgacgctggagatggagtttgccaagggcctgcagaagatcgctcacaactgcagacagagcgtcatgcaggagccccacatgccgctcctgtccatctactcgctggccctggagcaggacctggagttcggccacagcatggtgcaggcggtgggcaccttgcagacccagaccttcatgcagcccctgaccctgcggcggcttgaacacgagaagcgcaggaaggagatcaaggaggcctggcaccgtgcccagaggaagctgcaagaggcggagtccaacctgcgcaaggccaagcagggttacgtgcagcgctgcgaggaccacgacaaggctcgcttcctcgtggccaaggcggaggaggagcaggctggcagcgcgccgggagcaggcggcacggccaccaagaccctggacaagcggcggcggctggaggaggaggccaagaacaaggcggaggaagctatggccacctaccgcacctgcgtggccgacgcgaagacgcagaagcaggagctggaggataccaaggtgacggcgctgcggcagatccaggaggtcatccggcagagcgaccaaaccatcaagtcggccacgatctcctactaccagatgatgcatatgcagacggcgccgctgcccgtgcacttccagatgctgtgtgagagcagcaagctgtatgacccaggccagcagtacgcctcccacgtgcgccagctgcagcgggaccaggagcccgatgtgcactacgactttgagccccacgtctccgccaacgcctggtcccccgtcatgcgtgcccggaagagcagcaccgtgtggttctttcacaggcacgtttattttgctgaaataaaaagtttttaatcgggcggaaaaaaaaaaaaaaaaaaaaaaaaaaaaaaaaaaaaaaaaaaaaaaaagggggggcgcggcgccctaaaaatactccccccggggggcccccattttccgctcccccccattttttttttcaaggggggcccccatagagggggggccgaattattataagacgcaggcagcgcgcgggcggagcgcgtgtgttaaacacgcgtggtgggagagtgtcgggaaaaagactcttgttccagccgtgggggacccttggtgaggaggggaaacccacatatgtcgtggggggcgggagacacttggtgtgggaacaacaatcccgagagggaaaatttaaacgccctcaggggggacaatttaacaaatgtttgaagggtttagtactggggttaaaaccaaggcggcataatttgggcgcggccttaaaaaagttttgtgtgcgcggggaataatattataagacaatttttttcgcggggctgtgtataaatata

SEQ ID NO: 406777 - DNA, 1210 bp, Homo sapiens
actcacggcccgtctcgccccagcccctgaccctgcggcggcttgaacacgagaagcgcaggaaggagatcaaggaggcctggcaccgtgcccagaggaagctgcaagaggcggagtccaacctgcgcaaggccaagcagggttacgtgcagcgctgcgaggaccacgacaaggctcgcttcctcgtggccaaggcggaggaggagcaggctggcagcgcgccgggagcaggcggcacggccaccaagaccctggacaagcggcggcggctggaggaggaggccaagaacaaggcggaggaagctatggccacctaccgcacctgcgtggccgacgcgaagacgcagaagcaggagctggaggataccaaggtgacggcgctgcggcagatccaggaggtcatccggcagagcgaccaaaccatcaagtcggccacgatctcctactaccagatgatgcatatgcagacggcgccgctgcccgtgcacttccagatgctgtgtgagagcagcaagctgtatgacccaggccagcagtacgcctcccacgtgcgccagctgcagcgggaccaggagcccgatgtgcactacgactttgagccccacgtctccgccaacgcctggtcccccgtcatgcgtgcccggaagagcagcaccgtgtggttctttcacaggcacgtttattttgctgaaataaaaagtttttaatcgggcggaaaaaaaaaaaaaaaaaaaaaaaaaaaaaaaaaaaaaaaaaaaaaaaagggggggcgcggcgccctaaaaatactccccccggggggcccccattttccgctcccccccattttttttttcaaggggggcccccatagagggggggccgaattattataagacgcaggcagcgcgcgggcggagcgcgtgtgttaaacacgcgtggtgggagagtgtcgggaaaaagactcttgttccagccgtgggggacccttggtgaggaggggaaacccacatatgtcgtggggggcgggagacacttggtgtgggaacaacaatcccgagagggaaaatttaaacgccctcaggggggacaatttaacaaatgtttgaagggtttagtactggggttaaaaccaaggcggcataatttgggcgcggccttaaaaaagttttgtgtgcgcggggaataatattataagacaatttttttcgcggggctgtgtataaatata

SEQ ID NO: 406778 - DNA, 331 bp, Homo sapiens
tgggtagatacggggtttcactatgttggccaggctggtctcaaactcctgacctcaagtgatccacctgcctcggcctcccaaagtgctgggattacagacgtgagccaccgcgcccggccactcctcctgtttttccgctgccgattgttgtgcagggtcctctgcatgcccagctgggccatggggccttgctgagagagatgggggtggggaggaaaggaggagctggggagactgagtcccatccgaggatagggttggaactggcctcctggctcccacacccacagcaagaggcggagtccaacctgcgcaaggccaagcaggg

SEQ ID NO: 406779 - DNA, 836 bp, Homo sapiens
  misc_feature (712)..(712): n is a, c, g, or t
  misc_feature (718)..(718): n is a, c, g, or t
  misc_feature (728)..(728): n is a, c, g, or t
gttagtacgagcccgggtgtgtaatcggccgaggctctggcggactcgttaccagtccatggaaagcctgtatggaccgggcagtgagggcacgcctcccagcctggatgactgtgacgccggctgcctgcccgccgaggaggtggacgtgctgctacagcgctgtgaggggggcgtggatgccgcactgctgtatgccaagaacatggccaagtacatgaaggacctcatcagctacctggagaagcggacgacgctggagatggagtttgccaagggcctgcagaagatcgctcacaactgcagacagagcgtcatgcaggagccccacatgccgctcctgtccatctactcgctggccctggagcaggacctggagttcggccacagcatggtgcaggcggtgggcaccttgcagacccagaccttcatgcagcccctgaccctgcggcggcttgaacacgagaagcgcaggaaggagatcaaggaggcctggcaccgtgcccagaggaagctgcaagaggcggagtccaacctgcgcaaggccaagcagggttacgtgcagcgctgcgaggaccacgacaaggctcgcttcctcgtggccaaggcggaggaggagcaggctggcagcgcgccgggagcaggcggcacggccaccaagaccctggacaagcggcggcggctggaggaggaggccaagaacaagcggagnagctanggcactacgnactggtggcgagcgaagaaccgagcagagtgaggtacccggacggcgcgggaaccgaggcccgcaaggacaccaagtgggtgtccctccaaggttaaggcggcggacc

SEQ ID NO: 406780 - DNA, 4548 bp, Homo sapiens
ggcgtactgatatcgtcgatcccagcgcgcttcgcccttaccgtgggcggcgacggcagatttcacagtcatgagagggcggggaccccggtcattcatgctcgacggagctgcccaggaaggatggggctgacgcggtgttccccggaccaagcctggagccgcccgctgggtcctccggcgtcaaggccacagggaccctcaagcggcccaccagcctgagccgccacgccagcgcggctggcttccccctgtcgggtgctgcctcctggacactgggccggagccaccggagcccactgacagccgccagcccgggcgagctgcccaccgagggtgccggcccggacgtcgtcgaggacatctcccatctgctggcggacgtggcccgcttcgctgagggccttgagaaacttaaggagtgtgtgttgcgtgacgacctccttgaggcccgccgcccgcgggcccacgagtgcctgggtgaggctctgcgtgtcatgcatcagatcatctccaagtacccgctgctgaacaccgtggagacgctcaccgcagccggcaccctcattgccaaggtcaaagccttccattatgagagcaacaatgatctggagaaacaggagttcgagaaggccctggagacgattgctgtggccttcagtagcacagtgtccgagttcctcatgggtgaagtggacagcagcaccctcctagcagtgcctcctggggactcgagccagtccatggaaagcctgtatggaccgggcagtgagggcacgcctcccagcctggatgactgtgacgccggctgcctgcccgccgaggaggtggacgtgctgctacagcgctgtgaggggggcgtggatgccgcactgctgtatgccaagaacatggccaagtacatgaaggacctcatcagctacctggagaagcggacgacgctggagatggagtttgccaagggcctgcagaagatcgctcacaactgcagacagagcgtcatgcaggagccccacatgccgctcctgtccatctactcgctggccctggagcaggacctggagttcggccacagcatggtgcaggcggtgggcaccttgcagacccagaccttcatgcagcccctgaccctgcggcggcttgaacacgagaagcgcaggaaggagatcaaggaggcctggcaccgtgcccagaggaagctgcaagaggcggagtccaacctgcgcaaggccaagcagggttacgtgcagcgctgcgaggaccacgacaaggctcgcttcctcgtggccaaggcggaggaggagcaggctggcagcgcgccgggagcaggcggcacggccaccaagaccctggacaagcggcggcggctggaggaggaggccaagaacaaggcggaggaagctatggccacctaccgcacctgcgtggccgacgcgaagacgcagaagcaggagctggaggataccaaggtgacggcgctgcggcagatccaggaggtcatccggcagagcgaccaaaccatcaagtcggccacgatctcctactaccagatgatgcatatgcagacggcgccgctgcccgtgcacttccagatgctgtgtgagagcagcaagctgtatgacccaggccagcagtacgcctcccacgtgcgccagctgcagcgggaccaggagcccgatgtgcactacgactttgagccccacgtctccgccaacgcctggtcccccgtcatgcgtgcccggaagagcagcttcaacgtgagtgatgtggcgcggccggaggctgccgggagccccccagaagaaggcgggtgcactgagggcacacctgccaaggaccacagggccgggcgaggacaccaggttcacaagtcatggccgctctcgatctcagactcggacagtgggctggaccccggccctggcgcaggggactttaagaagttcgagcggacgtcatccagtggtaccatgtcgtccacggaggagctggtggacccagacggtggagccggggcttcagcctttgagcaggctgacctcaacggcatgacccccgagctgccggtggccgtgcccagtggaccgttccgccacgaggggctgtccaaggcggcccgtactcaccggctccggaagctccgcacgcccgccaagtgccgcgagtgcaacagctacgtctacttccagggtgctgagtgtgaagagtgctgcctggcctgccacaagaaatgtctggagacgctggccatacagtgcgggcacaagaagctgcaaggccgcctgcagctgttcggccaggacttcagccacgcggcccgcagcgcccccgacggcgtgcccttcatcgtcaagaagtgcgtctgcgagatcgagcggcgggcgctgcgcaccaagggcatctaccgggtcaatggggtaaagacacgcgtggagaagctgtgccaggccttcgagaacggcaaggagctggtcgagctgtcgcaggcctcgccccacgacatcagcaacgtcctcaagctctacctgcgtcagcttcccgagccgctcatctccttccgcctctaccacgagctcgtagggctggccaaggacagcctgaaggcagaggccgaggccaaggcggcgtcccggggccggcaggacggctcggagagcgaggcagtggcggtggccctggcaggtcggctgcgggagctcctgcgggacctgccgcctgagaaccgggcctcgctgcagtacctgctgcgtcacctacgcaggatcgtggaggtggagcaggacaacaagatgacccccgggaacctgggcatcgtgttcgggcccacgctgcttcggccacggcccaccgaggccaccgtgtccctctcctccctggtggattatccccatcaggcccgcgtcatcgagactctcatcgtccactacggcctggtcttcgaggaggagccggaggagacccccgggggccaggacgagtcatccaaccagcgagctgaggtagtcgtccaggtgccgtacctggaggcgggcgaggcggtggtctacccgctgcaggaggcggcggcggacgggtgcagagaatcccgagttgtgtccaacgattcggactcggacctagaggaggcctccgagctgctgtcctcatcggaggccagtgccctgggccacctcagcttcctggagcagcagcagagcgaggccagcctagaggtggcttctggcagccacagcggcagtgaggagcagctggaggccacagcccgggaggacggggacggggacgaggacggcccggcccagcagctctcaggattcaacaccaaccagtccaacaacgtgctgcaggccccactgccccccatgaggctccgtggcgggcggatgacgctgggctcctgcagggaaaggcagccggaattcgtgtgagctggggtggggctgggaccacaggtggcttctctcttgcctgctcctgtccctccagcacgtcccctgcaccacggcatagcttaggtgcgccgtcctggggtcgctgccgagagcgcctggacttcgacgtcccaccagcgggcgcctcctcccagaggcttccaggagcacgagggccttgcggcacaggactgtgccctgtgctgtcccctgcaccccggctcagctgagctggggaacactgctgtcgtgtgaagtcacagtggccttgttggtgcccacagggctgtgtggatggaggaagctgtccctgcccagtgcatcccccaggtcatcacggggacgcaggaggcaggccctgccctgccctctcctcacaggtctgttgcagggactccagaaaccattctgggagccgtggatgggggcggagctggggtttggtgcagtttccagggtgcagtacagcagggcctgaatactggccctggactcccttttccagaacaccaggtgtggccacctggggctcaggtacacagtggggtctctcggaagccaccgtgtggttctttcacaggcacgtttattttgctgaaataaaaagtttttaatcgggcggaaaaaaaaaaaaaaaaaaaaaaaaaaaaaaaaaaaaaaaaaaaaaaaagggggggcgcggcgccctaaaaatactccccccggggggcccccattttccgctcccccccattttttttttcaaggggggcccccatagagggggggccgaattattataagacgcaggcagcgcgcgggcggagcgcgtgtgttaaacacgcgtggtgggagagtgtcgggaaaaagactcttgttccagccgtgggggacccttggtgaggaggggaaacccacatatgtcgtggggggcgggagacacttggtgtgggaacaacaatcccgagagggaaaatttaaacgccctcaggggggacaatttaacaaatgtttgaagggtttagtactggggttaaaaccaaggcggcataatttgggcgcggccttaaaaaagttttgtgtgcgcggggaataatattataagacaatttttttcgcggggctgtgtataaatata

SEQ ID NO: 406781 - DNA, 4821 bp, Homo sapiens
gggaagggtcgggggcgaggccgcgtcgccgcctccccgaagccttttcctgttgggggggagggcccgccagtgacggccgggcctgtcacgtgggcctgacagctggggagggggtggccggcgacaatgtggtcccgaagcggccagcgccgggagctgcagcgctgagacccccagcccgccccctcgggctcccggccggggccccatcatgttctccaggaagaaacgagagctcatgaaaaccccttccatctcgaaaaagaaccgcgcgggaagccccagcccgcagccctcgggggagctgcccaggaaggatggggctgacgcggtgttccccggaccaagcctggagccgcccgctgggtcctccggcgtcaaggccacagggaccctcaagcggcccaccagcctgagccgccacgccagcgcggctggcttccccctgtcgggtgctgcctcctggacactgggccggagccaccggagcccactgacagccgccagcccgggcgagctgcccaccgagggtgccggcccggacgtcgtcgaggacatctcccatctgctggcggacgtggcccgcttcgctgagggccttgagaaacttaaggagtgtgtgttgcgtgacgacctccttgaggcccgccgcccgcgggcccacgagtgcctgggtgaggctctgcgtgtcatgcatcagatcatctccaagtacccgctgctgaacaccgtggagacgctcaccgcagccggcaccctcattgccaaggtcaaagccttccattatgagagcaacaatgatctggagaaacaggagttcgagaaggccctggagacgattgctgtggccttcagtagcacagtgtccgagttcctcatgggtgaagtggacagcagcaccctcctagcagtgcctcctggggactcgagccagtccatggaaagcctgtatggaccgggcagtgagggcacgcctcccagcctggatgactgtgacgccggctgcctgcccgccgaggaggtggacgtgctgctacagcgctgtgaggggggcgtggatgccgcactgctgtatgccaagaacatggccaagtacatgaaggacctcatcagctacctggagaagcggacgacgctggagatggagtttgccaagggcctgcagaagatcgctcacaactgcagacagagcgtcatgcaggagccccacatgccgctcctgtccatctactcgctggccctggagcaggacctggagttcggccacagcatggtgcaggcggtgggcaccttgcagacccagaccttcatgcagcccctgaccctgcggcggcttgaacacgagaagcgcaggaaggagatcaaggaggcctggcaccgtgcccagaggaagctgcaagaggcggagtccaacctgcgcaaggccaagcagggttacgtgcagcgctgcgaggaccacgacaaggctcgcttcctcgtggccaaggcggaggaggagcaggctggcagcgcgccgggagcaggcggcacggccaccaagaccctggacaagcggcggcggctggaggaggaggccaagaacaaggcggaggaagctatggccacctaccgcacctgcgtggccgacgcgaagacgcagaagcaggagctggaggataccaaggtgacggcgctgcggcagatccaggaggtcatccggcagagcgaccaaaccatcaagtcggccacgatctcctactaccagatgatgcatatgcagacggcgccgctgcccgtgcacttccagatgctgtgtgagagcagcaagctgtatgacccaggccagcagtacgcctcccacgtgcgccagctgcagcgggaccaggagcccgatgtgcactacgactttgagccccacgtctccgccaacgcctggtcccccgtcatgcgtgcccggaagagcagcttcaacgtgagtgatgtggcgcggccggaggctgccgggagccccccagaagaaggcgggtgcactgagggcacacctgccaaggaccacagggccgggcgaggacaccaggttcacaagtcatggccgctctcgatctcagactcggacagtgggctggaccccggccctggcgcaggggactttaagaagttcgagcggacgtcatccagtggtaccatgtcgtccacggaggagctggtggacccagacggtggagccggggcttcagcctttgagcaggctgacctcaacggcatgacccccgagctgccggtggccgtgcccagtggaccgttccgccacgaggggctgtccaaggcggcccgtactcaccggctccggaagctccgcacgcccgccaagtgccgcgagtgcaacagctacgtctacttccagggtgctgagtgtgaagagtgctgcctggcctgccacaagaaatgtctggagacgctggccatacagtgcgggcacaagaagctgcaaggccgcctgcagctgttcggccaggacttcagccacgcggcccgcagcgcccccgacggcgtgcccttcatcgtcaagaagtgcgtctgcgagatcgagcggcgggcgctgcgcaccaagggcatctaccgggtcaatggggtaaagacacgcgtggagaagctgtgccaggccttcgagaacggcaaggagctggtcgagctgtcgcaggcctcgccccacgacatcagcaacgtcctcaagctctacctgcgtcagcttcccgagccgctcatctccttccgcctctaccacgagctcgtagggctggccaaggacagcctgaaggcagaggccgaggccaaggcggcgtcccggggccggcaggacggctcggagagcgaggcagtggcggtggccctggcaggtcggctgcgggagctcctgcgggacctgccgcctgagaaccgggcctcgctgcagtacctgctgcgtcacctacgcaggtgagtcccggcatatggagtggagggcgcggggtcccgggagccgctcagcacctggcccctgcccaccccgcaggatcgtggaggtggagcaggacaacaagatgacccccgggaacctgggcatcgtgttcgggcccacgctgcttcggccacggcccaccgaggccaccgtgtccctctcctccctggtggattatccccatcaggcccgcgtcatcgagactctcatcgtccactacggcctggtcttcgaggaggagccggaggagacccccgggggccaggacgagtcatccaaccagcgagctgaggtagtcgtccaggtgccgtacctggaggcgggcgaggcggtggtctacccgctgcaggaggcggcggcggacgggtgcagagaatcccgagttgtgtccaacgattcggactcggacctagaggaggcctccgagctgctgtcctcatcggaggccagtgccctgggccacctcagcttcctggagcagcagcagagcgaggccagcctagaggtggcttctggcagccacagcggcagtgaggagcagctggaggccacagcccgggaggacggggacggggacgaggacggcccggcccagcagctctcaggattcaacaccaaccagtccaacaacgtgctgcaggccccactgccccccatgaggctccgtggcgggcggatgacgctgggctcctgcagggaaaggcagccggaattcgtgtgagctggggtggggctgggaccacaggtggcttctctcttgcctgctcctgtccctccagcacgtcccctgcaccacggcatagcttaggtgcgccgtcctggggtcgctgccgagagcgcctggacttcgacgtcccaccagcgggcgcctcctcccagaggcttccaggagcacgagggccttgcggcacaggactgtgccctgtgctgtcccctgcaccccggctcagctgagctggggaacactgctgtcgtgtgaagtcacagtggccttgttggtgcccacagggctgtgtggatggaggaagctgtccctgcccagtgcatcccccaggtcatcacggggacgcaggaggcaggccctgccctgccctctcctcacaggtctgttgcagggactccagaaaccattctgggagccgtggatgggggcggagctggggtttggtgcagtttccagggtgcagtacagcagggcctgaatactggccctggactcccttttccagaacaccaggtgtggccacctggggctcaggtacacagtggggtctctcggaagccaccgtgtggttctttcacaggcacgtttattttgctgaaataaaaagtttttaatcgggcggaaaaaaaaaaaaaaaaaaaaaaaaaaaaaaaaaaaaaaaaaaaaaaaagggggggcgcggcgccctaaaaatactccccccggggggcccccattttccgctcccccccattttttttttcaaggggggcccccatagagggggggccgaattattataagacgcaggcagcgcgcgggcggagcgcgtgtgttaaacacgcgtggtgggagagtgtcgggaaaaagactcttgttccagccgtgggggacccttggtgaggaggggaaacccacatatgtcgtggggggcgggagacacttggtgtgggaacaacaatcccgagagggaaaatttaaacgccctcaggggggacaatttaacaaatgtttgaagggtttagtactggggttaaaaccaaggcggcataatttgggcgcggccttaaaaaagttttgtgtgcgcggggaataatattataagacaatttttttcgcggggctgtgtataaatata

SEQ ID NO: 406782 - DNA, 2047 bp, Homo sapiens
caccaacacctgctgacccttgactctgcgcagcttcccgagccgctcatctccttccgcctctaccacgagctcgtagggctggccaaggacagcctgaaggcagaggccgaggccaaggcggcgtcccggggccggcaggacggctcggagagcgaggcagtggcggtggccctggcaggtcggctgcgggagctcctgcgggacctgccgcctgagaaccgggcctcgctgcagtacctgctgcgtcacctacgcaggatcgtggaggtggagcaggacaacaagatgacccccgggaacctgggcatcgtgttcgggcccacgctgcttcggccacggcccaccgaggccaccgtgtccctctcctccctggtggattatccccatcaggcccgcgtcatcgagactctcatcgtccactacggcctggtcttcgaggaggagccggaggagacccccgggggccaggacgagtcatccaaccagcgagctgaggtagtcgtccaggtgccgtacctggaggcgggcgaggcggtggtctacccgctgcaggaggcggcggcggacgggtgcagagaatcccgagttgtgtccaacgattcggactcggacctagaggaggcctccgagctgctgtcctcatcggaggccagtgccctgggccacctcagcttcctggagcagcagcagagcgaggccagcctagaggtggcttctggcagccacagcggcagtgaggagcagctggaggccacagcccgggaggacggggacggggacgaggacggcccggcccagcagctctcaggattcaacaccaaccagtccaacaacgtgctgcaggccccactgccccccatgaggctccgtggcgggcggatgacgctgggctcctgcagggaaaggcagccggaattcgtgtgagctggggtggggctgggaccacaggtggcttctctcttgcctgctcctgtccctccagcacgtcccctgcaccacggcatagcttaggtgcgccgtcctggggtcgctgccgagagcgcctggacttcgacgtcccaccagcgggcgcctcctcccagaggcttccaggagcacgagggccttgcggcacaggactgtgccctgtgctgtcccctgcaccccggctcagctgagctggggaacactgctgtcgtgtgaagtcacagtggccttgttggtgcccacagggctgtgtggatggaggaagctgtccctgcccagtgcatcccccaggtcatcacggggacgcaggaggcaggccctgccctgccctctcctcacaggtctgttgcagggactccagaaaccattctgggagccgtggatgggggcggagctggggtttggtgcagtttccagggtgcagtacagcagggcctgaatactggccctggactcccttttccagaacaccaggtgtggccacctggggctcaggtacacagtggggtctctcggaagccaccgtgtggttctttcacaggcacgtttattttgctgaaataaaaagtttttaatcgggcggaaaaaaaaaaaaaaaaaaaaaaaaaaaaaaaaaaaaaaaaaaaaaaaagggggggcgcggcgccctaaaaatactccccccggggggcccccattttccgctcccccccattttttttttcaaggggggcccccatagagggggggccgaattattataagacgcaggcagcgcgcgggcggagcgcgtgtgttaaacacgcgtggtgggagagtgtcgggaaaaagactcttgttccagccgtgggggacccttggtgaggaggggaaacccacatatgtcgtggggggcgggagacacttggtgtgggaacaacaatcccgagagggaaaatttaaacgccctcaggggggacaatttaacaaatgtttgaagggtttagtactggggttaaaaccaaggcggcataatttgggcgcggccttaaaaaagttttgtgtgcgcggggaataatattataagacaatttttttcgcggggctgtgtataaatata

SEQ ID NO: 406783 - DNA, 2182 bp, Homo sapiens
cccgtttcccatcccggtgctgcctgcagccacaagctccacgctggcccggtgtccacagcctgcccgagctgccactgcactccgccgcgaggtcaattccccgcttcagattttcttttctgggagttgtagtttcgctcctgctgcccaggctgaagtgcaatggggcgatctcagcccaccacaacctccgcttcccaggttcaagcgattctcctgcctcagtctcccgcgtagctgggactacaggcgccggccaccacacccggctaatttttgtatttttaacagagatggggtttcactttgttggccaggctggtctccaactgctgacctcaagtgatccgcaccccccttggcctcctgaagtgctgggattacaggtgtgagccactgcacgcggcgtctcgtattctttcaatccatcttccctgggtgtttaggggctgcggtttctcgggtttgctcttggctgaggacagaccgcctgggcaacagcgggtgtcagtagctgttacgggctgtgtgggtgggtttgttaatttataacatggaaaatggagccccggcccctctatgacttccgttctgcacttgcaggacgagtcatccaaccagcgagctgaggtagtcgtccaggtgccgtacctggaggcgggcgaggcggtggtctacccgctgcaggaggcggcggcggacgggtgcagagaatcccgagttgtgtccaacgattcggactcggacctagaggaggcctccgagctgctgtcctcatcggaggccagtgccctgggccacctcagcttcctggagcagcagcagagcgaggccagcctagaggtggcttctggcagccacagcggcagtgaggagcagctggaggccacagcccgggaggacggggacggggacgaggacggcccggcccagcagctctcaggattcaacaccaaccagtccaacaacgtgctgcaggccccactgccccccatgaggctccgtggcgggcggatgacgctgggctcctgcagggaaaggcagccggaattcgtgtgagctggggtggggctgggaccacaggtggcttctctcttgcctgctcctgtccctccagcacgtcccctgcaccacggcatagcttaggtgcgccgtcctggggtcgctgccgagagcgcctggacttcgacgtcccaccagcgggcgcctcctcccagaggcttccaggagcacgagggccttgcggcacaggactgtgccctgtgctgtcccctgcaccccggctcagctgagctggggaacactgctgtcgtgtgaagtcacagtggccttgttggtgcccacagggctgtgtggatggaggaagctgtccctgcccagtgcatcccccaggtcatcacggggacgcaggaggcaggccctgccctgccctctcctcacaggtctgttgcagggactccagaaaccattctgggagccgtggatgggggcggagctggggtttggtgcagtttccagggtgcagtacagcagggcctgaatactggccctggactcccttttccagaacaccaggtgtggccacctggggctcaggtacacagtggggtctctcggaagccaccgtgtggttctttcacaggcacgtttattttgctgaaataaaaagtttttaatcgggcggaaaaaaaaaaaaaaaaaaaaaaaaaaaaaaaaaaaaaaaaaaaaaaaagggggggcgcggcgccctaaaaatactccccccggggggcccccattttccgctcccccccattttttttttcaaggggggcccccatagagggggggccgaattattataagacgcaggcagcgcgcgggcggagcgcgtgtgttaaacacgcgtggtgggagagtgtcgggaaaaagactcttgttccagccgtgggggacccttggtgaggaggggaaacccacatatgtcgtggggggcgggagacacttggtgtgggaacaacaatcccgagagggaaaatttaaacgccctcaggggggacaatttaacaaatgtttgaagggtttagtactggggttaaaaccaaggcggcataatttgggcgcggccttaaaaaagttttgtgtgcgcggggaataatattataagacaatttttttcgcggggctgtgtataaatata

SEQ ID NO: 406784 - DNA, 693 bp, Homo sapiens
gaggagggaggggaggagggaggcagatctacaagtctagtgaagcccacaccttctttgccttaaacagaattctgttttccacagacacatatactcacagaaatgagttatttaaagaagacggtccagattccacagtccaaaaaaaaaagaggtttgccctgcttctgaaggagtcagggtatgaatgcagaggtcttcctgttggctcacatatcagatcttcaacgtcaacattaaatgcgtgagtgcttgccaggctcacactgttgagagcagctttatggttgaatgtggcagtgtgttctgcaggagtcttctgtgagattagtgctactcttgccattttacaccactaaggaaactgtcactgactctagtctttggagtctgagccaagaagtctttttcttctaacctgggccatagagactctatggagaatgatgggaggtgatctacacagactcctccctcactgggttgatagctctgttgggaagatgttaacatccatcaggggaaaaaaccacgagagacagctcaagctagggaggcagagggttagcagcaaatgctaccccttctgagaactcagacattccagactcagagaccccatgagaagtttctgactcaggactgtgtaggcagtgctgcatgcatatgcctgccagggctcaatcagta

SEQ ID NO: 406785 - DNA, 2919 bp, Homo sapiens
tgagatggagtttcgctcttgttgcccaggctggaagttgtttttgttggaaacactctttgtcaagtacctgggggtcttcatcagtaagacctcattttagatgcctcctggcctccccttcccaggagcacagctatgaccttaggtactccttccgaaaagaacttgtttaactaaaggtaagtgtacctcatcctcaccatggcctccttccactggggaagcagatagcgcagaaaaaagaacacacccattccccacataccttcacactcgtcacatacctgctacgtgagatgtgcaaagctgaattcagggaatgctcagtagttacataacagtgccactaaaggcaattgttttcagtgatttccatcgagctgggttctgcaaagatccacagcactttccggttgcatgctgggcacttttggaagctgcagtcaattctggaggccaccagggcaccattagcacatagcagcaattattgactaaatggtgctctggttccatgccttccaagggggcccacttagaggcagggtggagttgcttagggccttttttttttttttttttgtaggatggagttttgctcttgttgcccaagctggagtgcaatggtgcgatcttcgcttactgcaacctctgcttcctgggttcaagtgattcccctgcctcagcctcccgagtagcagggattacagacacatatactcacagaaatgagttatttaaagaagacggtccagattccacagtccaaaaaaaaaagaggtttgccctgcttctgaaggagtcagggtatgaatgcagaggtcttcctgttggctcacatatcagatcttcaacgtcaacattaaatgcgagtgatgcttccccctctgtgaatgtggctttgggtatggctaatccacaccctgcactctggccttcagaagcccagggagagaagcctcccagaagcaaccttccagaaccttctccatcctcccaccgacctccccagcccctgtcctctctttgaatctcgttgtcaagttcttcccgcagacacctggctccttgaggggaggtgcagctttcatctgaccatgcaggcgtgctttgcagtgggtagagcagtgctttcctcctcccagctgcacactggaatcacctggagagtccagaaacttcccgcctcagtgaaagaacatcagtgtatcagcacagcaaatattccaaatgccaggctggattccctccaattaccaggacctccaggcttctcctcctttcaagaactttctgaccctggatccagtctaaatgttggttataaactcacctgacatccacagggcccttccaaaatactgtcaaggctgactgctggtgcctggaacctgcacaccctcctgggactctgcatctctgctggggctggtttctcctctgagccaccttaaggaatcccaccctgacccggtcagagctcaccatgcctccctctcctacttgctcagcattttgtgtctatctagactgaagcctttgctttctctctgtgattgtggtgaaagttcagtttgctttcctatctctagaatgtcagcacgaaggcagaggcatggtctcctgagttccataaccccaaagcctaactccctgcctgccacactgaggggcttagtagacattgacttactaaattgaatagttgagtaataatgctctttgaaataatttggagttagatcttgagccttgtgtggccagaggatgggtgaggacacatcataaaaactaaaggtaactgagcatgccagtggttggggtgagaaatttgcatggagcactccagacacagaggcagcaaaacccaagtgctgggaagtcagagtgagagagtgaaggggcagtgagtgcttctttaggagctggatcaaaacctaagatgatctggccacatggtgcagactgagcacacacttgggagagaaatgggccaggaggagaggagagaggttcaccacaggacagtggatgactgggaatagaagccctccccatggtggaccaagaagtctgtgaagctgagagaaagacaaaagaaatcacgacttctgtaggtagctgggatggaaacctcaggggtgacagggtctttaaaggaaatctcaaggaaggcatcatgttctgggtgtgctccagggatgctgagtaagaaaagaccagcctttctgtgtgtgtctttactctgccacaaggcacctgggctcctaaatgaccaatacacatgtgctatactggtgccaagaaagaagggtgttttgtaggaaagtcaaggtgagaggaggtgcccaggacttggctcctttctttgaagggtgacggtgtaaattctccatgctggggatcctactgatggatggaggcatgtcgatctcatcatttcacagagtggggagctatggccacaacgtgcctatcacacaagtccagcctcacgtcagctggacaccagctgttctgacacttgtcagcacatggggcacccggaagttcatggtgttctgcaaagaacgccacaaaacagtgagctcaacttcttgaaagtcataatgtgttgctaagtccgatcccagatcctaaaaataatatgaggtagtggccattgaacagaaaaaatttacatcttaaacttgaagataagtacaagtgtacctttttctaccactgttgttcagttttattatattgacaagcacctctgcccaccctgtggggtaaaactgtttgaaagtgtttatgaaagttttatataaatattggttgatcaaatgtacaaaatatgcatgatggcaccatattgtgtataatagtgacaaatacagtctatgtgggtggagaaacaagctcggtgttgtg

SEQ ID NO: 406786 - DNA, 2731 bp, Homo sapiens
aggcgcgacccctcggcccagcttgaggcccggcctaggaccggaggcgcgacccctcggcccaccttgaggcccggcctaggactggaggcgcgacccctcggcccaccttgaggcccggcctaggaccggaggcgcgacccctgggcccaccttgaggcccggcctaggactggaggcgcgacccctcggcccaccttgaggcccggcctaggaccggaggcgcgacccctgggcccacctggcggcccggccggcacagcccgcctctcctctccaggccagggccccacaccttccgcctgacagccagccaagctcttcagtcccccgccctccacctgccagggaggctccgggcgttgtacctgccaccacggggtaggtacaaagcactgggaatacaaccttgaacaagacaagaatcctggccttcaaggaacttcgaaccttttgggggatatgataagacacattaggaatcaccatgttaatggttatctttcttgaaggatataagtccagacacatatactcacagaaatgagttatttaaagaagacggtccagattccacagtccaaaaaaaaaagaggtttgccctgcttctgaaggagtcagggtatgaatgcagaggtcttcctgttggctcacatatcagatcttcaacgtcaacattaaatgcgagtgatgcttccccctctgtgaatgtggctttgggtatggctaatccacaccctgcactctggccttcagaagcccagggagagaagcctcccagaagcaaccttccagaaccttctccatcctcccaccgacctccccagcccctgtcctctctttgaatctcgttgtcaagttcttcccgcagacacctggctccttgaggggaggtgcagctttcatctgaccatgcaggcgtgctttgcagtgggtagagcagtgctttcctcctcccagctgcacactggaatcacctggagagtccagaaacttcccgcctcagtgaaagaacatcagtgtatcagcacagcaaatattccaaatgccaggctggattccctccaattaccaggacctccaggcttctcctcctttcaagaactttctgaccctggatccagtctaaatgttggttataaactcacctgacatccacagggcccttccaaaatactgtcaaggctgactgctggtgcctggaacctgcacaccctcctgggactctgcatctctgctggggctggtttctcctctgagccaccttaaggaatcccaccctgacccggtcagagctcaccatgcctccctctcctacttgctcagcattttgtgtctatctagactgaagcctttgctttctctctgtgattgtggtgaaagttcagtttgctttcctatctctagaatgtcagcacgaaggcagaggcatggtctcctgagttccataaccccaaagcctaactccctgcctgccacactgaggggcttagtagacattgacttactaaattgaatagttgagtaataatgctctttgaaataatttggagttagatcttgagccttgtgtggccagaggatgggtgaggacacatcataaaaactaaaggtaactgagcatgccagtggttggggtgagaaatttgcatggagcactccagacacagaggcagcaaaacccaagtgctgggaagtcagagtgagagagtgaaggggcagtgagtgcttctttaggagctggatcaaaacctaagatgatctggccacatggtgcagactgagcacacacttgggagagaaatgggccaggaggagaggagagaggttcaccacaggacagtggatgactgggaatagaagccctccccatggtggaccaagaagtctgtgaagctgagagaaagacaaaagaaatcacgacttctgtaggtagctgggatggaaacctcaggggtgacagggtctttaaaggaaatctcaaggaaggcatcatgttctgggtgtgctccagggatgctgagtaagaaaagaccagcctttctgtgtgtgtctttactctgccacaaggcacctgggctcctaaatgaccaatacacatgtgctatactggtgccaagaaagaagggtgttttgtaggaaagtcaaggtgagaggaggtgcccaggacttggctcctttctttgaagggtgacggtgtaaattctccatgctggggatcctactgatggatggaggcatgtcgatctcatcatttcacagagtggggagctatggccacaacgtgcctatcacacaagtccagcctcacgtcagctggacaccagctgttctgacacttgtcagcacatggggcacccggaagttcatggtgttctgcaaagaacgccacaaaacagtgagctcaacttcttgaaagtcataatgtgttgctaagtccgatcccagatcctaaaaataatatgaggtagtggccattgaacagaaaaaatttacatcttaaacttgaagataagtacaagtgtacctttttctaccactgttgttcagttttattatattgacaagcacctctgcccaccctgtggggtaaaactgtttgaaagtgtttatgaaagttttatataaatattggttgatcaaatgtacaaaatatgcatgatggcaccatattgtgtataatagtgacaaatacagtctatgtgggtggagaaacaagctcggtgttgtg

SEQ ID NO: 406787 - DNA, 2293 bp, Homo sapiens
gaggagggaggggaggagggaggcagatctacaagtctagtgaagcccacaccttctttgccttaaacagaattctgttttccacagacacatatactcacagaaatgagttatttaaagaagacggtccagattccacagtccaaaaaaaaaagaggtttgccctgcttctgaaggagtcagggtatgaatgcagaggtcttcctgttggctcacatatcagatcttcaacgtcaacattaaatgcgagtgatgcttccccctctgtgaatgtggctttgggtatggctaatccacaccctgcactctggccttcagaagcccagggagagaagcctcccagaagcaaccttccagaaccttctccatcctcccaccgacctccccagcccctgtcctctctttgaatctcgttgtcaagttcttcccgcagacacctggctccttgaggggaggtgcagctttcatctgaccatgcaggcgtgctttgcagtgggtagagcagtgctttcctcctcccagctgcacactggaatcacctggagagtccagaaacttcccgcctcagtgaaagaacatcagtgtatcagcacagcaaatattccaaatgccaggctggattccctccaattaccaggacctccaggcttctcctcctttcaagaactttctgaccctggatccagtctaaatgttggttataaactcacctgacatccacagggcccttccaaaatactgtcaaggctgactgctggtgcctggaacctgcacaccctcctgggactctgcatctctgctggggctggtttctcctctgagccaccttaaggaatcccaccctgacccggtcagagctcaccatgcctccctctcctacttgctcagcattttgtgtctatctagactgaagcctttgctttctctctgtgattgtggtgaaagttcagtttgctttcctatctctagaatgtcagcacgaaggcagaggcatggtctcctgagttccataaccccaaagcctaactccctgcctgccacactgaggggcttagtagacattgacttactaaattgaatagttgagtaataatgctctttgaaataatttggagttagatcttgagccttgtgtggccagaggatgggtgaggacacatcataaaaactaaaggtaactgagcatgccagtggttggggtgagaaatttgcatggagcactccagacacagaggcagcaaaacccaagtgctgggaagtcagagtgagagagtgaaggggcagtgagtgcttctttaggagctggatcaaaacctaagatgatctggccacatggtgcagactgagcacacacttgggagagaaatgggccaggaggagaggagagaggttcaccacaggacagtggatgactgggaatagaagccctccccatggtggaccaagaagtctgtgaagctgagagaaagacaaaagaaatcacgacttctgtaggtagctgggatggaaacctcaggggtgacagggtctttaaaggaaatctcaaggaaggcatcatgttctgggtgtgctccagggatgctgagtaagaaaagaccagcctttctgtgtgtgtctttactctgccacaaggcacctgggctcctaaatgaccaatacacatgtgctatactggtgccaagaaagaagggtgttttgtaggaaagtcaaggtgagaggaggtgcccaggacttggctcctttctttgaagggtgacggtgtaaattctccatgctggggatcctactgatggatggaggcatgtcgatctcatcatttcacagagtggggagctatggccacaacgtgcctatcacacaagtccagcctcacgtcagctggacaccagctgttctgacacttgtcagcacatggggcacccggaagttcatggtgttctgcaaagaacgccacaaaacagtgagctcaacttcttgaaagtcataatgtgttgctaagtccgatcccagatcctaaaaataatatgaggtagtggccattgaacagaaaaaatttacatcttaaacttgaagataagtacaagtgtacctttttctaccactgttgttcagttttattatattgacaagcacctctgcccaccctgtggggtaaaactgtttgaaagtgtttatgaaagttttatataaatattggttgatcaaatgtacaaaatatgcatgatggcaccatattgtgtataatagtgacaaatacagtctatgtgggtggagaaacaagctcggtgttgtg

SEQ ID NO: 406788 - DNA, 2867 bp, Homo sapiens
tgagatggagtttcgctcttgttgcccaggctggaagttgtttttgttggaaacactctttgtcaagtacctgggggtcttcatcagtaagacctcattttagatgcctcctggcctccccttcccaggagcacagctatgaccttaggtactccttccgaaaagaacttgtttaactaaaggtaagtgtacctcatcctcaccatggcctccttccactggggaagcagatagcgcagaaaaaagaacacacccattccccacataccttcacactcgtcacatacctgctacgtgagatgtgcaaagctgaattcagggaatgctcagtagttacataacagtgccactaaaggcaattgttttcagtgatttccatcgagctgggttctgcaaagatccacagcactttccggttgcatgctgggcacttttggaagctgcagtcaattctggaggccaccagggcaccattagcacatagcagcaattattgactaaatggtgctctggttccatgccttccaagggggcccacttagaggcagggtggagttgcttagggccttttttttttttttttttgtaggatggagttttgctcttgttgcccaagctggagtgcaatggtgcgatcttcgcttactgcaacctctgcttcctgggttcaagtgattcccctgcctcagcctcccgagtagcagggattacagacacatatactcacagaaatgagttatttaaagaagacggtccagattccacagtccaaaaaaaaaagaggtttgccctgcttctgaaggagtcagggtatgaatgcagaggtcttcctgttggctcacatatcagatcttcaacgtcaacattaaatgcgagtgatgcttccccctctgtgaatgtggctttgggtatggctaatccacaccctgcactctggccttcagaagcccagggagagaagcctcccagaagcaaccttccagaaccttctccatcctcccaccgacctccccagcccctgtcctctctttgaatctcgttgtcaagttcttcccgcagacacctggctccttgaggggaggtgcagctttcatctgaccatgcaggcgtgctttgcagtgggtagagcagtgctttcctcctcccagctgcacactggaatcacctggagagtccagaaacttcccgcctcagtgaaagaacatcagtgtatcagcacagcaaatattccaaatgccaggctggattccctccaattaccaggacctccaggcttctcctcctttcaagaactttctgaccctggatccagtctaaatgttggttataaactcacctgacatccacagggcccttccaaaatactgtcaaggctgactgctggtgcctggaacctgcacaccctcctgggactctgcatctctgctggggctggtttctcctctgagccaccttaaggaatcccaccctgacccggtcagagctcaccatgcctccctctcctacttgctcagcattttgtgtctatctagactgaagcctttgctttctctctgtgattgtggtgaaagttcagtttgctttcctatctctagaatgtcagcacgaaggcagaggcatggtctcctgagttccataaccccaaagcctaactccctgcctgccacactgaggggcttagtagacattgacttactaaattgaatagttgagtaataatgctctttgaaataatttggagttagatcttgagccttgtgtggccagaggatgggtgaggacacatcataaaaactaaaggtaactgagcatgccagtggttggggtgagaaatttgcatggagcactccagacacagaggcagcaaaacccaagtgctgggaagtcagagtgagagagtgaaggggcagtgagtgcttctttaggagctggatcaaaacctaagatgatctggccacatggtgcagactgagcacacacttgggagagaaatgggccaggaggagaggagagaggttcaccacaggacagtggatgactgggaatagaagccctccccatggtggaccaagaagtctgtgaagctgagagaaagacaaaagaaatcacgacttctgtaggtagctgggatggaaacctcaggggtgacagggtctttaaaggaaatctcaaggaaggcatcatgttctgggtgtgctccagggatgctgagtaagaaaagaccagcctttctgtgtgtgtctttactctgccaagaaagaagggtgttttgtaggaaagtcaaggtgagaggaggtgcccaggacttggctcctttctttgaagggtgacggtgtaaattctccatgctggggatcctactgatggatggaggcatgtcgatctcatcatttcacagagtggggagctatggccacaacgtgcctatcacacaagtccagcctcacgtcagctggacaccagctgttctgacacttgtcagcacatggggcacccggaagttcatggtgttctgcaaagaacgccacaaaacagtgagctcaacttcttgaaagtcataatgtgttgctaagtccgatcccagatcctaaaaataatatgaggtagtggccattgaacagaaaaaatttacatcttaaacttgaagataagtacaagtgtacctttttctaccactgttgttcagttttattatattgacaagcacctctgcccaccctgtggggtaaaactgtttgaaagtgtttatgaaagttttatataaatattggttgatcaaatgtacaaaatatgcatgatggcaccatattgtgtataatagtgacaaatacagtctatgtgggtggagaaacaagctcggtgttgtg

SEQ ID NO: 406789 - DNA, 2438 bp, Homo sapiens
tgagatggagtttcgctcttgttgcccaggctggaagttgtttttgttggaaacactctttgtcaagtacctgggggtcttcatcagtaagacctcattttagatgcctcctggcctccccttcccaggagcacagctatgaccttaggtactccttccgaaaagaacttgtttaactaaaggtaagtgtacctcatcctcaccatggcctccttccactggggaagcagatagcgcagaaaaaagaacacacccattccccacataccttcacactcgtcacatacctgctacgtgagatgtgcaaagctgaattcagggaatgctcagtagttacataacagtgccactaaaggcaattgttttcagtgatttccatcgagctgggttctgcaaagatccacagcactttccggttgcatgctgggcacttttggaagctgcagtcaattctggaggccaccagggcaccattagcacatagcagcaattattgactaaatggtgctctggttccatgccttccaagggggcccacttagaggcagggtggagttgcttagggccttttttttttttttttttgtaggatggagttttgctcttgttgcccaagctggagtgcaatggtgcgatcttcgcttactgcaacctctgcttcctgggttcaagtgattcccctgcctcagcctcccgagtagcagggattacagtgaaagaacatcagtgtatcagcacagcaaatattccaaatgccaggctggattccctccaattaccaggacctccaggcttctcctcctttcaagaactttctgaccctggatccagtctaaatgttggttataaactcacctgacatccacagggcccttccaaaatactgtcaaggctgactgctggtgcctggaacctgcacaccctcctgggactctgcatctctgctggggctggtttctcctctgagccaccttaaggaatcccaccctgacccggtcagagctcaccatgcctccctctcctacttgctcagcattttgtgtctatctagactgaagcctttgctttctctctgtgattgtggtgaaagttcagtttgctttcctatctctagaatgtcagcacgaaggcagaggcatggtctcctgagttccataaccccaaagcctaactccctgcctgccacactgaggggcttagtagacattgacttactaaattgaatagttgagtaataatgctctttgaaataatttggagttagatcttgagccttgtgtggccagaggatgggtgaggacacatcataaaaactaaaggtaactgagcatgccagtggttggggtgagaaatttgcatggagcactccagacacagaggcagcaaaacccaagtgctgggaagtcagagtgagagagtgaaggggcagtgagtgcttctttaggagctggatcaaaacctaagatgatctggccacatggtgcagactgagcacacacttgggagagaaatgggccaggaggagaggagagaggttcaccacaggacagtggatgactgggaatagaagccctccccatggtggaccaagaagtctgtgaagctgagagaaagacaaaagaaatcacgacttctgtaggtagctgggatggaaacctcaggggtgacagggtctttaaaggaaatctcaaggaaggcatcatgttctgggtgtgctccagggatgctgagtaagaaaagaccagcctttctgtgtgtgtctttactctgccacaaggcacctgggctcctaaatgaccaatacacatgtgctatactggtgccaagaaagaagggtgttttgtaggaaagtcaaggtgagaggaggtgcccaggacttggctcctttctttgaagggtgacggtgtaaattctccatgctggggatcctactgatggatggaggcatgtcgatctcatcatttcacagagtggggagctatggccacaacgtgcctatcacacaagtccagcctcacgtcagctggacaccagctgttctgacacttgtcagcacatggggcacccggaagttcatggtgttctgcaaagaacgccacaaaacagtgagctcaacttcttgaaagtcataatgtgttgctaagtccgatcccagatcctaaaaataatatgaggtagtggccattgaacagaaaaaatttacatcttaaacttgaagataagtacaagtgtacctttttctaccactgttgttcagttttattatattgacaagcacctctgcccaccctgtggggtaaaactgtttgaaagtgtttatgaaagttttatataaatattggttgatcaaatgtacaaaatatgcatgatggcaccatattgtgtataatagtgacaaatacagtctatgtgggtggagaaacaagctcggtgttgtg

SEQ ID NO: 406790 - DNA, 2836 bp, Homo sapiens
tgagatggagtttcgctcttgttgcccaggctggaagttgtttttgttggaaacactctttgtcaagtacctgggggtcttcatcagtaagacctcattttagatgcctcctggcctccccttcccaggagcacagctatgaccttaggtactccttccgaaaagaacttgtttaactaaaggtaagtgtacctcatcctcaccatggcctccttccactggggaagcagatagcgcagaaaaaagaacacacccattccccacataccttcacactcgtcacatacctgctacgtgagatgtgcaaagctgaattcagggaatgctcagtagttacataacagtgccactaaaggcaattgttttcagtgatttccatcgagctgggttctgcaaagatccacagcactttccggttgcatgctgggcacttttggaagctgcagtcaattctggaggccaccagggcaccattagcacatagcagcaattattgactaaatggtgctctggttccatgccttccaagggggcccacttagaggcagggtggagttgcttagggccttttttttttttttttttgtaggatggagttttgctcttgttgcccaagctggagtgcaatggtgcgatcttcgcttactgcaacctctgcttcctgggttcaagtgattcccctgcctcagcctcccgagtagcagggattacagacacatatactcacagaaatgagttatttaaagaagacggtccagattccacagtccaaaaaaaaaagaggtttgccctgcttctgaaggagtcagggtatgaatgcagaggtcttcctgttggctcacatatcagatcttcaacgtcaacattaaatgcgagtgatgcttccccctctgtgaatgtggctttgggtatggctaatccacaccctgcactctggccttcagaagcccagggagagaagcctcccagaagcaaccttccagaaccttctccatcctcccaccgacctccccagcccctgtcctctctttgaatctcgttgtcaagttcttcccgcagacacctggctccttgaggggaggtgcagctttcatctgaccatgcaggcgtgctttgcagtgggtagagcagtgctttcctcctcccagctgcacactggaatcacctggagagtccagaaacttcccgcctcagtgaaagaacatcagtgtatcagcacagcaaatattccaaatgccaggctggattccctccaattaccaggacctccaggcttctcctcctttcaagaactttctgaccctggatccagtctaaatgttggttataaactcacctgacatccacagggcccttccaaaatactgtcaaggctgactgctggtgcctggaacctgcacaccctcctgggactctgcatctctgctggggctggtttctcctctgagccaccttaaggaatcccaccctgacccggtcagagctcaccatgcctccctctcctacttgctcagcattttgtgtctatctagactgaagcctttgctttctctctgtgattgtggtgaaagttcagtttgctttcctatctctagaatgtcagcacgaaggcagaggcatggtctcctgagttccataaccccaaagcctaactccctgcctgccacactgaggggcttagtagacattgacttactaaattgaatagttgagtaataatgctctttgaaataatttggagttagatcttgagccttgtgtggccagaggatgggtgaggacacatcataaaaactaaaggtaactgagcatgccagtggttggggtgagaaatttgcatggagcactccagacacagaggcagcaaaacccaagtgctgggaagtcagagtgagagagtgaaggggcagtgagtgcttctttaggagctggatcaaaacctaagatgatctggccacatggtgcagactgagcacacacttgggagagaaatgggccaggaggagaggagagaggttcaccacaggacagtggatgactgggaatagaagccctccccatggtggaccaagaagtctgtgaagctgagagaaagacaaaagaaatcacgacttctgtaggtagctgggatggaaacctcaggggtgacagggtctttaaaggaaatctcaaggaaggcatcatgttctgggtgtgctccagggatgctgagtaagaaaagaccagcctttctgtgtgtgtctttactctgccacaaggcacctgggctcctaaatgaccaatacacatgtgctatactggtgccaagaaagaagggtgttttgtaggaaagtcaaggtgagaggaggtgcccaggacttggctcctttctttgaagggtgacggtgtaaattctccatgctggggatcctactgatggatggaggcatgtcgatctcatcatttcacagagtggggagctatggccacaacgtgcctatcacacaagtccagcctcacgtcagctggacaccagctgttctgacacttgtcagcacatggggcacccggaagttcatggtgttctgcaaagaacgccacaaaacagtgagctcaacttcttgaaagtcataatgtgttgctaagtccgatcccagatcctaaaaataatatgaggtagtggccattgaacagaaaaaatttacatcttaaacttgaagataagtacaagtgtacctttttctaccactgttgttcagttttattatattgacaagcacctctgcccaccctgtggggtaaaactgtttgaaagtgtttatgaaagttttatataaatattggttgatcaaatgta

SEQ ID NO: 406791 - DNA, 2450 bp, Homo sapiens
tgagatggagtttcgctcttgttgcccaggctggaagttgtttttgttggaaacactctttgtcaagtacctgggggtcttcatcagtaagacctcattttagatgcctcctggcctccccttcccaggagcacagctatgaccttaggtactccttccgaaaagaacttgtttaactaaaggtaagtgtacctcatcctcaccatggcctccttccactggggaagcagatagcgcagaaaaaagaacacacccattccccacataccttcacactcgtcacatacctgctacgtgagatgtgcaaagctgaattcagggaatgctcagtagttacataacagtgccactaaaggcaattgttttcagtgatttccatcgagctgggttctgcaaagatccacagcactttccggttgcatgctgggcacttttggaagctgcagtcaattctggaggccaccagggcaccattagcacatagcagcaattattgactaaatggtgctctggttccatgccttccaagggggcccacttagaggcagggtggagttgcttagggccttttttttttttttttttgtaggatggagttttgctcttgttgcccaagctggagtgcaatggtgcgatcttcgcttactgcaacctctgcttcctgggttcaagtgattcccctgcctcagcctcccgagtagcagggattacagatggagcctcgctctgtcacccaggctggagtgcagtggcacaatctcgggtcactgcaacctccgccccccagcttcaagcgattctcctgtctcagcctcccgagtagctaggattacaggtgcacgccaccaggcctggctaatttttatatttttagtagagatgggattttgccttgttggccaggctggtctcaaactcctgacctcaggtgacccatccaccttggcctcccaaagtgctgggactacaggtgtgagccaccatgcctggtcccccacttgttgattttgcagaaaagatagctgtgttacaacctgtcctaaggtcaggtatgaatacttgtgcttctttcttggctccccaagccagagggcattcctatgcccaggtgagagagcacggagtgttactttggcagcacagtcagttaccagaggtaggaaaagcaaaggccaggcaggacatgaggggcccttgcactggctggttctccctgccttcaccaccctccaggtgaatgactgggtgaataatgattgactgaggaggtaatgaataatttatggacactgctggacctcagtctcctcatctgaaagatgagtggttggagaagtttaatggttttcaaatgctttttttttcagtcttcaaataagtgtttacgtagaagcaccatatctgaaacaggtgacagtggaccagtctgaatgaaatgagggttggcaggcctgagctccaaaaccttctgattgcccaagccctccttgtcttgcttggattatctccacacaaatggagaaactggacaaggtggtcatggaggtccctgaaagctcaaagactttctcattccaggattccccatgttcatatgccagcatggcatgggggtgctctgtagtcaagcagggtcctttggggggcttagggatggagccaggaaatggctctgggactcagcgggtgtccagagtctcatcagcagggtttctttactttcactgagtggctggtgcctgcacactgagttttgcaggcttactctcacagagtgagcttcctgcaggccccccactgcaacccctttccttcctggagctgtgtgctgactggtgcgtgagcaccccaggccctctccccatgctgctgatggtcagctttctctgcacgctcgtggttgccacagtcaacgctgataaaattgctgatgcagattgcctgcccagctgcgagtgctggcacgggaccagcagcccagacggtcactggaagtggttgggctgattattggcatcatctccattgtcctactcggttcttaaaggcatatggacttgcctcactcctacagcaaatgacggcatgggcaaagaggggcaacagacccaccctgaagacactcctcatctggttgacttggcagggttaagggaaaaagatgtgatgactaggagctgagagcttagtggttctgccagagctgcagagtctttgttggcctcagggtgggacctctcacatctctgtcagcttttcacagacaccaacctgttatgattcatttcacctgtcctgagcactagcaagaaaaattcgctgtagcttgtgatgtattattctggatttctcaactcattcatttgttcattcattcactataccattactgtctattataaggggggcacaatggtaggtgctgggaataaaaacgatgtttaacgttt

SEQ ID NO: 406792 - DNA, 2404 bp, Homo sapiens
tgagatggagtttcgctcttgttgcccaggctggaagttgtttttgttggaaacactctttgtcaagtacctgggggtcttcatcagtaagacctcattttagatgcctcctggcctccccttcccaggagcacagctatgaccttaggtactccttccgaaaagaacttgtttaactaaaggtaagtgtacctcatcctcaccatggcctccttccactggggaagcagatagcgcagaaaaaagaacacacccattccccacataccttcacactcgtcacatacctgctacgtgagatgtgcaaagctgaattcagggaatgctcagtagttacataacagtgccactaaaggcaattgttttcagtgatttccatcgagctgggttctgcaaagatccacagcactttccggttgcatgctgggcacttttggaagctgcagtcaattctggaggccaccagggcaccattagcacatagcagcaattattgactaaatggtgctctggttccatgccttccaagggggcccacttagaggcagggtggagttgcttagggccttttttttttttttttttgtaggatggagttttgctcttgttgcccaagctggagtgcaatggtgcgatcttcgcttactgcaacctctgcttcctgggttcaagtgattcccctgcctcagcctcccgagtagcagggattacagatggagcctcgctctgtcacccaggctggagtgcagtggcacaatctcgggtcactgcaacctccgccccccagcttcaagcgattctcctgtctcagcctcccgagtagctaggattacaggtgcacgccaccaggcctggctaatttttatatttttagtagagatgggattttgccttgttggccaggctggtctcaaactcctgacctcaggtgacccatccaccttggcctcccaaagtgctgggactacaggtgtgagccaccatgcctggtcccccacttgttgattttgcagaaaagatagctgtgttacaacctgtcctaaggtcaggtatgaatacttgtgcttctttcttggctccccaagccagagggcattcctatgcccaggtgagagagcacggagtgttactttggcagcacagtcagttaccagaggtaggaaaagcaaaggccaggcaggacatgaggggcccttgcactggctggttctccctgccttcaccaccctccaggtgaatgactgggtgaataatgattgactgaggaggtaatgaataatttatggacactgctggacctcagtctcctcatctgaaagatgagtggttggagaagtttaatggttttcaaatgctttttttttcagtcttcaaataagtgtttacgtagaagcaccatatctgaaacaggtgacagtggaccagtctgaatgaaatgagggttggcaggcctgagctccaaaaccttctgattgcccaagccctccttgtcttgcttggattatctccacacaaatggagaaactggacaaggtggtcatggaggtccctgaaagctcaaagactttctcattccaggattccccatgttcatatgccagcatggcatgggggtgctctgtagtcaagcagggtcctttggggggcttagggatggagccaggaaatggctctgggactcagcgggtgtccagagtctcatcagcagggtttctttactttcactgagtggctggtgcctgcacactgagttttgcaggcttactctcacagagtgagcttcctgcaggccccccactgcaacccctttccttcctggagctgtgtgctgactggtgcgtgagcaccccaggccctctccccatgctgctgatggtcagctttctctgcacgctcgtggttgccacagtcaacgctgataaaattgctgatgcagattgcctgcccagctgcgagtgctggcacgggaccagcagcccagacggtcactggaagtggttgggctgattattggcatcattcctacagcaaatgacggcatgggcaaagaggggcaacagacccaccctgaagacactcctcatctggttgacttggcagggttaagggaaaaagatgtgatgactaggagctgagagcttagtggttctgccagagctgcagagtctttgttggcctcagggtgggacctctcacatctctgtcagcttttcacagacaccaacctgttatgattcatttcacctgtcctgagcactagcaagaaaaattcgctgtagcttgtgatgtattattctggatttctcaactcattcatttgttcattcattcactataccattactgtctattataaggggggcacaatggtaggtgctgggaataaaaacgatgtttaacgttt

SEQ ID NO: 406793 - DNA, 1796 bp, Homo sapiens
tgagatggagtttcgctcttgttgcccaggctggaagttgtttttgttggaaacactctttgtcaagtacctgggggtcttcatcagtaagacctcattttagatgcctcctggcctccccttcccaggagcacagctatgaccttaggtactccttccgaaaagaacttgtttaactaaaggtaagtgtacctcatcctcaccatggcctccttccactggggaagcagatagcgcagaaaaaagaacacacccattccccacataccttcacactcgtcacatacctgctacgtgagatgtgcaaagctgaattcagggaatgctcagtagttacataacagtgccactaaaggcaattgttttcagtgatttccatcgagctgggttctgcaaagatccacagcactttccggttgcatgctgggcacttttggaagctgcagtcaattctggaggccaccagggcaccattagcacatagcagcaattattgactaaatggtgctctggttccatgccttccaagggggcccacttagaggcagggtggagttgcttagggccttttttttttttttttttgtaggatggagttttgctcttgttgcccaagctggagtgcaatggtgcgatcttcgcttactgcaacctctgcttcctgggttcaagtgattcccctgcctcagcctcccgagtagcagggattacagtcttcaaataagtgtttacgtagaagcaccatatctgaaacaggtgacagtggaccagtctgaatgaaatgagggttggcaggcctgagctccaaaaccttctgattgcccaagccctccttgtcttgcttggattatctccacacaaatggagaaactggacaaggtggtcatggaggtccctgaaagctcaaagactttctcattccaggattccccatgttcatatgccagcatggcatgggggtgctctgtagtcaagcagggtcctttggggggcttagggatggagccaggaaatggctctgggactcagcgggtgtccagagtctcatcagcagggtttctttactttcactgagtggctggtgcctgcacactgagttttgcaggcttactctcacagagtgagcttcctgcaggccccccactgcaacccctttccttcctggagctgtgtgctgactggtgcgtgagcaccccaggccctctccccatgctgctgatggtcagctttctctgcacgctcgtggttgccacagtcaacgctgataaaattgctgatgcagattgcctgcccagctgcgagtgctggcacgggaccagcagcccagacggtcactggaagtggttgggctgattattggcatcatctccattgtcctactcggttcttaaaggcatatggacttgcctcactcctacagcaaatgacggcatgggcaaagaggggcaacagacccaccctgaagacactcctcatctggttgacttggcagggttaagggaaaaagatgtgatgactaggagctgagagcttagtggttctgccagagctgcagagtctttgttggcctcagggtgggacctctcacatctctgtcagcttttcacagacaccaacctgttatgattcatttcacctgtcctgagcactagcaagaaaaattcgctgtagcttgtgatgtattattctggatttctcaactcattcatttgttcattcattcactataccattactgtctattataaggggggcacaatggtaggtgctgggaataaaaacgatgtttaacgttt

SEQ ID NO: 406794 - DNA, 1319 bp, Homo sapiens
tgagatggagtttcgctcttgttgcccaggctggaagttgtttttgttggaaacactctttgtcaagtacctgggggtcttcatcagtaagacctcattttagatgcctcctggcctccccttcccaggagcacagctatgaccttaggtactccttccgaaaagaacttgtttaactaaaggtaagtgtacctcatcctcaccatggcctccttccactggggaagcagatagcgcagaaaaaagaacacacccattccccacataccttcacactcgtcacatacctgctacgtgagatgtgcaaagctgaattcagggaatgctcagtagttacataacagtgccactaaaggcaattgttttcagtgatttccatcgagctgggttctgcaaagatccacagcactttccggttgcatgctgggcacttttggaagctgcagtcaattctggaggccaccagggcaccattagcacatagcagcaattattgactaaatggtgctctggttccatgccttccaagggggcccacttagaggcagggtggagttgcttagggccttttttttttttttttttgtaggatggagttttgctcttgttgcccaagctggagtgcaatggtgcgatcttcgcttactgcaacctctgcttcctgggttcaagtgattcccctgcctcagcctcccgagtagcagggattacagacacatatactcacagaaatgagttatttaaagaagacggtccagattccacagtccaaaaaaaaaagaggtttgccctgcttctgaaggagtcagggtatgaatgcagaggtcttcctgttggctcacatatcagatcttcaacgtcaacattaaatgcgtgagtgcttgccaggctcacactgttgagagcagctttatggttgaatgtggcagtgtgttctgcaggagtcttctgtgagattagtgctactcttgccattttacaccactaaggaaactgtcactgactctagtctttggagtctgagccaagaagtctttttcttctaacctgggccatagagactctatggagaatgatgggaggtgatctacacagactcctccctcactgggttgatagctctgttgggaagatgttaacatccatcaggggaaaaaaccacgagagacagctcaagctagggaggcagagggttagcagcaaatgctaccccttctgagaactcagacattccagactcagagaccccatgagaagtttctgactcaggactgtgtaggcagtgctgcatgcatatgcctgccagggctcaatcagta

SEQ ID NO: 406795 - DNA, 839 bp, Homo sapiens
aggcgcgacccctcggcccagcttgaggcccggcctaggaccggaggcgcgacccctcggcccaccttgaggcccggcctaggactggaggcgcgacccctcggcccaccttgaggcccggcctaggaccggaggcgcgacccctgggcccaccttgaggcccggcctaggactggaggcgcgacccctcggcccaccttgaggcccggcctaggaccggaggcgcgacccctgggcccacctggcggcccggccggcacagcccgcctctcctctccaggccagggccccacaccttccgcctgacagccagccaagctcttcagtcccccgccctccacctgccagggaggctccgggcgttgtacctgccaccacggggtaggtacaaagcactgggaatacaaccttgaacaagacaagaatcctggccttcaaggaacttcgaaccttttgggggatatgataagacacattaggaatcaccatgttaatggttatctttcttgaaggatataagtccaggtgcttggggagacccgtaagtggttagagggaagctgcaaggaagagtatctaggaggtaactaggtgaagaattttcttcagggggaaagaaatccatgcataaagtcttggtgccttcaagaaattgaaagacatttagtgtggctgtaggacaggcaggaaagagaatttggaaagagcctgctggctgcagatggagatggcccctatggtttgaagttttaagctgagtctctgcaatggaaagacctttgtctttcctgtgtccggtgtgggggagtggactcttctgggtgagtcaccaccaaatg

SEQ ID NO: 406796 - DNA, 2591 bp, Homo sapiens
aggcgcgacccctcggcccagcttgaggcccggcctaggaccggaggcgcgacccctcggcccaccttgaggcccggcctaggactggaggcgcgacccctcggcccaccttgaggcccggcctaggaccggaggcgcgacccctgggcccaccttgaggcccggcctaggactggaggcgcgacccctcggcccaccttgaggcccggcctaggaccggaggcgcgacccctgggcccacctggcggcccggccggcacagcccgcctctcctctccaggccagggccccacaccttccgcctgacagccagccaagctcttcagtcccccgccctccacctgccagggaggctccgggcgttgtacctgccaccacggggtagacacatatactcacagaaatgagttatttaaagaagacggtccagattccacagtccaaaaaaaaaagaggtttgccctgcttctgaaggagtcagggtatgaatgcagaggtcttcctgttggctcacatatcagatcttcaacgtcaacattaaatgcgagtgatgcttccccctctgtgaatgtggctttgggtatggctaatccacaccctgcactctggccttcagaagcccagggagagaagcctcccagaagcaaccttccagaaccttctccatcctcccaccgacctccccagcccctgtcctctctttgaatctcgttgtcaagttcttcccgcagacacctggctccttgaggggaggtgcagctttcatctgaccatgcaggcgtgctttgcagtgggtagagcagtgctttcctcctcccagctgcacactggaatcacctggagagtccagaaacttcccgcctcagtgaaagaacatcagtgtatcagcacagcaaatattccaaatgccaggctggattccctccaattaccaggacctccaggcttctcctcctttcaagaactttctgaccctggatccagtctaaatgttggttataaactcacctgacatccacagggcccttccaaaatactgtcaaggctgactgctggtgcctggaacctgcacaccctcctgggactctgcatctctgctggggctggtttctcctctgagccaccttaaggaatcccaccctgacccggtcagagctcaccatgcctccctctcctacttgctcagcattttgtgtctatctagactgaagcctttgctttctctctgtgattgtggtgaaagttcagtttgctttcctatctctagaatgtcagcacgaaggcagaggcatggtctcctgagttccataaccccaaagcctaactccctgcctgccacactgaggggcttagtagacattgacttactaaattgaatagttgagtaataatgctctttgaaataatttggagttagatcttgagccttgtgtggccagaggatgggtgaggacacatcataaaaactaaaggtaactgagcatgccagtggttggggtgagaaatttgcatggagcactccagacacagaggcagcaaaacccaagtgctgggaagtcagagtgagagagtgaaggggcagtgagtgcttctttaggagctggatcaaaacctaagatgatctggccacatggtgcagactgagcacacacttgggagagaaatgggccaggaggagaggagagaggttcaccacaggacagtggatgactgggaatagaagccctccccatggtggaccaagaagtctgtgaagctgagagaaagacaaaagaaatcacgacttctgtaggtagctgggatggaaacctcaggggtgacagggtctttaaaggaaatctcaaggaaggcatcatgttctgggtgtgctccagggatgctgagtaagaaaagaccagcctttctgtgtgtgtctttactctgccacaaggcacctgggctcctaaatgaccaatacacatgtgctatactggtgccaagaaagaagggtgttttgtaggaaagtcaaggtgagaggaggtgcccaggacttggctcctttctttgaagggtgacggtgtaaattctccatgctggggatcctactgatggatggaggcatgtcgatctcatcatttcacagagtggggagctatggccacaacgtgcctatcacacaagtccagcctcacgtcagctggacaccagctgttctgacacttgtcagcacatggggcacccggaagttcatggtgttctgcaaagaacgccacaaaacagtgagctcaacttcttgaaagtcataatgtgttgctaagtccgatcccagatcctaaaaataatatgaggtagtggccattgaacagaaaaaatttacatcttaaacttgaagataagtacaagtgtacctttttctaccactgttgttcagttttattatattgacaagcacctctgcccaccctgtggggtaaaactgtttgaaagtgtttatgaaagttttatataaatattggttgatcaaatgtacaaaatatgcatgatggcaccatattgtgtataatagtgacaaatacagtctatgtgggtggagaaacaagctcggtgttgtg

SEQ ID NO: 406797 - DNA, 857 bp, Homo sapiens
gctctaatattcctctagtttcctttgtcacccaaaggatgtcctcatgattttggaagtcatggtcaaaaaactggtgtttgagttttcttttctgatcttctacccatttccccttttcttgccaaaaatcgtgtttcatcactggtcatttataacaaagttataagattacattatatctacagtattatgagattaaaaactttgctttaattagcaagaacgtgcaaaaagcaatcccacattctcattgccctgctagttctgcattctttcacagttcagcaaaactatctgaaatagtttctgggacatgagccaactcttcagccttagcttgttcattatattccttaagaagacttggaagactaattagttgaaccaaaagaagaatgtgctatgatatgagcaaaacaaatagaatgtcttaatgagagatgcttaaaatttcactttgtgaaacttttcctccctcataaaattttgttctatttttagttaatacatcaattcccaatgtcacagaagtaaaggagaacatgacatttggatcaactttagtcaccaacccaaatggaggatttctggtaagaatggagagaatgatatttattgacaacagatatgctatcattttaagtctttgtaagatctgttatataattttcagtctaatgatttctaattttaaaacaattttttaaaggcttgtgggcccttatatgcctatagatgtggacatttgcattacacaactggaatctgttctgacgtcagccccacatttcaagtcgtgaattccattgcccctgtacaaggtacagattttatgcaatgttcttgcatgttga

SEQ ID NO: 406798 - DNA, 582 bp, Homo sapiens
ggtaggctctctgcttagtttacataacattaaattactaatagcatgattattatctgattatgagtgttattgtcaattatcttaaaatcagtcataaaacaactcatataaactgtttctcaatgttcaaaaatgtttactgatttatttaacttccagggtgcttattggttctccgttagttggccaacccaaaaacagaactggagatgtctataagtgtccagttgggagaggtgaatcattaccttgcgtaaagttggatctaccaggtatgtaaaattaaaaaaatctggttttaggccaggtgcggtgagtcacgcctgtaatccccacactttaagaggtcaagacaggcatatcgtttgagcccaggagtttgagaccagcctgggcaacctgacgaaacctcatctctacaaaatatacaaaaatagctggatggggtggtgcactactgtagtcccagctactcaagaggatgaagtgtgaggatcgcttgagctcaggagtttgagactgcagtgaatggtaattgcgccactgcactccagcctgggtgacagagtgagaccctgt

SEQ ID NO: 406799 - DNA, 378 bp, Homo sapiens
agctttcgatggtaaccttaaccatgccttccataactcaaaacatgatggactcttagttaactctatgtaactggattttgtttttctcctaaagttgttctacgctgctgcgtatcattcaatgttgatgtgaaaaattcaatgactttcagcggcccggtggaagacatgtttggatatactgttcaacaatatgaaaatgaagaaggaaaatggtaagccagtgggttttgttgttgttatttacttatttcacaaggtaatgagaaatattatttgactacagtttcttttatgaatgaaactttaacagaatgaattatttatggtagaaaatgcagtctagtcatttggcaatggaagctaacttaaagt

SEQ ID NO: 406800 - DNA, 375 bp, Homo sapiens
ggtaggctctctgcttagtttacataacattaaattactaatagcatgattattatctgattatgagtgttattgtcaattatcttaaaatcagtcataaaacaactcatataaactgtttctcaatgttcaaaaatgtttactgatttatttaacttccagggtgcttattggttctccgttagttggccaacccaaaaacagaactggagatgtctataagtgtccagttgggagaggtgaatcattaccttgcgtaaagttggatctaccaggtatgtaaaattaaaaaaatctggttttaggccaggttgcagtgagccaagatcgtgccactgcacttcagcctgggcaacaagagcaaaactctgcctt

SEQ ID NO: 406801 - DNA, 2369 bp, Homo sapiens
acccgccttcctaccaccttaggggatttggcccggagaacgagatcaccctctcaatgaaaggcagatgtccctttaaggtttgcttctacagcccgtggactttagcctaaacacggacccgcgaagctggctttatttgtccatgtctcggacagagcctgggaagctgccagtgagatttcagagaccaagagcgcgaaggggcgggcgatgtggcaatccgtctgggatgtgaaaagcgtggagcgcatttagaggcattcgacgaaaacacaggaaatcactcctctcccgctcctgggcgccgctgccactggggcagaggactgggaaccgcggcagcgggataagtggcccagccagagagcgcagctcccgcgcccggtcctgccctgcgaaccagcgcggccccctggcgctgaggctgctccggccatggcccctcggccccgcgcccgcccaggggtcgctgtcgcctgctgctggctcctcactgacagggatggaagagaaaacttaggaagttgaagttggcattaaaataaaggactcgccaccactctgtgcaccttcttgagggagttcattcgtccggagcgcctcacagcttagtgcgcctgcgcacgcgcgaactgcggccccgctctcctttggggacgggagacgtgcgtcgggtcgcgggacgggggctgcgcatgcgccttcatttcgtcagcccgctgttgcgtgctgccagcgggaactgtgtaggggtagattttcgctgcagtgttccccgagcctgttagacgcagcgcgccgggagactgagagaggaaaggatagaggaagtgctgccctaggctgcatgagtcgaagcaagcgtgtttccttcccgccaggcaagtgcccttagaaaccgggccccgcccccttcctggcctgcattcccatcccctctcccggggcggaggtgaggacctccttggttcctttggttctgtcagtgagccccttccttggccatgaagctcgtgaggaagaacatcgagaaggacaatgcgggccaggtgaccctggtccccgaggagcctgaggacatgtggcacacttacaacctcgtgcaggtgggcgacagcctgcgcgcctccaccatccgcaaggtacagacagagtcctccacgggcagcgtgggcagcaaccgggtccgcactaccctcactctctgcgtggaggccatcgacttcgactctcaagcctgccagctgcgggttaaggggaccaacatccaagagaatgagtatgtcaagatgggggcttaccacaccatcgagctggagcccaaccgccagttcaccctggccaagaagcagtgggatagtgtggtactggagcgcatcgagcaggcctgtgacccagcctggagcgctgatgtggcggctgtggtcatgcaggaaggcctcgcccatatctgcttagtcactcccagcatgaccctcactcgggccaaggtggaggtgaacatccctaggaaaaggaaaggcaattgctctcagcatgaccgggccttggagcggttctatgaacaggtggtccaggctatccagcgccacatacactttgatgttgtaaagtgcatcctggtggccagcccaggatttgtgagggagcagttctgcgactacatgtttcaacaagcagtgaagaccgacaacaaactgctcctggaaaaccggtccaaatttcttcaggtacatgcctcctccggacacaagtactccctgaaagaggccctttgtgaccctactgtggctagccgcctttcagacactaaagctgctggggaagtcaaagccttggatgacttctataaaatgttacagcatgaaccggatcgagctttctatggactcaagcaggtggagaaggccaatgaagccatggcaattgacacattgctcatcagcgatgagctcttcaggcatcaggatgtagccacacggagccggtatgtgaggctggtggacagtgtgaaagagaatgcaggcaccgttaggatattctctagtcttcacgtttctggggaacagctcagccagttgactggggtagctgccattctccgcttccctgttcccgaactttctgaccaagagggtgattccagttctgaagaggattaatgattgaaacttaaaattgagacaatcttgtgtttcctaaactgttacagtacatttctcagcatccttgtgacagaaagctgcaagaatggcactttttgattcatacagggatttcttatgtctttggctacactagatattttgtgattggcaagacatgtatttaaacaataaactaaaaggaaataatctccacgtact

SEQ ID NO: 406802 - DNA, 8268 bp, Homo sapiens
acccgccttcctaccaccttaggggatttggcccggagaacgagatcaccctctcaatgaaaggcagatgtccctttaaggtttgcttctacagcccgtggactttagcctaaacacggacccgcgaagctggctttatttgtccatgtctcggacagagcctgggaagctgccagtgagatttcagagaccaagagcgcgaaggggcgggcgatgtggcaatccgtctgggatgtgaaaagcgtggagcgcatttagaggcattcgacgaaaacacaggaaatcactcctctcccgctcctgggcgccgctgccactggggcagaggactgggaaccgcggcagcgggataagtggcccagccagagagcgcagctcccgcgcccggtcctgccctgcgaaccagcgcggccccctggcgctgaggctgctccggccatggcccctcggccccgcgcccgcccaggggtcgctgtcgcctgctgctggctcctcactgttgttctacgctgctgcgtatcattcaatgttgatgtgaaaaattcaatgactttcagcggcccggtggaagacatgtttggatatactgttcaacaatatgaaaatgaagaaggaaaatgggtgcttattggttctccgttagttggccaacccaaaaacagaactggagatgtctataagtgtccagttgggagaggtgaatcattaccttgcgtaaagttggatctaccagttaatacatcaattcccaatgtcacagaagtaaaggagaacatgacatttggatcaactttagtcaccaacccaaatggaggatttctggcttgtgggcccttatatgcctatagatgtggacatttgcattacacaactggaatctgttctgacgtcagccccacatttcaagtcgtgaattccattgcccctgtacaagaatgcagcactcaactggacatagtcatagtgctggatggttccaacagtatttacccatgggacagtgttacagcttttttaaatgaccttcttgaaagaatggatattggtcctaaacagacacaggttggaattgtacagtatggagaaaacgtgacccatgagttcaacctcaataagtattcttccaccgaagaggtacttgttgcagcaaagaaaatagtccagagaggtggccgccagactatgacagctcttggaatagacacagcaagaaaggaggcattcacggaagcccggggtgcccgaagaggagttaaaaaagtcatggttattgtgacagatggagagtctcatgacaatcatcgactgaagaaggtcatccaagactgtgaagatgaaaacattcaacggttttccatagctattcttggcagctataaccgaggaaatttaagcactgaaaaatttgtggaggaaataaaatcaattgcaagtgaacccactgaaaagcatttcttcaatgtctctgatgaattggctctagtcaccattgttaaaactctgggagaaagaatatttgccctggaagccacagctgaccagtcagcagcttcatttgaaatggaaatgtctcagactggcttcagtgctcattattcacaggactgggtcatgcttggagcagtaggagcctatgattggaatggaacagttgtcatgcagaaggctagtcaaatcataatccctcgaaacacaacctttaatgttgagtctaccaaaaagaatgaaccgcttgcttcttatttaggttacactgtaaactctgctactgcttcttctggagatgtgctctatattgctggacagcctcggtacaatcatacaggccaggtcattatctacaggatggaagatggaaacatcaaaattctccagacgctcagtggagaacagattggttcctactttggcagtattttaacaacaactgacattgacaaggattctaatactgacattcttctagtcggagcccctatgtacatgggaacagagaaggaggagcaaggaaaagtgtatgtgtatgctctcaatcagacaaggtttgaatatcaaatgagcctggaacctattaagcagacgtgctgttcatctcggcagcacaattcatgcacaacagaaaacaaaaatgagccatgcggggctcgttttggaactgcaattgctgctgtaaaagacctcaatcttgatggatttaatgacatcgtgataggagctccgctggaagatgatcacgggggagctgtgtacatttatcatggaagtggcaagactataaggaaagagtatgcacaacgtattccatcaggtggggatggtaagacactgaaattttttggccagtctatccacggagaaatggatttaaatggtgacggtctgacagatgtgactattgggggccttggtggtgctgccctcttctggtcccgagatgtggccgtagttaaagtgaccatgaattttgagccaaataaagtgaatattcaaaagaaaaactgccatatggagggaaaggaaacagtatgcataaatgctacagtgtgttttgatgtgaaattaaagtctaaagaagacacgatttatgaagctgatttgcagtaccgtgtcaccctagattcactaagacaaatatcacgaagttttttctctggaactcaagagagaaaggttcaaaggaacatcacagttcgaaaatcagaatgcactaagcactccttctacatgttggacaagcatgactttcaggactctgtgagaataacgttggactttaatcttaccgatccagaaaatgggcctgttcttgatgattctttaccaaactcagtacatgaatatattccctttgccaaagattgtggaaataaggaaaaatgtatctcagacctcagcctgcatgtcgccaccactgaaaaggacctgctgattgtccgatcccagaatgataagttcaacgttagcctcacagtcaaaaatacaaaggacagtgcctataacaccaggacaatagtgcattattctccaaatctagttttttcaggaattgaggctatccaaaaagacagttgtgaatctaatcataatatcacatgtaaagttggatatcccttcctgagaagaggagagatggtaactttcaaaatattgtttcagtttaacacatcctatctcatggaaaatgtgaccatttatttaagtgcaacaagtgacagcgaagaacctcctgaaaccctttctgataatgtagtaaacatttctatcccggtaaaatatgaagttggactacagttttacagctctgcaagtgaataccacatttcaattgctgccaatgagacagtccctgaagttattaattctactgaggacattggaaatgaaattaatatcttctacttgattagaaaaagtggatcttttccaatgccagagcttaagctgtcaatttcattccccaatatgacatcaaatggttaccctgtgctgtacccaactggattgtcatcttctgagaatgcaaactgcagaccccatatctttgaggatcctttcagtatcaactctggaaagaaaatgactacatcaactgaccatctcaaacgaggcacaattctggactgcaatacatgtaaatttgctaccatcacatgtaatctcacttcttctgacatcagccaagtcaatgtttcgcttatcttgtggaaaccaacttttataaaatcatatttttccagcttaaatcttactataaggggagaacttcggagtgaaaatgcatctctggttttaagtagcagcaatcaaaaaagagagcttgctattcaaatatccaaagatgggctaccgggcagagtgccattatgggtcatcctgctgagtgcttttgccggattgttgctgttaatgctgctcattttagcactgtggaagattggattcttcaaaagaccactgaaaaagaaaatggagaaatgaaatattttacgaaagaaaataataacaattattcaataatctatcctcaggtttgcctcaaatatgtgacaagaaatgtataattcatgacatagtcatgtaactatgtaatccatcagggattcattacttggaaaatgacaggtcatgcattatccaaaaacaataccaaaaagacatattttataaaatgacaaaaaatattttacataattactcatttttgttgagtaagcaaaattacaaagtgtttttaaaaaaacctgtacaaatatgtttatgtattaaatcaccatccaaaatatttaaggaatatataaaaagatttttatgatcatagaaacatctattttcaaaacaatataaattaagcttttccccttgattcctgttggatatccatgttcagcatgacagtcagcactcgtaaatgccaagaaaagaattacctgaaaaagatcatttctccctattcaaatgagaatattttccctcggtagaatccatatacaatatggattgaaaattaagtcaccaagaatacatttagcatctttgtgttgggttctatacctaaaaattttccctccctgcccaaggtgattggaaagtactgcaattgagctaaaattttatctaggatggaaaatcaggatagactcgtttaaaaacaagtatattaaatgggttaaattaagcttttacagaacatgcttaattttgatattgagctctaaatgcaaaactcttttatactgaaaaaacacttaaagtagttttgtgtggcatcacagtgatttgtcatgaaaagccatatatgggggacatgctaaaatggcttctgaatgaaatacgacagcagagaaagatgccactgaaatgctgaaattatctttgctgagcagcttttgaatgctaagggttccagtatgtgacccaaagaaggagttgtctcaactccttggtacagggttcattcaaacccccaagctgtgagagtgtgtttatttttaattttttaaaaggtatttaatttccaaccacacttcttatttttttgaaaagacaattttccatttcagtattacattttaccaagaagtcactgctttttaggtgtgttgcatcaatatttaaataaaatcccagaaatgtattttaaagaatttcaggtttgaaaactcaaaccaacaggaagatatcacacctttgtatgtgcttctttgttcttgaagtagtcattatggttcattggaatctactgtagcataagctcctaggttgctccatttcttaggaaaatagcaatgaatgaatgtatagtagctgcatgtgtgaactactgctgtaaagtttgctgacatttctgcaacaacatttctccatctgatttaccagaacctgtaacaagaccagaacatgtattcatccagaaactcctgggctctgctttgttcaaagaggagcaaatccacatagaaattaaatgttataaatttatttttttcaaactaatttccaaagaatttagctgaagactcagagtcagcctacctcttgactctccacatccgcatctaagatcctgaaggccaaaggaatgtgcctgtgggatgccaaagccatcagtagctggaagaaagaatacctctttctagaggtttggtgtcctcttgctggcctgtcattatttggaaatacgcgcttttggaatttccttcattttcgctatttccaggttcagaaatcatacctaccacttgttctttctttgcccagtaaaactcagggtttctcttattcagagttaccatgttgcacacccccagtgctcagcctgcccagaagcccttctctgatctcagcaagatcttagtagtaaagctaacggatccattgaaattcatactcagcatctgtgactactagacaaagcccatttactgaaccataagtgtgcacttttaaactaaattattaactgaaagggaaaaaatagaaatgagggcattttgaagtttttagaaaagagaggaagagctgttggccagatcaaagagatacttataagcccggcacaatttttaacataagtcattcctggctattaagtaaaatatttcatgaaccagaagtcctgtttctctaatattataatttgttgaggtttgtgtgtgtgtgtgtgtgcatgtgcagacacatgtacacatataaattgaatacaaaaatagctctataacaccaaaaaacagagtttacagaaaataaacacaaaagctatatctgcaagacaagtttgattcatctagtttcatatagtttcatatagtttcatttttattaatatttaggtttaacttatagttctgcaattatttaaaaaacaagtacagagcgtttgattaaaaaaagtcaacaaatgtttcaaaacagctttgtacaaatgttataaaacatatttaatgattaagaaatgtactagactctatcatttacttttaaaacatttaattagaaaaacaggtgatatttaagactatttataaacttattggccaaattgccaaaaagtttctttttctctaactttggtattctaaataattgattattgctcccattgtaaactgaaccatgtatgcactctcttttctgaccaaactacaatggtatattggtaaattatttaacaacacactgtccaggagggaaaaaaaaaaaacagtctctgatttgtatcatttgccaatttccatggtccaaatattctctctccattttcaaactaccaaagtgaccctaatcagcttacaaaattcctggagatagatagatagatagatagatagatagatagatagatagatattgatagagaacatgttgtgtctatatacatatccaatgacacacagtataatcatgttttaaattatgccaaaagtactgattatatcaagcccagtaaacataatgctacacagcacccattctttaattttgatttctaaaattataaccttcctttgatattaataaaatgttatgaacttgcaggagaaggaaggagttgaaagaaggaaaatataaagggtgatccacagtgaaaatcagacctacacaagccacaaaaaaattgtctcattttcccaaggaattcaaagtcctgtgatacacattacaaaagatgacactttgtaaatattttgaacttctatgatccaatttcaacttcattggtccaatttgtcaaactattttcctctgagcactagattcatgggcaatttaatctctgaatattttctgtgtcataagtgtgcttgaaaagaggcttgtagtaaacagatatttttacaaaatttgatgcttctgcaaccataataattttatctataaatgcgtatattacatatatatatatatatacacatacactcacatgcagatatttacatatatagatattctcttttccttttataaaatcaaagtctaggctcaattggaaaatggaaatatttgcaccaaaagaaaaaagtgccattgttgtgatcaatggagtaaagctggggtatagtagaggctggggaagccctgcccatgttctctccaaggccacagcttgcacaccgtgaatggtggccccactggctccatggagtgtgccttcacgcgggggaatgtccttgtccaacacgctgtaatctactccatgggaactgactgtcctgcttttcacaacattgagaaacaggcccagagcctgtctcatgtgccaggtgcagtcacattattgttaaaataaagtggcttctgacaaatcagtttttcaaaatagcatcctatgtacttttcatttcttccaacaaccctcaggcccccttttgccagttttctcccccaggggagattttcaagactactggagaaaaatctgttaataaaacatttgctctgaaaaaaaaaaaaaaaaaaaaaaaaaaaaaaaaacaaattcgatcaaagaaaaacaacaaacgaggagggggcgccgcgcctcaaaagaaaattccccgcgaagggggccaccatcattatcagcgccgccagccgcagatttgtgtgagaaagagggggctcccacctaagggaagggcccggtatcaaacaagagcagccgccgcgggccgtgtctaaaaacgaccagtcagcagggtgcgaaaacagcgtccagtgcgggcgacacccgttgaaaggaaggaacaccccatcctggggggcggagaacaatggggcacaaactgccgg

SEQ ID NO: 406803 - DNA, 7322 bp, Homo sapiens
acccgccttcctaccaccttaggggatttggcccggagaacgagatcaccctctcaatgaaaggcagatgtccctttaaggtttgcttctacagcccgtggactttagcctaaacacggacccgcgaagctggctttatttgtccatgtctcggacagagcctgggaagctgccagtgagatttcagagaccaagagcgcgaaggggcgggcgatgtggcaatccgtctgggatgtgaaaagcgtggagcgcatttagaggcattcgacgaaaacacaggaaatcactcctctcccgctcctgggcgccgctgccactggggcagaggactgggaaccgcggcagcgggataagtggcccagccagagagcgcagctcccgcgcccggtcctgccctgcgaaccagcgcggccccctggcgctgaggctgctccggccatggcccctcggccccgcgcccgcccaggggtcgctgtcgcctgctgctggctcctcactgttgttctacgctgctgcgtatcattcaatgttgatgtgaaaaattcaatgactttcagcggcccggtggaagacatgtttggatatactgttcaacaatatgaaaatgaagaaggaaaatgggtgcttattggttctccgttagttggccaacccaaaaacagaactggagatgtctataagtgtccagttgggagaggtgaatcattaccttgcgtaaagttggatctaccagttaatacatcaattcccaatgtcacagaagtaaaggagaacatgacatttggatcaactttagtcaccaacccaaatggaggatttctggcttgtgggcccttatatgcctatagatgtggacatttgcattacacaactggaatctgttctgacgtcagccccacatttcaagtcgtgaattccattgcccctgtacaagaatgcagcactcaactggacatagtcatagtgctggatggttccaacagtatttacccatgggacagtgttacagcttttttaaatgaccttcttgaaagaatggatattggtcctaaacagacacaggttggaattgtacagtatggagaaaacgtgacccatgagttcaacctcaataagtattcttccaccgaagaggtacttgttgcagcaaagaaaatagtccagagaggtggccgccagactatgacagctcttggaatagacacagcaagaaaggaggcattcacggaagcccggggtgcccgaagaggagttaaaaaagtcatggttattgtgacagatggagagtctcatgacaatcatcgactgaagaaggtcatccaagactgtgaagatgaaaacattcaacggttttccatagctattcttggcagctataaccgaggaaatttaagcactgaaaaatttgtggaggaaataaaatcaattgcaagtgaacccactgaaaagcatttcttcaatgtctctgatgtgactattgggggccttggtggtgctgccctcttctggtcccgagatgtggccgtagttaaagtgaccatgaattttgagccaaataaagtgaatattcaaaagaaaaactgccatatggagggaaaggaaacagtatgcataaatgctacagtgtgttttgatgtgaaattaaagtctaaagaagacacgatttatgaagctgatttgcagtaccgtgtcaccctagattcactaagacaaatatcacgaagttttttctctggaactcaagagagaaaggttcaaaggaacatcacagttcgaaaatcagaatgcactaagcactccttctacatgttggacaagcatgactttcaggactctgtgagaataacgttggactttaatcttaccgatccagaaaatgggcctgttcttgatgattctttaccaaactcagtacatgaatatattccctttgccaaagattgtggaaataaggaaaaataaaggacagtgcctataacaccaggacaatagtgcattattctccaaatctagttttttcaggaattgaggctatccaaaaagacagttgtgaatctaatcataatatcacatgtaaagttggatatcccttcctgagaagaggagagatggtaactttcaaaatattgtttcagtttaacacatcctatctcatggaaaatgtgaccatttatttaagtgcaacaagtgacagcgaagaacctcctgaaaccctttctgataatgtagtaaacatttctatcccggtaaaatatgaagttggactacagttttacagctctgcaagtgaataccacatttcaattgctgccaatgagacagtccctgaagttattaattctactgaggacattggaaatgaaattaatatcttctacttgattagaaaaagtggatcttttccaatgccagagcttaagctgtcaatttcattccccaatatgacatcaaatggttaccctgtgctgtacccaactggattgtcatcttctgagaatgcaaactgcagaccccatatctttgaggatcctttcagtatcaactctggaaagaaaatgactacatcaactgaccatctcaaacgaggcacaattctggactgcaatacatgtaaatttgctaccatcacatgtaatctcacttcttctgacatcagccaagtcaatgtttcgcttatcttgtggaaaccaacttttataaaatcatatttttccagcttaaatcttactataaggggagaacttcggagtgaaaatgcatctctggttttaagtagcagcaatcaaaaaagagagcttgctattcaaatatccaaagatgggctaccgggcagagtgccattatgggtcatcctgctgagtgcttttgccggattgttgctgttaatgctgctcattttagcactgtggaagattggattcttcaaaagaccactgaaaaagaaaatggagaaatgaaatattttacgaaagaaaataataacaattattcaataatctatcctcaggtttgcctcaaatatgtgacaagaaatgtataattcatgacatagtcatgtaactatgtaatccatcagggattcattacttggaaaatgacaggtcatgcattatccaaaaacaataccaaaaagacatattttataaaatgacaaaaaatattttacataattactcatttttgttgagtaagcaaaattacaaagtgtttttaaaaaaacctgtacaaatatgtttatgtattaaatcaccatccaaaatatttaaggaatatataaaaagatttttatgatcatagaaacatctattttcaaaacaatataaattaagcttttccccttgattcctgttggatatccatgttcagcatgacagtcagcactcgtaaatgccaagaaaagaattacctgaaaaagatcatttctccctattcaaatgagaatattttccctcggtagaatccatatacaatatggattgaaaattaagtcaccaagaatacatttagcatctttgtgttgggttctatacctaaaaattttccctccctgcccaaggtgattggaaagtactgcaattgagctaaaattttatctaggatggaaaatcaggatagactcgtttaaaaacaagtatattaaatgggttaaattaagcttttacagaacatgcttaattttgatattgagctctaaatgcaaaactcttttatactgaaaaaacacttaaagtagttttgtgtggcatcacagtgatttgtcatgaaaagccatatatgggggacatgctaaaatggcttctgaatgaaatacgacagcagagaaagatgccactgaaatgctgaaattatctttgctgagcagcttttgaatgctaagggttccagtatgtgacccaaagaaggagttgtctcaactccttggtacagggttcattcaaacccccaagctgtgagagtgtgtttatttttaattttttaaaaggtatttaatttccaaccacacttcttatttttttgaaaagacaattttccatttcagtattacattttaccaagaagtcactgctttttaggtgtgttgcatcaatatttaaataaaatcccagaaatgtattttaaagaatttcaggtttgaaaactcaaaccaacaggaagatatcacacctttgtatgtgcttctttgttcttgaagtagtcattatggttcattggaatctactgtagcataagctcctaggttgctccatttcttaggaaaatagcaatgaatgaatgtatagtagctgcatgtgtgaactactgctgtaaagtttgctgacatttctgcaacaacatttctccatctgatttaccagaacctgtaacaagaccagaacatgtattcatccagaaactcctgggctctgctttgttcaaagaggagcaaatccacatagaaattaaatgttataaatttatttttttcaaactaatttccaaagaatttagctgaagactcagagtcagcctacctcttgactctccacatccgcatctaagatcctgaaggccaaaggaatgtgcctgtgggatgccaaagccatcagtagctggaagaaagaatacctctttctagaggtttggtgtcctcttgctggcctgtcattatttggaaatacgcgcttttggaatttccttcattttcgctatttccaggttcagaaatcatacctaccacttgttctttctttgcccagtaaaactcagggtttctcttattcagagttaccatgttgcacacccccagtgctcagcctgcccagaagcccttctctgatctcagcaagatcttagtagtaaagctaacggatccattgaaattcatactcagcatctgtgactactagacaaagcccatttactgaaccataagtgtgcacttttaaactaaattattaactgaaagggaaaaaatagaaatgagggcattttgaagtttttagaaaagagaggaagagctgttggccagatcaaagagatacttataagcccggcacaatttttaacataagtcattcctggctattaagtaaaatatttcatgaaccagaagtcctgtttctctaatattataatttgttgaggtttgtgtgtgtgtgtgtgtgcatgtgcagacacatgtacacatataaattgaatacaaaaatagctctataacaccaaaaaacagagtttacagaaaataaacacaaaagctatatctgcaagacaagtttgattcatctagtttcatatagtttcatatagtttcatttttattaatatttaggtttaacttatagttctgcaattatttaaaaaacaagtacagagcgtttgattaaaaaaagtcaacaaatgtttcaaaacagctttgtacaaatgttataaaacatatttaatgattaagaaatgtactagactctatcatttacttttaaaacatttaattagaaaaacaggtgatatttaagactatttataaacttattggccaaattgccaaaaagtttctttttctctaactttggtattctaaataattgattattgctcccattgtaaactgaaccatgtatgcactctcttttctgaccaaactacaatggtatattggtaaattatttaacaacacactgtccaggagggaaaaaaaaaaaacagtctctgatttgtatcatttgccaatttccatggtccaaatattctctctccattttcaaactaccaaagtgaccctaatcagcttacaaaattcctggaaatgtatctgccacctcttaccaaccagtgtgagctgacttcagcacaccactgagacagattacacgatagacagatagatagatagatagatagatagatagatagatagatagatattgatagagaacatgttgtgtctatatacatatccaatgacacacagtataatcatgttttaaattatgccaaaagtactgattatatcaagcccagtaaacataatgctacacagcacccattctttaattttgatttctaaaattataaccttcctttgatattaataaaatgttatgaacttgcaggagaaggaaggagttgaaagaaggaaaatataaagggtgatccacagtgaaaatcagacctacacaagccacaaaaaaattgtctcattttcccaaggaattcaaagtcctgtgatacacattacaaaagatgacactttgtaaatattttgaacttctatgatccaatttcaacttcattggtccaatttgtcaaactattttcctctgagcactagattcatgggcaatttaatctctgaatattttctgtgtcataagtgtgcttgaaaagaggcttgtagtaaacagatatttttacaaaatttgatgcttctgcaaccataataattttatctataaatgcgtatattacatatatatatatatatacacatacactcacatgcagatatttacatatatagatattctcttttccttttataaaatcaaagtctaggctcaattggaaaatggaaatatttgcaccaaaagaaaaaagtgccattgttgtgatcaatggagtaaagctggggtatagtagaggctggggaagccctgcccatgttctctccaaggccacagcttgcacaccgtgaatggtggccccactggctccatggagtgtgccttcacgcgggggaatgtccttgtccaacacgctgtaatctactccatgggaactgactgtcctgcttttcacaacattgagaaacaggcccagagcctgtctcatgtgccaggtgcagtcacattattgttaaaataaagtggcttctgacaaatcagtttttcaaaatagcatcctatgtacttttcatttcttccaacaaccctcaggcccccttttgccagttttctcccccaggggagattttcaagactactggagaaaaatctgttaataaaacatttgctctgaaaaaaaaaaaaaaaaaaaaaaaaaaaaaaaaacaaattcgatcaaagaaaaacaacaaacgaggagggggcgccgcgcctcaaaagaaaattccccgcgaagggggccaccatcattatcagcgccgccagccgcagatttgtgtgagaaagagggggctcccacctaagggaagggcccggtatcaaacaagagcagccgccgcgggccgtgtctaaaaacgaccagtcagcagggtgcgaaaacagcgtccagtgcgggcgacacccgttgaaaggaaggaacaccccatcctggggggcggagaacaatggggcacaaactgccgg

SEQ ID NO: 406804 - DNA, 2938 bp, Homo sapiens
acccgccttcctaccaccttaggggatttggcccggagaacgagatcaccctctcaatgaaaggcagatgtccctttaaggtttgcttctacagcccgtggactttagcctaaacacggacccgcgaagctggctttatttgtccatgtctcggacagagcctgggaagctgccagtgagatttcagagaccaagagcgcgaaggggcgggcgatgtggcaatccgtctgggatgtgaaaagcgtggagcgcatttagaggcattcgacgaaaacacaggaaatcactcctctcccgctcctgggcgccgctgccactggggcagaggactgggaaccgcggcagcgggataagtggcccagccagagagcgcagctcccgcgcccggtcctgccctgcgaaccagcgcggccccctggcgctgaggctgctccggccatggcccctcggccccgcgcccgcccaggggtcgctgtcgcctgctgctggctcctcactgacagggatggaagagaaaacttaggaagttgaagttggcattaaaataaaggactcgccaccactctgtgcaccttcttgagggagttcattcgtccggagcgcctcacagcttagtgcgcctgcgcacgcgcgaactgcggccccgctctcctttggggacgggagacgtgcgtcgggtcgcgggacgggggctgcgcatgcgccttcatttcgtcagcccgctgttgcgtgctgccagcgggaactgtgtaggggtagattttcgctgcagtgttccccgagcctgttagacgcagcgcgccgggagactgagagaggaaaggatagaggaagtgctgccctaggctgcatgagtcgaagcaagcgtgtttccttcccgccaggcaagtgcccttagaaaccgggccccgcccccttcctggcctgcattcccatcccctctcccggggcggaggtgaggacctccttggttcctttggttctgtcagtgagccccttccttggccatgaagctcgtgaggaagaacatcgagaaggacaatgcgggccaggtgaccctggtccccgaggagcctgaggacatgtggcacacttacaacctcgtgcaggtgggcgacagcctgcgcgcctccaccatccgcaaggtacagacagagtcctccacgggcagcgtgggcagcaaccgggtccgcactaccctcactctctgcgtggaggccatcgacttcgactctcaagcctgccagctgcgggttaaggggaccaacatccaagagaatgagtatgtcaagatgggggcttaccacaccatcgagctggagcccaaccgccagttcaccctggccaagaagcagtgggatagtgtggtactggagcgcatcgagcaggcctgtgacccagcctggagcgctgatgtggcggctgtggtcatgcaggaaggcctcgcccatatctgcttagtcactcccagcatgaccctcactcgggccaaggtggaggtgaacatccctaggaaaaggaaaggcaattgctctcagcatgaccgggccttggagcggttctatgaacaggtggtccaggctatccagcgccacatacactttgatgttgtaaagtgcatcctggtggccagcccaggatttgtgagggagcagttctgcgactacatgtttcaacaagcagtgaagaccgacaacaaactgctcctggaaaaccggtccaaatttcttcaggtacatgcctcctccggacacaagtactccctgaaagaggccctttgtgaccctactgtggctagccgcctttcagacactaaagctgctggggaagtcaaagccttggatgacttctataaaatgttacagcatgaaccggatcgagctttctatggactcaagcaggtggagaaggccaatgaagccatggcaattgacacattgctcatcagcgatgagctcttcaggcatcaggatgtagccacacggagccggtatgtgaggctggtggacagtgtgaaagagaatgcaggcaccgttaggatattctctagtcttcacgtttctggggaacagctcagccagttgactggggtagctgccattctccgcttccctgttcccgaactttctgaccaagagggtgattccagttctgaagaggattaatgattgaaacttaaaattgagacaatcttgtgtttcctaaactgttacagtacatttctcagcatccttgtgacagaaagctgcaagaatggcactttttgattcatacagggatttcttatgtctttggctacactagatattttgtgattggcaagacatgtatttaaacaataaactaaaaggaaataatctccacgtactaccatcttgattaaattgtgtaattttttataggaattatgagttatctgtagtacttggaaacagaaaatgtgtgtatttaaagacgatgcctatgcagtatattgtttgggatagattgcaaaatttcacactgcatgctttgaaacagttttccttagaaaaagcttttgctatcttatcctgtttacattatttctttattttaattctgcttggtgttcttgcattgcatttaatgatcccttttctccccacctccacacactacattttttttagatttaaatagttttactattttaaatgattgccgtacaattagtagacttgaagacaagttttaaatatttttcttcaaaggcttgttaaaccaatcatgttaaaaggaaattcttggttttggtttgttgttgttagcattagtcatatttgatttagagggtaacttaaatcagttatttttagctttttagaactttgatctgctagggattgtcaaaataatctccttgaggcatctttatttttaaaatgagattaaagtatgtgatttgcttgttatgtgg

SEQ ID NO: 406805 - DNA, 3451 bp, Homo sapiens
acccgccttcctaccaccttaggggatttggcccggagaacgagatcaccctctcaatgaaaggcagatgtccctttaaggtttgcttctacagcccgtggactttagcctaaacacggacccgcgaagctggctttatttgtccatgtctcggacagagcctgggaagctgccagtgagatttcagagaccaagagcgcgaaggggcgggcgatgtggcaatccgtctgggatgtgaaaagcgtggagcgcatttagaggcattcgacgaaaacacaggaaatcactcctctcccgctcctgggcgccgctgccactggggcagaggactgggaaccgcggcagcgggataagtggcccagccagagagcgcagctcccgcgcccggtcctgccctgcgaaccagcgcggccccctggcgctgaggctgctccggccatggcccctcggccccgcgcccgcccaggggtcgctgtcgcctgctgctggctcctcactgacagggatggaagagaaaacttaggaagttgaagttggcattaaaataaaggactcgccaccactctgtgcaccttcttgagggagttcattcgtccggagcgcctcacagcttagtgcgcctgcgcacgcgcgaactgcggccccgctctcctttggggacgggagacgtgcgtcgggtcgcgggacgggggctgcgcatgcgccttcatttcgtcagcccgctgttgcgtgctgccagcgggaactgtgtaggggtagattttcgctgcagtgttccccgagcctgttagacgcagcgcgccgggagactgagagaggaaaggatagaggaagtgctgccctaggctgcatgagtcgaagcaagcgtgtttccttcccgccaggcaagtgcccttagaaaccgggccccgcccccttcctggcctgcattcccatcccctctcccggggcggaggtgaggacctccttggttcctttggttctgtcagtgagccccttccttggccatgaagctcgtgaggaagaacatcgagaaggacaatgcgggccaggtgaccctggtccccgaggagcctgaggacatgtggcacacttacaacctcgtgcaggtgggcgacagcctgcgcgcctccaccatccgcaaggtacagacagagtcctccacgggcagcgtgggcagcaaccgggtccgcactaccctcactctctgcgtggaggccatcgacttcgactctcaagcctgccagctgcgggttaaggggaccaacatccaagagaatgagtatgtcaagatgggggcttaccacaccatcgagctggagcccaaccgccagttcaccctggccaagaagcagtgggatagtgtggtactggagcgcatcgagcaggcctgtgacccagcctggagcgctgatgtggcggctgtggtcatgcaggaaggcctcgcccatatctgcttagtcactcccagcatgaccctcactcgggccaaggtggaggtgaacatccctaggaaaaggaaaggcaattgctctcagcatgaccgggccttggagcggttctatgaacaggtggtccaggctatccagcgccacatacactttgatgttgtaaagtgcatcctggtggccagcccaggatttgtgagggagcagttctgcgactacatgtttcaacaagcagtgaagaccgacaacaaactgctcctggaaaaccggtccaaatttcttcaggtacatgcctcctccggacacaagtactccctgaaagaggccctttgtgaccctactgtggctagccgcctttcagacactaaagctgctggggaagtcaaagccttggatgacttctataaaatgttacagcatgaaccggatcgagctttctatggactcaagcaggtggagaaggccaatgaagccatggcaattgacacattgctcatcagcgatgagctcttcaggcatcaggatgtagccacacggagccggtatgtgaggctggtggacagtgtgaaagagaatgcaggcaccgttaggatattctctagtcttcacgtttctggggaacagctcagccagttgactggggtagctgccattctccgcttccctgttcccgaactttctgaccaagagggtgattccagttctgaagaggattaatgattgaaacttaaaattgagacaatcttgtgtttcctaaactgttacagtacatttctcagcatccttgtgacagaaagctgcaagaatggcactttttgattcatacagggatttcttatgtctttggctacactagatattttgtgattggcaagacatgtatttaaacaataaactaaaaggaaataatctccacgtactaccatcttgattaaattgtgtaattttttataggaattatgagttatctgtagtacttggaaacagaaaatgtgtgtatttaaagacgatgcctatgcagtatattgtttgggatagattgcaaaatttcacactgcatgctttgaaacagttttccttagaaaaagcttttgctatcttatcctgtttacattatttctttattttaattctgcttggtgttcttgcattgcatttaatgatcccttttctccccacctccacacactacattttttttagatttaaatagttttactattttaaatgattgccgtacaattagtagacttgaagacaagttttaaatatttttcttcaaaggcttgttaaaccaatcatgttaaaaggaaattcttggttttggtttgttgttgttagcattagtcatatttgatttagagggtaacttaaatcagttatttttagctttttagaactttgatctgctagggattgtcaaaataatctccttgaggcatctttatttttaaaatgagattaaagtatgtgatttgcttgttatgtggctaattagtggcaaagctggaagtcattcccagtctggactttagttctttgcgccaaaacatgctatattatttatttatttttttgcttgtcaaagttatacttaattctgttttatatttgtatgtggcattaatttgggtttgcacatttttattggactattttagttgtgaagaagcctgttctaaagtttaagtcacatgactagtatgtggcagttgacttaaactccaatactctttactatcattgacttaaactctgatactctttactataattatggaattgtgcaaatacctctgagtttaaaatattatttttattatttttggtgcacattcctaaaagttaaggaaggagcctcagtaatggaattgcttcttgaccttttgcaaacctcaatttagcaaaataattaggaacgatctaatagtgatgatacagtttttaactgctggatcagcgacgcctatttcaagtagtgatactaactaaactttcgccgg

SEQ ID NO: 406806 - DNA, 4936 bp, Homo sapiens
tcgagccggaccagcaggctgggcccagcttaagctgtcaatttcattccccaatatgacatcaaatggttaccctgtgctgtacccaactggattgtcatcttctgagaatgcaaactgcagaccccatatctttgaggatcctttcagtatcaactctggaaagaaaatgactacatcaactgaccatctcaaacgaggcacaattctggactgcaatacatgtaaatttgctaccatcacatgtaatctcacttcttctgacatcagccaagtcaatgtttcgcttatcttgtggaaaccaacttttataaaatcatatttttccagcttaaatcttactataaggggagaacttcggagtgaaaatgcatctctggttttaagtagcagcaatcaaaaaagagagcttgctattcaaatatccaaagatgggctaccgggcagagtgccattatgggtcatcctgctgagtgcttttgccggattgttgctgttaatgctgctcattttagcactgtggaagattggattcttcaaaagaccactgaaaaagaaaatggagaaatgaaatattttacgaaagaaaataataacaattattcaataatctatcctcaggtttgcctcaaatatgtgacaagaaatgtataattcatgacatagtcatgtaactatgtaatccatcagggattcattacttggaaaatgacaggtcatgcattatccaaaaacaataccaaaaagacatattttataaaatgacaaaaaatattttacataattactcatttttgttgagtaagcaaaattacaaagtgtttttaaaaaaacctgtacaaatatgtttatgtattaaatcaccatccaaaatatttaaggaatatataaaaagatttttatgatcatagaaacatctattttcaaaacaatataaattaagcttttccccttgattcctgttggatatccatgttcagcatgacagtcagcactcgtaaatgccaagaaaagaattacctgaaaaagatcatttctccctattcaaatgagaatattttccctcggtagaatccatatacaatatggattgaaaattaagtcaccaagaatacatttagcatctttgtgttgggttctatacctaaaaattttccctccctgcccaaggtgattggaaagtactgcaattgagctaaaattttatctaggatggaaaatcaggatagactcgtttaaaaacaagtatattaaatgggttaaattaagcttttacagaacatgcttaattttgatattgagctctaaatgcaaaactcttttatactgaaaaaacacttaaagtagttttgtgtggcatcacagtgatttgtcatgaaaagccatatatgggggacatgctaaaatggcttctgaatgaaatacgacagcagagaaagatgccactgaaatgctgaaattatctttgctgagcagcttttgaatgctaagggttccagtatgtgacccaaagaaggagttgtctcaactccttggtacagggttcattcaaacccccaagctgtgagagtgtgtttatttttaattttttaaaaggtatttaatttccaaccacacttcttatttttttgaaaagacaattttccatttcagtattacattttaccaagaagtcactgctttttaggtgtgttgcatcaatatttaaataaaatcccagaaatgtattttaaagaatttcaggtttgaaaactcaaaccaacaggaagatatcacacctttgtatgtgcttctttgttcttgaagtagtcattatggttcattggaatctactgtagcataagctcctaggttgctccatttcttaggaaaatagcaatgaatgaatgtatagtagctgcatgtgtgaactactgctgtaaagtttgctgacatttctgcaacaacatttctccatctgatttaccagaacctgtaacaagaccagaacatgtattcatccagaaactcctgggctctgctttgttcaaagaggagcaaatccacatagaaattaaatgttataaatttatttttttcaaactaatttccaaagaatttagctgaagactcagagtcagcctacctcttgactctccacatccgcatctaagatcctgaaggccaaaggaatgtgcctgtgggatgccaaagccatcagtagctggaagaaagaatacctctttctagaggtttggtgtcctcttgctggcctgtcattatttggaaatacgcgcttttggaatttccttcattttcgctatttccaggttcagaaatcatacctaccacttgttctttctttgcccagtaaaactcagggtttctcttattcagagttaccatgttgcacacccccagtgctcagcctgcccagaagcccttctctgatctcagcaagatcttagtagtaaagctaacggatccattgaaattcatactcagcatctgtgactactagacaaagcccatttactgaaccataagtgtgcacttttaaactaaattattaactgaaagggaaaaaatagaaatgagggcattttgaagtttttagaaaagagaggaagagctgttggccagatcaaagagatacttataagcccggcacaatttttaacataagtcattcctggctattaagtaaaatatttcatgaaccagaagtcctgtttctctaatattataatttgttgaggtttgtgtgtgtgtgtgtgtgcatgtgcagacacatgtacacatataaattgaatacaaaaatagctctataacaccaaaaaacagagtttacagaaaataaacacaaaagctatatctgcaagacaagtttgattcatctagtttcatatagtttcatatagtttcatttttattaatatttaggtttaacttatagttctgcaattatttaaaaaacaagtacagagcgtttgattaaaaaaagtcaacaaatgtttcaaaacagctttgtacaaatgttataaaacatatttaatgattaagaaatgtactagactctatcatttacttttaaaacatttaattagaaaaacaggtgatatttaagactatttataaacttattggccaaattgccaaaaagtttctttttctctaactttggtattctaaataattgattattgctcccattgtaaactgaaccatgtatgcactctcttttctgaccaaactacaatggtatattggtaaattatttaacaacacactgtccaggagggaaaaaaaaaaaacagtctctgatttgtatcatttgccaatttccatggtccaaatattctctctccattttcaaactaccaaagtgaccctaatcagcttacaaaattcctggaaatgtatctgccacctcttaccaaccagtgtgagctgacttcagcacaccactgagacagattacacgatagacagatagatagatagatagatagatagatagatagatagatagatattgatagagaacatgttgtgtctatatacatatccaatgacacacagtataatcatgttttaaattatgccaaaagtactgattatatcaagcccagtaaacataatgctacacagcacccattctttaattttgatttctaaaattataaccttcctttgatattaataaaatgttatgaacttgcaggagaaggaaggagttgaaagaaggaaaatataaagggtgatccacagtgaaaatcagacctacacaagccacaaaaaaattgtctcattttcccaaggaattcaaagtcctgtgatacacattacaaaagatgacactttgtaaatattttgaacttctatgatccaatttcaacttcattggtccaatttgtcaaactattttcctctgagcactagattcatgggcaatttaatctctgaatattttctgtgtcataagtgtgcttgaaaagaggcttgtagtaaacagatatttttacaaaatttgatgcttctgcaaccataataattttatctataaatgcgtatattacatatatatatatatatacacatacactcacatgcagatatttacatatatagatattctcttttccttttataaaatcaaagtctaggctcaattggaaaatggaaatatttgcaccaaaagaaaaaagtgccattgttgtgatcaatggagtaaagctggggtatagtagaggctggggaagccctgcccatgttctctccaaggccacagcttgcacaccgtgaatggtggccccactggctccatggagtgtgccttcacgcgggggaatgtccttgtccaacacgctgtaatctactccatgggaactgactgtcctgcttttcacaacattgagaaacaggcccagagcctgtctcatgtgccaggtgcagtcacattattgttaaaataaagtggcttctgacaaatcagtttttcaaaatagcatcctatgtacttttcatttcttccaacaaccctcaggcccccttttgccagttttctcccccaggggagattttcaagactactggagaaaaatctgttaataaaacatttgctctgaaaaaaaaaaaaaaaaaaaaaaaaaaaaaaaaacaaattcgatcaaagaaaaacaacaaacgaggagggggcgccgcgcctcaaaagaaaattccccgcgaagggggccaccatcattatcagcgccgccagccgcagatttgtgtgagaaagagggggctcccacctaagggaagggcccggtatcaaacaagagcagccgccgcgggccgtgtctaaaaacgaccagtcagcagggtgcgaaaacagcgtccagtgcgggcgacacccgttgaaaggaaggaacaccccatcctggggggcggagaacaatggggcacaaactgccgg

SEQ ID NO: 406807 - DNA, 8296 bp, Homo sapiens
acccgccttcctaccaccttaggggatttggcccggagaacgagatcaccctctcaatgaaaggcagatgtccctttaaggtttgcttctacagcccgtggactttagcctaaacacggacccgcgaagctggctttatttgtccatgtctcggacagagcctgggaagctgccagtgagatttcagagaccaagagcgcgaaggggcgggcgatgtggcaatccgtctgggatgtgaaaagcgtggagcgcatttagaggcattcgacgaaaacacaggaaatcactcctctcccgctcctgggcgccgctgccactggggcagaggactgggaaccgcggcagcgggataagtggcccagccagagagcgcagctcccgcgcccggtcctgccctgcgaaccagcgcggccccctggcgctgaggctgctccggccatggcccctcggccccgcgcccgcccaggggtcgctgtcgcctgctgctggctcctcactgttgttctacgctgctgcgtatcattcaatgttgatgtgaaaaattcaatgactttcagcggcccggtggaagacatgtttggatatactgttcaacaatatgaaaatgaagaaggaaaatgggtgcttattggttctccgttagttggccaacccaaaaacagaactggagatgtctataagtgtccagttgggagaggtgaatcattaccttgcgtaaagttggatctaccagttaatacatcaattcccaatgtcacagaagtaaaggagaacatgacatttggatcaactttagtcaccaacccaaatggaggatttctggcttgtgggcccttatatgcctatagatgtggacatttgcattacacaactggaatctgttctgacgtcagccccacatttcaagtcgtgaattccattgcccctgtacaagaatgcagcactcaactggacatagtcatagtgctggatggttccaacagtatttacccatgggacagtgttacagcttttttaaatgaccttcttgaaagaatggatattggtcctaaacagacacaggttggaattgtacagtatggagaaaacgtgacccatgagttcaacctcaataagtattcttccaccgaagaggtacttgttgcagcaaagaaaatagtccagagaggtggccgccagactatgacagctcttggaatagacacagcaagaaaggaggcattcacggaagcccggggtgcccgaagaggagttaaaaaagtcatggttattgtgacagatggagagtctcatgacaatcatcgactgaagaaggtcatccaagactgtgaagatgaaaacattcaacggttttccatagctattcttggcagctataaccgaggaaatttaagcactgaaaaatttgtggaggaaataaaatcaattgcaagtgaacccactgaaaagcatttcttcaatgtctctgatgaattggctctagtcaccattgttaaaactctgggagaaagaatatttgccctggaagccacagctgaccagtcagcagcttcatttgaaatggaaatgtctcagactggcttcagtgctcattattcacaggactgggtcatgcttggagcagtaggagcctatgattggaatggaacagttgtcatgcagaaggctagtcaaatcataatccctcgaaacacaacctttaatgttgagtctaccaaaaagaatgaaccgcttgcttcttatttaggttacactgtaaactctgctactgcttcttctggagatgtgctctatattgctggacagcctcggtacaatcatacaggccaggtcattatctacaggatggaagatggaaacatcaaaattctccagacgctcagtggagaacagattggttcctactttggcagtattttaacaacaactgacattgacaaggattctaatactgacattcttctagtcggagcccctatgtacatgggaacagagaaggaggagcaaggaaaagtgtatgtgtatgctctcaatcagacaaggtttgaatatcaaatgagcctggaacctattaagcagacgtgctgttcatctcggcagcacaattcatgcacaacagaaaacaaaaatgagccatgcggggctcgttttggaactgcaattgctgctgtaaaagacctcaatcttgatggatttaatgacatcgtgataggagctccgctggaagatgatcacgggggagctgtgtacatttatcatggaagtggcaagactataaggaaagagtatgcacaacgtattccatcaggtggggatggtaagacactgaaattttttggccagtctatccacggagaaatggatttaaatggtgacggtctgacagatgtgactattgggggccttggtggtgctgccctcttctggtcccgagatgtggccgtagttaaagtgaccatgaattttgagccaaataaagtgaatattcaaaagaaaaactgccatatggagggaaaggaaacagtatgcataaatgctacagtgtgttttgatgtgaaattaaagtctaaagaagacacgatttatgaagctgatttgcagtaccgtgtcaccctagattcactaagacaaatatcacgaagttttttctctggaactcaagagagaaaggttcaaaggaacatcacagttcgaaaatcagaatgcactaagcactccttctacatgttggacaagcatgactttcaggactctgtgagaataacgttggactttaatcttaccgatccagaaaatgggcctgttcttgatgattctttaccaaactcagtacatgaatatattccctttgccaaagattgtggaaataaggaaaaatgtatctcagacctcagcctgcatgtcgccaccactgaaaaggacctgctgattgtccgatcccagaatgataagttcaacgttagcctcacagtcaaaaatacaaaggacagtgcctataacaccaggacaatagtgcattattctccaaatctagttttttcaggaattgaggctatccaaaaagacagttgtgaatctaatcataatatcacatgtaaagttggatatcccttcctgagaagaggagagatggtaactttcaaaatattgtttcagtttaacacatcctatctcatggaaaatgtgaccatttatttaagtgcaacaagtgacagcgaagaacctcctgaaaccctttctgataatgtagtaaacatttctatcccggtaaaatatgaagttggactacagttttacagctctgcaagtgaataccacatttcaattgctgccaatgagacagtccctgaagttattaattctactgaggacattggaaatgaaattaatatcttctacttgattagaaaaagtggatcttttccaatgccagagcttaagctgtcaatttcattccccaatatgacatcaaatggttaccctgtgctaatgcaaactgcagaccccatatctttgaggatcctttcagtatcaactctggaaagaaaatgactacatcaactgaccatctgactgcaatacatgtaaatttgctaccatcacatgtaatctcacttcttctgacatcagccaagtcaatgtttcgcttatcttgtggaaaccaacttttataaaatcatatttttccagcttaaatcttactataaggggagaacttcggagtgaaaatgcatctctggttttaagtagcagcaatcaaaaaagagagcttgctattcaaatatccaaagatgggctaccgggcagagtgccattatgggtcatcctgctgagtgcttttgccggattgttgctgttaatgctgctcattttagcactgtggaagattggattcttcaaaagaccactgaaaaagaaaatggagaaatgaaatattttacgaaagaaaataataacaattattcaataatctatcctcaggtttgcctcaaatatgtgacaagaaatgtataattcatgacatagtcatgtaactatgtaatccatcagggattcattacttggaaaatgacaggtcatgcattatccaaaaacaataccaaaaagacatattttataaaatgacaaaaaatattttacataattactcatttttgttgagtaagcaaaattacaaagtgtttttaaaaaaacctgtacaaatatgtttatgtattaaatcaccatccaaaatatttaaggaatatataaaaagatttttatgatcatagaaacatctattttcaaaacaatataaattaagcttttccccttgattcctgttggatatccatgttcagcatgacagtcagcactcgtaaatgccaagaaaagaattacctgaaaaagatcatttctccctattcaaatgagaatattttccctcggtagaatccatatacaatatggattgaaaattaagtcaccaagaatacatttagcatctttgtgttgggttctatacctaaaaattttccctccctgcccaaggtgattggaaagtactgcaattgagctaaaattttatctaggatggaaaatcaggatagactcgtttaaaaacaagtatattaaatgggttaaattaagcttttacagaacatgcttaattttgatattgagctctaaatgcaaaactcttttatactgaaaaaacacttaaagtagttttgtgtggcatcacagtgatttgtcatgaaaagccatatatgggggacatgctaaaatggcttctgaatgaaatacgacagcagagaaagatgccactgaaatgctgaaattatctttgctgagcagcttttgaatgctaagggttccagtatgtgacccaaagaaggagttgtctcaactccttggtacagggttcattcaaacccccaagctgtgagagtgtgtttatttttaattttttaaaaggtatttaatttccaaccacacttcttatttttttgaaaagacaattttccatttcagtattacattttaccaagaagtcactgctttttaggtgtgttgcatcaatatttaaataaaatcccagaaatgtattttaaagaatttcaggtttgaaaactcaaaccaacaggaagatatcacacctttgtatgtgcttctttgttcttgaagtagtcattatggttcattggaatctactgtagcataagctcctaggttgctccatttcttaggaaaatagcaatgaatgaatgtatagtagctgcatgtgtgaactactgctgtaaagtttgctgacatttctgcaacaacatttctccatctgatttaccagaacctgtaacaagaccagaacatgtattcatccagaaactcctgggctctgctttgttcaaagaggagcaaatccacatagaaattaaatgttataaatttatttttttcaaactaatttccaaagaatttagctgaagactcagagtcagcctacctcttgactctccacatccgcatctaagatcctgaaggccaaaggaatgtgcctgtgggatgccaaagccatcagtagctggaagaaagaatacctctttctagaggtttggtgtcctcttgctggcctgtcattatttggaaatacgcgcttttggaatttccttcattttcgctatttccaggttcagaaatcatacctaccacttgttctttctttgcccagtaaaactcagggtttctcttattcagagttaccatgttgcacacccccagtgctcagcctgcccagaagcccttctctgatctcagcaagatcttagtagtaaagctaacggatccattgaaattcatactcagcatctgtgactactagacaaagcccatttactgaaccataagtgtgcacttttaaactaaattattaactgaaagggaaaaaatagaaatgagggcattttgaagtttttagaaaagagaggaagagctgttggccagatcaaagagatacttataagcccggcacaatttttaacataagtcattcctggctattaagtaaaatatttcatgaaccagaagtcctgtttctctaatattataatttgttgaggtttgtgtgtgtgtgtgtgtgcatgtgcagacacatgtacacatataaattgaatacaaaaatagctctataacaccaaaaaacagagtttacagaaaataaacacaaaagctatatctgcaagacaagtttgattcatctagtttcatatagtttcatatagtttcatttttattaatatttaggtttaacttatagttctgcaattatttaaaaaacaagtacagagcgtttgattaaaaaaagtcaacaaatgtttcaaaacagctttgtacaaatgttataaaacatatttaatgattaagaaatgtactagactctatcatttacttttaaaacatttaattagaaaaacaggtgatatttaagactatttataaacttattggccaaattgccaaaaagtttctttttctctaactttggtattctaaataattgattattgctcccattgtaaactgaaccatgtatgcactctcttttctgaccaaactacaatggtatattggtaaattatttaacaacacactgtccaggagggaaaaaaaaaaaacagtctctgatttgtatcatttgccaatttccatggtccaaatattctctctccattttcaaactaccaaagtgaccctaatcagcttacaaaattcctggaaatgtatctgccacctcttaccaaccagtgtgagctgacttcagcacaccactgagacagattacacgatagacagatagatagatagatagatagatagatagatagatagatagatattgatagagaacatgttgtgtctatatacatatccaatgacacacagtataatcatgttttaaattatgccaaaagtactgattatatcaagcccagtaaacataatgctacacagcacccattctttaattttgatttctaaaattataaccttcctttgatattaataaaatgttatgaacttgcaggagaaggaaggagttgaaagaaggaaaatataaagggtgatccacagtgaaaatcagacctacacaagccacaaaaaaattgtctcattttcccaaggaattcaaagtcctgtgatacacattacaaaagatgacactttgtaaatattttgaacttctatgatccaatttcaacttcattggtccaatttgtcaaactattttcctctgagcactagattcatgggcaatttaatctctgaatattttctgtgtcataagtgtgcttgaaaagaggcttgtagtaaacagatatttttacaaaatttgatgcttctgcaaccataataattttatctataaatgcgtatattacatatatatatatatatacacatacactcacatgcagatatttacatatatagatattctcttttccttttataaaatcaaagtctaggctcaattggaaaatggaaatatttgcaccaaaagaaaaaagtgccattgttgtgatcaatggagtaaagctggggtatagtagaggctggggaagccctgcccatgttctctccaaggccacagcttgcacaccgtgaatggtggccccactggctccatggagtgtgccttcacgcgggggaatgtccttgtccaacacgctgtaatctactccatgggaactgactgtcctgcttttcacaacattgagaaacaggcccagagcctgtctcatgtgccaggtgcagtcacattattgttaaaataaagtggcttctgacaaatcagtttttcaaaatagcatcctatgtacttttcatttcttccaacaaccctcaggcccccttttgccagttttctcccccaggggagattttcaagactactggagaaaaatctgttaataaaacatttgctctgaaaaaaaaaaaaaaaaaaaaaaaaaaaaaaaaacaaattcgatcaaagaaaaacaacaaacgaggagggggcgccgcgcctcaaaagaaaattccccgcgaagggggccaccatcattatcagcgccgccagccgcagatttgtgtgagaaagagggggctcccacctaagggaagggcccggtatcaaacaagagcagccgccgcgggccgtgtctaaaaacgaccagtcagcagggtgcgaaaacagcgtccagtgcgggcgacacccgttgaaaggaaggaacaccccatcctggggggcggagaacaatggggcacaaactgccgg

SEQ ID NO: 406808 - DNA, 3902 bp, Homo sapiens
acccgccttcctaccaccttaggggatttggcccggagaacgagatcaccctctcaatgaaaggcagatgtccctttaaggtttgcttctacagcccgtggactttagcctaaacacggacccgcgaagctggctttatttgtccatgtctcggacagagcctgggaagctgccagtgagatttcagagaccaagagcgcgaaggggcgggcgatgtggcaatccgtctgggatgtgaaaagcgtggagcgcatttagaggcattcgacgaaaacacaggaaatcactcctctcccgctcctgggcgccgctgccactggggcagaggactgggaaccgcggcagcgggataagtggcccagccagagagcgcagctcccgcgcccggtcctgccctgcgaaccagcgcggccccctggcgctgaggctgctccggccatggcccctcggccccgcgcccgcccaggggtcgctgtcgcctgctgctggctcctcactgttgttctacgctgctgcgtatcattcaatgttgatgtgaaaaattcaatgactttcagcggcccggtggaagacatgtttggatatactgttcaacaatatgaaaatgaagaaggaaaatgggtgcttattggttctccgttagttggccaacccaaaaacagaactggagatgtctataagtgtccagttgggagaggtgaatcattaccttgcgtaaagttggatctaccagttaatacatcaattcccaatgtcacagaagtaaaggagaacatgacatttggatcaactttagtcaccaacccaaatggaggatttctggcttgtgggcccttatatgcctatagatgtggacatttgcattacacaactggaatctgttctgacgtcagccccacatttcaagtcgtgaattccattgcccctgtacaagaatgcagcactcaactggacatagtcatagtgctggatggttccaacagtatttacccatgggacagtgttacagcttttttaaatgaccttcttgaaagaatggatattggtcctaaacagacacaggttggaattgtacagtatggagaaaacgtgacccatgagttcaacctcaataagtattcttccaccgaagaggtacttgttgcagcaaagaaaatagtccagagaggtggccgccagactatgacagctcttggaatagacacagcaagaaaggaggcattcacggaagcccggggtgcccgaagaggagttaaaaaagtcatggttattgtgacagatggagagtctcatgacaatcatcgactgaagaaggtcatccaagactgtgaagatgaaaacattcaacggttttccatagctattcttggcagctataaccgaggaaatttaagcactgaaaaatttgtggaggaaataaaatcaattgcaagtgaacccactgaaaagcatttcttcaatgtctctgatgaattggctctagtcaccattgttaaaactctgggagaaagaatatttgccctggaagccacagctgaccagtcagcagcttcatttgaaatggaaatgtctcagactggcttcagtgctcattattcacaggactgggtcatgcttggagcagtaggagcctatgattggaatggaacagttgtcatgcagaaggctagtcaaatcataatccctcgaaacacaacctttaatgttgagtctaccaaaaagaatgaaccgcttgcttcttatttaggttacactgtaaactctgctactgcttcttctggagatgtgctctatattgctggacagcctcggtacaatcatacaggccaggtcattatctacaggatggaagatggaaacatcaaaattctccagacgctcagtggagaacagattggttcctactttggcagtattttaacaacaactgacattgacaaggattctaatactgacattcttctagtcggagcccctatgtacatgggaacagagaaggaggagcaaggaaaagtgtatgtgtatgctctcaatcagacaaggtttgaatatcaaatgagcctggaacctattaagcagacgtgctgttcatctcggcagcacaattcatgcacaacagaaaacaaaaatgagccatgcggggctcgttttggaactgcaattgctgctgtaaaagacctcaatcttgatggatttaatgacatcgtgataggagctccgctggaagatgatcacgggggagctgtgtacatttatcatggaagtggcaagactataaggaaagagtatgcacaacgtattccatcaggtggggatggtaagacactgaaattttttggccagtctatccacggagaaatggatttaaatggtgacggtctgacagatgtgactattgggggccttggtggtgctgccctcttctggtcccgagatgtggccgtagttaaagtgaccatgaattttgagccaaataaagtgaatattcaaaagaaaaactgccatatggagggaaaggaaacagtatgcataaatgctacagtgtgttttgatgtgaaattaaagtctaaagaagacacgatttatgaagctgatttgcagtaccgtgtcaccctagattcactaagacaaatatcacgaagttttttctctggaactcaagagagaaaggttcaaaggaacatcacagttcgaaaatcagaatgcactaagcactccttctacatgttggacaagcatgactttcaggactctgtgagaataacgttggactttaatcttaccgatccagaaaatgggcctgttcttgatgattctttaccaaactcagtacatgaatatattccctttgccaaagattgtggaaataaggaaaaatgtatctcagacctcagcctgcatgtcgccaccactgaaaaggacctgctgattgtccgatcccagaatgataagttcaacgttagcctcacagtcaaaaatacaaaggacagtgcctataacaccaggacaatagtgcattattctccaaatctagttttttcaggaattgaggctatccaaaaagacagttgtgaatctaatcataatatcacatgtaaagttggatatcccttcctgagaagaggagagatggtaactttcaaaatattgtttcagtttaacacatcctatctcatggaaaatgtgaccatttatttaagtgcaacaagtgacagcgaagaacctcctgaaaccctttctgataatgtagtaaacatttctatcccggtaaaatatgaagttggactacagttttacagctctgcaagtgaataccacatttcaattgctgccaatgagacagtccctgaagttattaattctactgaggacattggaaatgaaattaatatcttctacttgattagaaaaagtggatcttttccaatgccagagcttaagctgtcaatttcattccccaatatgacatcaaatggttaccctgtgctgtacccaactggattgtcatcttctgagaatgcaaactgcagaccccatatctttgaggatcctttcagtatcaactctggaaagaaaatgactacatcaactgaccatctcaaacgaggcacaattctggactgcaatacatgtaaatttgctaccatcacatgtaatctcacttcttctgacatctaaatactggggcccaagcctggctggccccagattaagatgtcaatcaagaccaggccctggctttggccatcaaggaggccaaactgcagcatcctgatatgctggtaaccaaagctgtcgtatacagagaaacagacccatccccagaggagagggacaagaagccacaggaatcctgacctctgtgaagaatcctgacatcttaatctggcccagcctctggc

SEQ ID NO: 406809 - DNA, 1135 bp, Homo sapiens
acccgccttcctaccaccttaggggatttggcccggagaacgagatcaccctctcaatgaaaggcagatgtccctttaaggtttgcttctacagcccgtggactttagcctaaacacggacccgcgaagctggctttatttgtccatgtctcggacagagcctgggaagctgccagtgagatttcagagaccaagagcgcgaaggggcgggcgatgtggcaatccgtctgggatgtgaaaagcgtggagcgcatttagaggcattcgacgaaaacacaggaaatcactcctctcccgctcctgggcgccgctgccactggggcagaggactgggaaccgcggcagcgggataagtggcccagccagagagcgcagctcccgcgcccggtcctgccctgcgaaccagcgcggccccctggcgctgaggctgctccggccatggcccctcggccccgcgcccgcccaggggtcgctgtcgcctgctgctggctcctcactggtacatgcctcctccggacacaagtactccctgaaagaggccctttgtgaccctactgtggctagccgcctttcagacactaaagctgctggggaagtcaaagccttggatgacttctataaaatgttacagcatgaaccggatcgagctttctatggactcaagcaggtggagaaggccaatgaagccatggcaattgacacattgctcatcagcgatgagctcttcaggcatcaggatgtagccacacggagccggtatgtgaggctggtggacagtgtgaaagagaatgcaggcaccgttaggatattctctagtcttcacgtttctggggaacagctcagccagttgactggggtagctgccattctccgcttccctgttcccgaactttctgaccaagagggtgattccagttctgaagaggattaatgattgaaacttaaaattgagacaatcttgtgtttcctaaactgttacagtacatttctcagcatccttgtgacagaaagctgcaagaatggcactttttgattcatacagggatttcttatgtctttggctacactagatattttgtgattggcaagacatgtatttaaacaataaactaaaaggaaataatctccacgtact

SEQ ID NO: 406810 - DNA, 4017 bp, Homo sapiens
acccgccttcctaccaccttaggggatttggcccggagaacgagatcaccctctcaatgaaaggcagatgtccctttaaggtttgcttctacagcccgtggactttagcctaaacacggacccgcgaagctggctttatttgtccatgtctcggacagagcctgggaagctgccagtgagatttcagagaccaagagcgcgaaggggcgggcgatgtggcaatccgtctgggatgtgaaaagcgtggagcgcatttagaggcattcgacgaaaacacaggaaatcactcctctcccgctcctgggcgccgctgccactggggcagaggactgggaaccgcggcagcgggataagtggcccagccagagagcgcagctcccgcgcccggtcctgccctgcgaaccagcgcggccccctggcgctgaggctgctccggccatggcccctcggccccgcgcccgcccaggggtcgctgtcgcctgctgctggctcctcactgttgttctacgctgctgcgtatcattcaatgttgatgtgaaaaattcaatgactttcagcggcccggtggaagacatgtttggatatactgttcaacaatatgaaaatgaagaaggaaaatgggtgcttattggttctccgttagttggccaacccaaaaacagaactggagatgtctataagtgtccagttgggagaggtgaatcattaccttgcgtaaagttggatctaccagttaatacatcaattcccaatgtcacagaagtaaaggagaacatgacatttggatcaactttagtcaccaacccaaatggaggatttctggcttgtgggcccttatatgcctatagatgtggacatttgcattacacaactggaatctgttctgacgtcagccccacatttcaagtcgtgaattccattgcccctgtacaagaatgcagcactcaactggacatagtcatagtgctggatggttccaacagtatttacccatgggacagtgttacagcttttttaaatgaccttcttgaaagaatggatattggtcctaaacagacacaggttggaattgtacagtatggagaaaacgtgacccatgagttcaacctcaataagtattcttccaccgaagaggtacttgttgcagcaaagaaaatagtccagagaggtggccgccagactatgacagctcttggaatagacacagcaagaaaggaggcattcacggaagcccggggtgcccgaagaggagttaaaaaagtcatggttattgtgacagatggagagtctcatgacaatcatcgactgaagaaggtcatccaagactgtgaagatgaaaacattcaacggttttccatagctattcttggcagctataaccgaggaaatttaagcactgaaaaatttgtggaggaaataaaatcaattgcaagtgaacccactgaaaagcatttcttcaatgtctctgatgaattggctctagtcaccattgttaaaactctgggagaaagaatatttgccctggaagccacagctgaccagtcagcagcttcatttgaaatggaaatgtctcagactggcttcagtgctcattattcacaggactgggtcatgcttggagcagtaggagcctatgattggaatggaacagttgtcatgcagaaggctagtcaaatcataatccctcgaaacacaacctttaatgttgagtctaccaaaaagaatgaaccgcttgcttcttatttaggttacactgtaaactctgctactgcttcttctggagatgtgctctatattgctggacagcctcggtacaatcatacaggccaggtcattatctacaggatggaagatggaaacatcaaaattctccagacgctcagtggagaacagattggttcctactttggcagtattttaacaacaactgacattgacaaggattctaatactgacattcttctagtcggagcccctatgtacatgggaacagagaaggaggagcaaggaaaagtgtatgtgtatgctctcaatcagacaaggtttgaatatcaaatgagcctggaacctattaagcagacgtgctgttcatctcggcagcacaattcatgcacaacagaaaacaaaaatgagccatgcggggctcgttttggaactgcaattgctgctgtaaaagacctcaatcttgatggatttaatgacatcgtgataggagctccgctggaagatgatcacgggggagctgtgtacatttatcatggaagtggcaagactataaggaaagagtatgcacaacgtattccatcaggtggggatggtaagacactgaaattttttggccagtctatccacggagaaatggatttaaatggtgacggtctgacagatgtgactattgggggccttggtggtgctgccctcttctggtcccgagatgtggccgtagttaaagtgaccatgaattttgagccaaataaagtgaatattcaaaagaaaaactgccatatggagggaaaggaaacagtatgcataaatgctacagtgtgttttgatgtgaaattaaagtctaaagaagacacgatttatgaagctgatttgcagtaccgtgtcaccctagattcactaagacaaatatcacgaagttttttctctggaactcaagagagaaaggttcaaaggaacatcacagttcgaaaatcagaatgcactaagcactccttctacatgttggacaagcatgactttcaggactctgtgagaataacgttggactttaatcttaccgatccagaaaatgggcctgttcttgatgattctttaccaaactcagtacatgaatatattccctttgccaaagattgtggaaataaggaaaaatgtatctcagacctcagcctgcatgtcgccaccactgaaaaggacctgctgattgtccgatcccagaatgataagttcaacgttagcctcacagtcaaaaatacaaaggacagtgcctataacaccaggacaatagtgcattattctccaaatctagttttttcaggaattgaggctatccaaaaagacagttgtgaatctaatcataatatcacatgtaaagttggatatcccttcctgagaagaggagagatggtaactttcaaaatattgtttcagtttaacacatcctatctcatggaaaatgtgaccatttatttaagtgcaacaagtgacagcgaagaacctcctgaaaccctttctgataatgtagtaaacatttctatcccggtaaaatatgaagttggactacagttttacagctctgcaagtgaataccacatttcaattgctgccaatgagacagtccctgaagttattaattctactgaggacattggaaatgaaattaatatcttctacttgattagaaaaagtggatcttttccaatgccagagcttaagctgtcaatttcattccccaatatgacatcaaatggttaccctgtgctgtacccaactggattgtcatcttctgagatgcaaacctggtgacccgcttttttggaggatcctttgacggtgtgctctgggataggacgtgactacctcaactgaccatgttaaaacgatgctcaattctgtgctgcgatacatgcgagattggtgccctccatggaaactcacttgttctgagatcagccaggtgattgttgcgatttattttggggaacccactttgttagagaacatttttgcgcgttaatcttactataaggggcgaacttgcgggtgaagtgatctatttgtttagctgccccattaaaatgacactcggtttttaatatgaagattggtttgccgggcacagtgtccgtggggccctccgctagttgttggttcggtccgcgtgcgcgctcgccgtccgacacttcgtacaatcgctcttttccaacgccgtaatatatgtggtaactagtttttcgtgagatatagtgtactgtggccggtcgttttggttgcgtcgactttggaagaagt

SEQ ID NO: 406811 - DNA, 478 bp, Homo sapiens
taaaattcagtaggtatgaattttatcccacaccaattgttattgaaagcaatgaatatttttatcatctttactttttcgaaaactattttttattgctaaaacaatgtgtctactttggagaacatcagttcatcttttaaaatgaacttctttcagccatgaaagcacttcatatgcctctgaaaaaaatagattccaaatttgacaattgactccttttattgcagaatgcagcactcaactggacatagtcatagtgctggatggttccaacagtatttacccatgggacagtgttacagcttttttaaatgaccttcttgaaagaatggatattggtcctaaacagacacaggtatgtgactttgtgttttgatttctgttgttctaaagataaaaatgcacaaatttttaataaaaccaaatattctgaaagcaaattaatcaataaaactaaagttgagaatgaatttta

SEQ ID NO: 406812 - DNA, 8343 bp, Homo sapiens
acccgccttcctaccaccttaggggatttggcccggagaacgagatcaccctctcaatgaaaggcagatgtccctttaaggtttgcttctacagcccgtggactttagcctaaacacggacccgcgaagctggctttatttgtccatgtctcggacagagcctgggaagctgccagtgagatttcagagaccaagagcgcgaaggggcgggcgatgtggcaatccgtctgggatgtgaaaagcgtggagcgcatttagaggcattcgacgaaaacacaggaaatcactcctctcccgctcctgggcgccgctgccactggggcagaggactgggaaccgcggcagcgggataagtggcccagccagagagcgcagctcccgcgcccggtcctgccctgcgaaccagcgcggccccctggcgctgaggctgctccggccatggcccctcggccccgcgcccgcccaggggtcgctgtcgcctgctgctggctcctcactgttgttctacgctgctgcgtatcattcaatgttgatgtgaaaaattcaatgactttcagcggcccggtggaagacatgtttggatatactgttcaacaatatgaaaatgaagaaggaaaatgggtgcttattggttctccgttagttggccaacccaaaaacagaactggagatgtctataagtgtccagttgggagaggtgaatcattaccttgcgtaaagttggatctaccagttaatacatcaattcccaatgtcacagaagtaaaggagaacatgacatttggatcaactttagtcaccaacccaaatggaggatttctggcttgtgggcccttatatgcctatagatgtggacatttgcattacacaactggaatctgttctgacgtcagccccacatttcaagtcgtgaattccattgcccctgtacaagaatgcagcactcaactggacatagtcatagtgctggatggttccaacagtatttacccatgggacagtgttacagcttttttaaatgaccttcttgaaagaatggatattggtcctaaacagacacaggttggaattgtacagtatggagaaaacgtgacccatgagttcaacctcaataagtattcttccaccgaagaggtacttgttgcagcaaagaaaatagtccagagaggtggccgccagactatgacagctcttggaatagacacagcaagaaaggaggcattcacggaagcccggggtgcccgaagaggagttaaaaaagtcatggttattgtgacagatggagagtctcatgacaatcatcgactgaagaaggtcatccaagactgtgaagatgaaaacattcaacggttttccatagctattcttggcagctataaccgaggaaatttaagcactgaaaaatttgtggaggaaataaaatcaattgcaagtgaacccactgaaaagcatttcttcaatgtctctgatgaattggctctagtcaccattgttaaaactctgggagaaagaatatttgccctggaagccacagctgaccagtcagcagcttcatttgaaatggaaatgtctcagactggcttcagtgctcattattcacaggactgggtcatgcttggagcagtaggagcctatgattggaatggaacagttgtcatgcagaaggctagtcaaatcataatccctcgaaacacaacctttaatgttgagtctaccaaaaagaatgaaccgcttgcttcttatttaggttacactgtaaactctgctactgcttcttctggagatgtgctctatattgctggacagcctcggtacaatcatacaggccaggtcattatctacaggatggaagatggaaacatcaaaattctccagacgctcagtggagaacagattggttcctactttggcagtattttaacaacaactgacattgacaaggattctaatactgacattcttctagtcggagcccctatgtacatgggaacagagaaggaggagcaaggaaaagtgtatgtgtatgctctcaatcagacaaggtttgaatatcaaatgagcctggaacctattaagcagacgtgctgttcatctcggcagcacaattcatgcacaacagaaaacaaaaatgagccatgcggggctcgttttggaactgcaattgctgctgtaaaagacctcaatcttgatggatttaatgacatcgtgataggagctccgctggaagatgatcacgggggagctgtgtacatttatcatggaagtggcaagactataaggaaagagtatgcacaacgtattccatcaggtggggatggtaagacactgaaattttttggccagtctatccacggagaaatggatttaaatggtgacggtctgacagatgtgactattgggggccttggtggtgctgccctcttctggtcccgagatgtggccgtagttaaagtgaccatgaattttgagccaaataaagtgaatattcaaaagaaaaactgccatatggagggaaaggaaacagtatgcataaatgctacagtgtgttttgatgtgaaattaaagtctaaagaagacacgatttatgaagctgatttgcagtaccgtgtcaccctagattcactaagacaaatatcacgaagttttttctctggaactcaagagagaaaggttcaaaggaacatcacagttcgaaaatcagaatgcactaagcactccttctacatgttggacaagcatgactttcaggactctgtgagaataacgttggactttaatcttaccgatccagaaaatgggcctgttcttgatgattctttaccaaactcagtacatgaatatattccctttgccaaagattgtggaaataaggaaaaatgtatctcagacctcagcctgcatgtcgccaccactgaaaaggacctgctgattgtccgatcccagaatgataagttcaacgttagcctcacagtcaaaaatacaaaggacagtgcctataacaccaggacaatagtgcattattctccaaatctagttttttcaggaattgaggctatccaaaaagacagttgtgaatctaatcataatatcacatgtaaagttggatatcccttcctgagaagaggagagatggtaactttcaaaatattgtttcagtttaacacatcctatctcatggaaaatgtgaccatttatttaagtgcaacaagtgacagcgaagaacctcctgaaaccctttctgataatgtagtaaacatttctatcccggtaaaatatgaagttggactacagttttacagctctgcaagtgaataccacatttcaattgctgccaatgagacagtccctgaagttattaattctactgaggacattggaaatgaaattaatatcttctacttgattagaaaaagtggatcttttccaatgccagagcttaagctgtcaatttcattccccaatatgacatcaaatggttaccctgtgctgtacccaactggattgtcatcttctgagaatgcaaactgcagaccccatatctttgaggatcctttcagtatcaactctggaaagaaaatgactacatcaactgaccatctcaaacgaggcacaattctggactgcaatacatgtaaatttgctaccatcacatgtaatctcacttcttctgacatcagccaagtcaatgtttcgcttatcttgtggaaaccaacttttataaaatcatatttttccagcttaaatcttactataaggggagaacttcggagtgaaaatgcatctctggttttaagtagcagcaatcaaaaaagagagcttgctattcaaatatccaaagatgggctaccgggcagagtgccattatgggtcatcctgctgagtgcttttgccggattgttgctgttaatgctgctcattttagcactgtggaagattggattcttcaaaagaccactgaaaaagaaaatggagaaatgaaatattttacgaaagaaaataataacaattattcaataatctatcctcaggtttgcctcaaatatgtgacaagaaatgtataattcatgacatagtcatgtaactatgtaatccatcagggattcattacttggaaaatgacaggtcatgcattatccaaaaacaataccaaaaagacatattttataaaatgacaaaaaatattttacataattactcatttttgttgagtaagcaaaattacaaagtgtttttaaaaaaacctgtacaaatatgtttatgtattaaatcaccatccaaaatatttaaggaatatataaaaagatttttatgatcatagaaacatctattttcaaaacaatataaattaagcttttccccttgattcctgttggatatccatgttcagcatgacagtcagcactcgtaaatgccaagaaaagaattacctgaaaaagatcatttctccctattcaaatgagaatattttccctcggtagaatccatatacaatatggattgaaaattaagtcaccaagaatacatttagcatctttgtgttgggttctatacctaaaaattttccctccctgcccaaggtgattggaaagtactgcaattgagctaaaattttatctaggatggaaaatcaggatagactcgtttaaaaacaagtatattaaatgggttaaattaagcttttacagaacatgcttaattttgatattgagctctaaatgcaaaactcttttatactgaaaaaacacttaaagtagttttgtgtggcatcacagtgatttgtcatgaaaagccatatatgggggacatgctaaaatggcttctgaatgaaatacgacagcagagaaagatgccactgaaatgctgaaattatctttgctgagcagcttttgaatgctaagggttccagtatgtgacccaaagaaggagttgtctcaactccttggtacagggttcattcaaacccccaagctgtgagagtgtgtttatttttaattttttaaaaggtatttaatttccaaccacacttcttatttttttgaaaagacaattttccatttcagtattacattttaccaagaagtcactgctttttaggtgtgttgcatcaatatttaaataaaatcccagaaatgtattttaaagaatttcaggtttgaaaactcaaaccaacaggaagatatcacacctttgtatgtgcttctttgttcttgaagtagtcattatggttcattggaatctactgtagcataagctcctaggttgctccatttcttaggaaaatagcaatgaatgaatgtatagtagctgcatgtgtgaactactgctgtaaagtttgctgacatttctgcaacaacatttctccatctgatttaccagaacctgtaacaagaccagaacatgtattcatccagaaactcctgggctctgctttgttcaaagaggagcaaatccacatagaaattaaatgttataaatttatttttttcaaactaatttccaaagaatttagctgaagactcagagtcagcctacctcttgactctccacatccgcatctaagatcctgaaggccaaaggaatgtgcctgtgggatgccaaagccatcagtagctggaagaaagaatacctctttctagaggtttggtgtcctcttgctggcctgtcattatttggaaatacgcgcttttggaatttccttcattttcgctatttccaggttcagaaatcatacctaccacttgttctttctttgcccagtaaaactcagggtttctcttattcagagttaccatgttgcacacccccagtgctcagcctgcccagaagcccttctctgatctcagcaagatcttagtagtaaagctaacggatccattgaaattcatactcagcatctgtgactactagacaaagcccatttactgaaccataagtgtgcacttttaaactaaattattaactgaaagggaaaaaatagaaatgagggcattttgaagtttttagaaaagagaggaagagctgttggccagatcaaagagatacttataagcccggcacaatttttaacataagtcattcctggctattaagtaaaatatttcatgaaccagaagtcctgtttctctaatattataatttgttgaggtttgtgtgtgtgtgtgtgtgcatgtgcagacacatgtacacatataaattgaatacaaaaatagctctataacaccaaaaaacagagtttacagaaaataaacacaaaagctatatctgcaagacaagtttgattcatctagtttcatatagtttcatatagtttcatttttattaatatttaggtttaacttatagttctgcaattatttaaaaaacaagtacagagcgtttgattaaaaaaagtcaacaaatgtttcaaaacagctttgtacaaatgttataaaacatatttaatgattaagaaatgtactagactctatcatttacttttaaaacatttaattagaaaaacaggtgatatttaagactatttataaacttattggccaaattgccaaaaagtttctttttctctaactttggtattctaaataattgattattgctcccattgtaaactgaaccatgtatgcactctcttttctgaccaaactacaatggtatattggtaaattatttaacaacacactgtccaggagggaaaaaaaaaaaacagtctctgatttgtatcatttgccaatttccatggtccaaatattctctctccattttcaaactaccaaagtgaccctaatcagcttacaaaattcctggaaatgtatctgccacctcttaccaaccagtgtgagctgacttcagcacaccactgagacagattacacgatagacagatagatagatagatagatagatagatagatagatagatagatattgatagagaacatgttgtgtctatatacatatccaatgacacacagtataatcatgttttaaattatgccaaaagtactgattatatcaagcccagtaaacataatgctacacagcacccattctttaattttgatttctaaaattataaccttcctttgatattaataaaatgttatgaacttgcaggagaaggaaggagttgaaagaaggaaaatataaagggtgatccacagtgaaaatcagacctacacaagccacaaaaaaattgtctcattttcccaaggaattcaaagtcctgtgatacacattacaaaagatgacactttgtaaatattttgaacttctatgatccaatttcaacttcattggtccaatttgtcaaactattttcctctgagcactagattcatgggcaatttaatctctgaatattttctgtgtcataagtgtgcttgaaaagaggcttgtagtaaacagatatttttacaaaatttgatgcttctgcaaccataataattttatctataaatgcgtatattacatatatatatatatatacacatacactcacatgcagatatttacatatatagatattctcttttccttttataaaatcaaagtctaggctcaattggaaaatggaaatatttgcaccaaaagaaaaaagtgccattgttgtgatcaatggagtaaagctggggtatagtagaggctggggaagccctgcccatgttctctccaaggccacagcttgcacaccgtgaatggtggccccactggctccatggagtgtgccttcacgcgggggaatgtccttgtccaacacgctgtaatctactccatgggaactgactgtcctgcttttcacaacattgagaaacaggcccagagcctgtctcatgtgccaggtgcagtcacattattgttaaaataaagtggcttctgacaaatcagtttttcaaaatagcatcctatgtacttttcatttcttccaacaaccctcaggcccccttttgccagttttctcccccaggggagattttcaagactactggagaaaaatctgttaataaaacatttgctctgaaaaaaaaaaaaaaaaaaaaaaaaaaaaaaaaacaaattcgatcaaagaaaaacaacaaacgaggagggggcgccgcgcctcaaaagaaaattccccgcgaagggggccaccatcattatcagcgccgccagccgcagatttgtgtgagaaagagggggctcccacctaagggaagggcccggtatcaaacaagagcagccgccgcgggccgtgtctaaaaacgaccagtcagcagggtgcgaaaacagcgtccagtgcgggcgacacccgttgaaaggaaggaacaccccatcctggggggcggagaacaatggggcacaaactgccgg

SEQ ID NO: 406813 - DNA, 8289 bp, Homo sapiens
acccgccttcctaccaccttaggggatttggcccggagaacgagatcaccctctcaatgaaaggcagatgtccctttaaggtttgcttctacagcccgtggactttagcctaaacacggacccgcgaagctggctttatttgtccatgtctcggacagagcctgggaagctgccagtgagatttcagagaccaagagcgcgaaggggcgggcgatgtggcaatccgtctgggatgtgaaaagcgtggagcgcatttagaggcattcgacgaaaacacaggaaatcactcctctcccgctcctgggcgccgctgccactggggcagaggactgggaaccgcggcagcgggataagtggcccagccagagagcgcagctcccgcgcccggtcctgccctgcgaaccagcgcggccccctggcgctgaggctgctccggccatggcccctcggccccgcgcccgcccaggggtcgctgtcgcctgctgctggctcctcactgttgttctacgctgctgcgtatcattcaatgttgatgtgaaaaattcaatgactttcagcggcccggtggaagacatgtttggatatactgttcaacaatatgaaaatgaagaaggaaaatgggtgcttattggttctccgttagttggccaacccaaaaacagaactggagatgtctataagtgtccagttgggagaggtgaatcattaccttgcgtaaagttggatctaccagttaatacatcaattcccaatgtcacagaagtaaaggagaacatgacatttggatcaactttagtcaccaacccaaatggaggatttctggcttgtgggcccttatatgcctatagatgtggacatttgcattacacaactggaatctgttctgacgtcagccccacatttcaagtcgtgaattccattgcccctgtacaagaatgcagcactcaactggacatagtcatagtgctggatggttccaacagtatttacccatgggacagtgttacagcttttttaaatgaccttcttgaaagaatggatattggtcctaaacagacacaggttggaattgtacagtatggagaaaacgtgacccatgagttcaacctcaataagtattcttccaccgaagaggtacttgttgcagcaaagaaaatagtccagagaggtggccgccagactatgacagctcttggaatagacacagcaagaaaggaggcattcacggaagcccggggtgcccgaagaggagttaaaaaagtcatggttattgtgacagatggagagtctcatgacaatcatcgactgaagaaggtcatccaagactgtgaagatgaaaacattcaacggttttccatagctattcttggcagctataaccgaggaaatttaagcactgaaaaatttgtggaggaaataaaatcaattgcaagtgaacccactgaaaagcatttcttcaatgtctctgatgaattggctctagtcaccattgttaaaactctgggagaaagaatatttgccctggaagccacagctgaccagtcagcagcttcatttgaaatggaaatgtctcagactggcttcagtgctcattattcacaggactgggtcatgcttggagcagtaggagcctatgattggaatggaacagttgtcatgcagaaggctagtcaaatcataatccctcgaaacacaacctttaatgttgagtctaccaaaaagaatgaaccgcttgcttcttatttaggttacactgtaaactctgctactgcttcttctggagatgtgctctatattgctggacagcctcggtacaatcatacaggccaggtcattatctacaggatggaagatggaaacatcaaaattctccagacgctcagtggagaacagattggttcctactttggcagtattttaacaacaactgacattgacaaggattctaatactgacattcttctagtcggagcccctatgtacatgggaacagagaaggaggagcaaggaaaagtgtatgtgtatgctctcaatcagacaaggtttgaatatcaaatgagcctggaacctattaagcagacgtgctgttcatctcggcagcacaattcatgcacaacagaaaacaaaaatgagccatgcggggctcgttttggaactgcaattgctgctgtaaaagacctcaatcttgatggatttaatgacatcgtgataggagctccgctggaagatgatcacgggggagctgtgtacatttatcatggaagtggcaagactataaggaaagagtatgcacaacgtattccatcaggtggggatggtaagacactgaaattttttggccagtctatccacggagaaatggatttaaatggtgacggtctgacagatgtgactattgggggccttggtggtgctgccctcttctggtcccgagatgtggccgtagttaaagtgaccatgaattttgagccaaataaagtgaatattcaaaagaaaaactgccatatggagggaaaggaaacagtatgcataaatgctacagtgtgttttgatgtgaaattaaagtctaaagaagacacgatttatgaagctgatttgcagtaccgtgtcaccctagattcactaagacaaatatcacgaagttttttctctggaactcaagagagaaaggttcaaaggaacatcacagttcgaaaatcagaatgcactaagcactccttctacatgttggacaagcatgactttcaggactctgtgagaataacgttggactttaatcttaccgatccagaaaatgggcctgttcttgatgattctttaccaaactcagtacatgaatatattccctttgccaaagattgtggaaataaggaaaaatgtatctcagacctcagcctgcatgtcgccaccactgaaaaggacctgctgattgtccgatcccagaatgataagttcaacgttagcctcacagtcaaaaatacaaaggacagtgcctataacaccaggacaatagtgcattattctccaaatctagttttttcaggaattgaggctatccaaaaagacagttgtgaatctaatcataatatcacatgtaaagttggatatcccttcctgagaagaggagagatggtaactttcaaaatattgtttcagtttaacacatcctatctcatggaaaatgtgaccatttatttaagtgcaacaagtgacagcgaagaacctcctgaaaccctttctgataatgtagtaaacatttctatcccggtaaaatatgaagttggactacagttttacagctctgcaagtgaataccacatttcaattgctgccaatgagacagtccctgaagttattaattctactgaggacattggaaatgaaattaatatcttctacttgattagaaaaagtggatcttttccaatgccagagcttaagctgtcaatttcattccccaatatgacatcaaatggttaccctgtgctgtacccaactggattgtcatcttctgagaatgcaaactgcagaccccatatctttgaggatcctttcagtatcaactctggaaagaaaatgactacatcaactgaccatctcaaacgaggcacaattctggactgcaatacatgtaaatttgctaccatcacatgtaatctcacttcttctgacatcagccaagtcaatgtttcgcttatcttgtggaaaccaacttttataaaatcatatttttccagcttaaatcttactataaggggagaacttcggagtgaaaatgcatctctggttttaagtagcagcaatcaaaaaagagagcttgctattcaaatatccaaagatgggctaccgggcagagtgccattatgggtcatcctgctgagtgcttttgccggattgttgctgttaatgctgctcattttagcactgtggaagattggattcttcaaaagaccactgaaaaagaaaatggagaaatgaaatattttacgaaagaaaataataacaattattcaataatctatcctcaggtttgcctcaaatatgtgacaagaaatgtataattcatgacatagtcatgtaactatgtaatccatcagggattcattacttggaaaatgacaggtcatgcattatccaaaaacaataccaaaaagacatattttataaaatgacaaaaaatattttacataattactcatttttgttgagtaagcaaaattacaaagtgtttttaaaaaaacctgtacaaatatgtttatgtattaaatcaccatccaaaatatttaaggaatatataaaaagatttttatgatcatagaaacatctattttcaaaacaatataaattaagcttttccccttgattcctgttggatatccatgttcagcatgacagtcagcactcgtaaatgccaagaaaagaattacctgaaaaagatcatttctccctattcaaatgagaatattttccctcggtagaatccatatacaatatggattgaaaattaagtcaccaagaatacatttagcatctttgtgttgggttctatacctaaaaattttccctccctgcccaaggtgattggaaagtactgcaattgagctaaaattttatctaggatggaaaatcaggatagactcgtttaaaaacaagtatattaaatgggttaaattaagcttttacagaacatgcttaattttgatattgagctctaaatgcaaaactcttttatactgaaaaaacacttaaagtagttttgtgtggcatcacagtgatttgtcatgaaaagccatatatgggggacatgctaaaatggcttctgaatgaaatacgacagcagagaaagatgccactgaaatgctgaaattatctttgctgagcagcttttgaatgctaagggttccagtatgtgacccaaagaaggagttgtctcaactccttggtacagggttcattcaaacccccaagctgtgagagtgtgtttatttttaattttttaaaaggtatttaatttccaaccacacttcttatttttttgaaaagacaattttccatttcagtattacattttaccaagaagtcactgctttttaggtgtgttgcatcaatatttaaataaaatcccagaaatgtattttaaagaatttcaggtttgaaaactcaaaccaacaggaagatatcacacctttgtatgtgcttctttgttcttgaagtagtcattatggttcattggaatctactgtagcataagctcctaggttgctccatttcttaggaaaatagcaatgaatgaatgtatagtagctgcatgtgtgaactactgctgtaaagtttgctgacatttctgcaacaacatttctccatctgatttaccagaacctgtaacaagaccagaacatgtattcatccagaaactcctgggctctgctttgttcaaagaggagcaaatccacatagaaattaaatgttataaatttatttttttcaaactaatttccaaagaatttagctgaagactcagagtcagcctacctcttgactctccacatccgcatctaagatcctgaaggccaaaggaatgtgcctgtgggatgccaaagccatcagtagctggaagaaagaatacctctttctagaggtttggtgtcctcttgctggcctgtcattatttggaaatacgcgcttttggaatttccttcattttcgctatttccaggttcagaaatcatacctaccacttgttctttctttgcccagtaaaactcagggtttctcttattcagagttaccatgttgcacacccccagtgctcagcctgcccagaagcccttctctgatctcagcaagatcttagtagtaaagctaacggatccattgaaattcatactcagcatctgtgactactagacaaagcccatttactgaaccataagtgtgcacttttaaactaaattattaactgaaagggaaaaaatagaaatgagggcattttgaagtttttagaaaagagaggaagagctgttggccagatcaaagagatacttataagcccggcacaatttttaacataagtcattcctggctattaagtaaaatatttcatgaaccagaagtcctgtttctctaatattataatttgttgaggtttgtgtgtgtgtgtgtgtgcatgtgcagacacatgtacacatataaattgaatacaaaaatagctctataacaccaaaaaacagagtttacagaaaataaacacaaaagctatatctgcaagacaagtttgattcatctagtttcatatagtttcatatagtttcatttttattaatatttaggtttaacttatagttctgcaattatttaaaaaacaagtacagagcgtttgattaaaaaaagtcaacaaatgtttcaaaacagctttgtacaaatgttataaaacatatttaatgattaagaaatgtactagactctatcatttacttttaaaacatttaattagaaaaacaggtgatatttaagactatttataaacttattggccaaattgccattgtaaactgaaccatgtatgcactctcttttctgaccaaactacaatggtatattggtaaattatttaacaacacactgtccaggagggaaaaaaaaaaaacagtctctgatttgtatcatttgccaatttccatggtccaaatattctctctccattttcaaactaccaaagtgaccctaatcagcttacaaaattcctggaaatgtatctgccacctcttaccaaccagtgtgagctgacttcagcacaccactgagacagattacacgatagacagatagatagatagatagatagatagatagatagatagatagatattgatagagaacatgttgtgtctatatacatatccaatgacacacagtataatcatgttttaaattatgccaaaagtactgattatatcaagcccagtaaacataatgctacacagcacccattctttaattttgatttctaaaattataaccttcctttgatattaataaaatgttatgaacttgcaggagaaggaaggagttgaaagaaggaaaatataaagggtgatccacagtgaaaatcagacctacacaagccacaaaaaaattgtctcattttcccaaggaattcaaagtcctgtgatacacattacaaaagatgacactttgtaaatattttgaacttctatgatccaatttcaacttcattggtccaatttgtcaaactattttcctctgagcactagattcatgggcaatttaatctctgaatattttctgtgtcataagtgtgcttgaaaagaggcttgtagtaaacagatatttttacaaaatttgatgcttctgcaaccataataattttatctataaatgcgtatattacatatatatatatatatacacatacactcacatgcagatatttacatatatagatattctcttttccttttataaaatcaaagtctaggctcaattggaaaatggaaatatttgcaccaaaagaaaaaagtgccattgttgtgatcaatggagtaaagctggggtatagtagaggctggggaagccctgcccatgttctctccaaggccacagcttgcacaccgtgaatggtggccccactggctccatggagtgtgccttcacgcgggggaatgtccttgtccaacacgctgtaatctactccatgggaactgactgtcctgcttttcacaacattgagaaacaggcccagagcctgtctcatgtgccaggtgcagtcacattattgttaaaataaagtggcttctgacaaatcagtttttcaaaatagcatcctatgtacttttcatttcttccaacaaccctcaggcccccttttgccagttttctcccccaggggagattttcaagactactggagaaaaatctgttaataaaacatttgctctgaaaaaaaaaaaaaaaaaaaaaaaaaaaaaaaaacaaattcgatcaaagaaaaacaacaaacgaggagggggcgccgcgcctcaaaagaaaattccccgcgaagggggccaccatcattatcagcgccgccagccgcagatttgtgtgagaaagagggggctcccacctaagggaagggcccggtatcaaacaagagcagccgccgcgggccgtgtctaaaaacgaccagtcagcagggtgcgaaaacagcgtccagtgcgggcgacacccgttgaaaggaaggaacaccccatcctggggggcggagaacaatggggcacaaactgccgg

SEQ ID NO: 406814 - DNA, 8233 bp, Homo sapiens
gctctaatattcctctagtttcctttgtcacccaaaggatgtcctcatgattttggaagtcatggtcaaaaaactggtgtttgagttttcttttctgatcttctacccatttccccttttcttgccaaaaatcgtgtttcatcactggtcatttataacaaagttataagattacattatatctacagtattatgagattaaaaactttgctttaattagcaagaacgtgcaaaaagcaatcccacattctcattgccctgctagttctgcattctttcacagttcagcaaaactatctgaaatagtttctgggacatgagccaactcttcagccttagcttgttcattatattccttaagaagacttggaagactaattagttgaaccaaaagaagaatgtgctatgatatgagcaaaacaaatagaatgtcttaatgagagatgcttaaaatttcactttgtgaaacttttcctccctcataaaattttgttctatttttagttaatacatcaattcccaatgtcacagaagtaaaggagaacatgacatttggatcaactttagtcaccaacccaaatggaggatttctggtaagaatggagagaatgatatttattgacaacagatatgctatcattttaagtctttgtaagatctgttatataattttcagtctaatgatttctaattttaaaacaattttttaaaggcttgtgggcccttatatgcctatagatgtggacatttgcattacacaactggaatctgttctgacgtcagccccacatttcaagtcgtgaattccattgcccctgtacaagaatgcagcactcaactggacatagtcatagtgctggatggttccaacagtatttacccatgggacagtgttacagcttttttaaatgaccttcttgaaagaatggatattggtcctaaacagacacaggttggaattgtacagtatggagaaaacgtgacccatgagttcaacctcaataagtattcttccaccgaagaggtacttgttgcagcaaagaaaatagtccagagaggtggccgccagactatgacagctcttggaatagacacagcaagaaaggaggcattcacggaagcccggggtgcccgaagaggagttaaaaaagtcatggttattgtgacagatggagagtctcatgacaatcatcgactgaagaaggtcatccaagactgtgaagatgaaaacattcaacggttttccatagctattcttggcagctataaccgaggaaatttaagcactgaaaaatttgtggaggaaataaaatcaattgcaagtgaacccactgaaaagcatttcttcaatgtctctgatgaattggctctagtcaccattgttaaaactctgggagaaagaatatttgccctggaagccacagctgaccagtcagcagcttcatttgaaatggaaatgtctcagactggcttcagtgctcattattcacaggactgggtcatgcttggagcagtaggagcctatgattggaatggaacagttgtcatgcagaaggctagtcaaatcataatccctcgaaacacaacctttaatgttgagtctaccaaaaagaatgaaccgcttgcttcttatttaggttacactgtaaactctgctactgcttcttctggagatgtgctctatattgctggacagcctcggtacaatcatacaggccaggtcattatctacaggatggaagatggaaacatcaaaattctccagacgctcagtggagaacagattggttcctactttggcagtattttaacaacaactgacattgacaaggattctaatactgacattcttctagtcggagcccctatgtacatgggaacagagaaggaggagcaaggaaaagtgtatgtgtatgctctcaatcagacaaggtttgaatatcaaatgagcctggaacctattaagcagacgtgctgttcatctcggcagcacaattcatgcacaacagaaaacaaaaatgagccatgcggggctcgttttggaactgcaattgctgctgtaaaagacctcaatcttgatggatttaatgacatcgtgataggagctccgctggaagatgatcacgggggagctgtgtacatttatcatggaagtggcaagactataaggaaagagtatgcacaacgtattccatcaggtggggatggtaagacactgaaattttttggccagtctatccacggagaaatggatttaaatggtgacggtctgacagatgtgactattgggggccttggtggtgctgccctcttctggtcccgagatgtggccgtagttaaagtgaccatgaattttgagccaaataaagtgaatattcaaaagaaaaactgccatatggagggaaaggaaacagtatgcataaatgctacagtgtgttttgatgtgaaattaaagtctaaagaagacacgatttatgaagctgatttgcagtaccgtgtcaccctagattcactaagacaaatatcacgaagttttttctctggaactcaagagagaaaggttcaaaggaacatcacagttcgaaaatcagaatgcactaagcactccttctacatgttggacaagcatgactttcaggactctgtgagaataacgttggactttaatcttaccgatccagaaaatgggcctgttcttgatgattctttaccaaactcagtacatgaatatattccctttgccaaagattgtggaaataaggaaaaatgtatctcagacctcagcctgcatgtcgccaccactgaaaaggacctgctgattgtccgatcccagaatgataagttcaacgttagcctcacagtcaaaaatacaaaggacagtgcctataacaccaggacaatagtgcattattctccaaatctagttttttcaggaattgaggctatccaaaaagacagttgtgaatctaatcataatatcacatgtaaagttggatatcccttcctgagaagaggagagatggtaactttcaaaatattgtttcagtttaacacatcctatctcatggaaaatgtgaccatttatttaagtgcaacaagtgacagcgaagaacctcctgaaaccctttctgataatgtagtaaacatttctatcccggtaaaatatgaagttggactacagttttacagctctgcaagtgaataccacatttcaattgctgccaatgagacagtccctgaagttattaattctactgaggacattggaaatgaaattaatatcttctacttgattagaaaaagtggatcttttccaatgccagagcttaagctgtcaatttcattccccaatatgacatcaaatggttaccctgtgctgtacccaactggattgtcatcttctgagaatgcaaactgcagaccccatatctttgaggatcctttcagtatcaactctggaaagaaaatgactacatcaactgaccatctcaaacgaggcacaattctggactgcaatacatgtaaatttgctaccatcacatgtaatctcacttcttctgacatcagccaagtcaatgtttcgcttatcttgtggaaaccaacttttataaaatcatatttttccagcttaaatcttactataaggggagaacttcggagtgaaaatgcatctctggttttaagtagcagcaatcaaaaaagagagcttgctattcaaatatccaaagatgggctaccgggcagagtgccattatgggtcatcctgctgagtgcttttgccggattgttgctgttaatgctgctcattttagcactgtggaagattggattcttcaaaagaccactgaaaaagaaaatggagaaatgaaatattttacgaaagaaaataataacaattattcaataatctatcctcaggtttgcctcaaatatgtgacaagaaatgtataattcatgacatagtcatgtaactatgtaatccatcagggattcattacttggaaaatgacaggtcatgcattatccaaaaacaataccaaaaagacatattttataaaatgacaaaaaatattttacataattactcatttttgttgagtaagcaaaattacaaagtgtttttaaaaaaacctgtacaaatatgtttatgtattaaatcaccatccaaaatatttaaggaatatataaaaagatttttatgatcatagaaacatctattttcaaaacaatataaattaagcttttccccttgattcctgttggatatccatgttcagcatgacagtcagcactcgtaaatgccaagaaaagaattacctgaaaaagatcatttctccctattcaaatgagaatattttccctcggtagaatccatatacaatatggattgaaaattaagtcaccaagaatacatttagcatctttgtgttgggttctatacctaaaaattttccctccctgcccaaggtgattggaaagtactgcaattgagctaaaattttatctaggatggaaaatcaggatagactcgtttaaaaacaagtatattaaatgggttaaattaagcttttacagaacatgcttaattttgatattgagctctaaatgcaaaactcttttatactgaaaaaacacttaaagtagttttgtgtggcatcacagtgatttgtcatgaaaagccatatatgggggacatgctaaaatggcttctgaatgaaatacgacagcagagaaagatgccactgaaatgctgaaattatctttgctgagcagcttttgaatgctaagggttccagtatgtgacccaaagaaggagttgtctcaactccttggtacagggttcattcaaacccccaagctgtgagagtgtgtttatttttaattttttaaaaggtatttaatttccaaccacacttcttatttttttgaaaagacaattttccatttcagtattacattttaccaagaagtcactgctttttaggtgtgttgcatcaatatttaaataaaatcccagaaatgtattttaaagaatttcaggtttgaaaactcaaaccaacaggaagatatcacacctttgtatgtgcttctttgttcttgaagtagtcattatggttcattggaatctactgtagcataagctcctaggttgctccatttcttaggaaaatagcaatgaatgaatgtatagtagctgcatgtgtgaactactgctgtaaagtttgctgacatttctgcaacaacatttctccatctgatttaccagaacctgtaacaagaccagaacatgtattcatccagaaactcctgggctctgctttgttcaaagaggagcaaatccacatagaaattaaatgttataaatttatttttttcaaactaatttccaaagaatttagctgaagactcagagtcagcctacctcttgactctccacatccgcatctaagatcctgaaggccaaaggaatgtgcctgtgggatgccaaagccatcagtagctggaagaaagaatacctctttctagaggtttggtgtcctcttgctggcctgtcattatttggaaatacgcgcttttggaatttccttcattttcgctatttccaggttcagaaatcatacctaccacttgttctttctttgcccagtaaaactcagggtttctcttattcagagttaccatgttgcacacccccagtgctcagcctgcccagaagcccttctctgatctcagcaagatcttagtagtaaagctaacggatccattgaaattcatactcagcatctgtgactactagacaaagcccatttactgaaccataagtgtgcacttttaaactaaattattaactgaaagggaaaaaatagaaatgagggcattttgaagtttttagaaaagagaggaagagctgttggccagatcaaagagatacttataagcccggcacaatttttaacataagtcattcctggctattaagtaaaatatttcatgaaccagaagtcctgtttctctaatattataatttgttgaggtttgtgtgtgtgtgtgtgtgcatgtgcagacacatgtacacatataaattgaatacaaaaatagctctataacaccaaaaaacagagtttacagaaaataaacacaaaagctatatctgcaagacaagtttgattcatctagtttcatatagtttcatatagtttcatttttattaatatttaggtttaacttatagttctgcaattatttaaaaaacaagtacagagcgtttgattaaaaaaagtcaacaaatgtttcaaaacagctttgtacaaatgttataaaacatatttaatgattaagaaatgtactagactctatcatttacttttaaaacatttaattagaaaaacaggtgatatttaagactatttataaacttattggccaaattgccaaaaagtttctttttctctaactttggtattctaaataattgattattgctcccattgtaaactgaaccatgtatgcactctcttttctgaccaaactacaatggtatattggtaaattatttaacaacacactgtccaggagggaaaaaaaaaaaacagtctctgatttgtatcatttgccaatttccatggtccaaatattctctctccattttcaaactaccaaagtgaccctaatcagcttacaaaattcctggaaatgtatctgccacctcttaccaaccagtgtgagctgacttcagcacaccactgagacagattacacgatagacagatagatagatagatagatagatagatagatagatagatagatattgatagagaacatgttgtgtctatatacatatccaatgacacacagtataatcatgttttaaattatgccaaaagtactgattatatcaagcccagtaaacataatgctacacagcacccattctttaattttgatttctaaaattataaccttcctttgatattaataaaatgttatgaacttgcaggagaaggaaggagttgaaagaaggaaaatataaagggtgatccacagtgaaaatcagacctacacaagccacaaaaaaattgtctcattttcccaaggaattcaaagtcctgtgatacacattacaaaagatgacactttgtaaatattttgaacttctatgatccaatttcaacttcattggtccaatttgtcaaactattttcctctgagcactagattcatgggcaatttaatctctgaatattttctgtgtcataagtgtgcttgaaaagaggcttgtagtaaacagatatttttacaaaatttgatgcttctgcaaccataataattttatctataaatgcgtatattacatatatatatatatatacacatacactcacatgcagatatttacatatatagatattctcttttccttttataaaatcaaagtctaggctcaattggaaaatggaaatatttgcaccaaaagaaaaaagtgccattgttgtgatcaatggagtaaagctggggtatagtagaggctggggaagccctgcccatgttctctccaaggccacagcttgcacaccgtgaatggtggccccactggctccatggagtgtgccttcacgcgggggaatgtccttgtccaacacgctgtaatctactccatgggaactgactgtcctgcttttcacaacattgagaaacaggcccagagcctgtctcatgtgccaggtgcagtcacattattgttaaaataaagtggcttctgacaaatcagtttttcaaaatagcatcctatgtacttttcatttcttccaacaaccctcaggcccccttttgccagttttctcccccaggggagattttcaagactactggagaaaaatctgttaataaaacatttgctctgaaaaaaaaaaaaaaaaaaaaaaaaaaaaaaaaacaaattcgatcaaagaaaaacaacaaacgaggagggggcgccgcgcctcaaaagaaaattccccgcgaagggggccaccatcattatcagcgccgccagccgcagatttgtgtgagaaagagggggctcccacctaagggaagggcccggtatcaaacaagagcagccgccgcgggccgtgtctaaaaacgaccagtcagcagggtgcgaaaacagcgtccagtgcgggcgacacccgttgaaaggaaggaacaccccatcctggggggcggagaacaatggggcacaaactgccgg

SEQ ID NO: 406815 - DNA, 8299 bp, Homo sapiens
acccgccttcctaccaccttaggggatttggcccggagaacgagatcaccctctcaatgaaaggcagatgtccctttaaggtttgcttctacagcccgtggactttagcctaaacacggacccgcgaagctggctttatttgtccatgtctcggacagagcctgggaagctgccagtgagatttcagagaccaagagcgcgaaggggcgggcgatgtggcaatccgtctgggatgtgaaaagcgtggagcgcatttagaggcattcgacgaaaacacaggaaatcactcctctcccgctcctgggcgccgctgccactggggcagaggactgggaaccgcggcagcgggataagtggcccagccagagagcgcagctcccgcgcccggtcctgccctgcgaaccagcgcggccccctggcgctgaggctgctccggccatggcccctcggccccgcgcccgcccaggggtcgctgtcgcctgctgctggctcctcactgttgttctacgctgctgcgtatcattcaatgttgatgtgaaaaattcaatgactttcagcggcccggtggaagacatgtttggatatactgttcaacaatatgaaaatgaagaaggaaaatgggtgcttattggttctccgttagttggccaacccaaaaacagaactggagatgtctataagtgtccagttgggagaggtgaatcattaccttgcgtaaagttggatctaccagttaatacatcaattcccaatgtcacagaagtaaaggagaacatgacatttggatcaactttagtcaccaacccaaatggaggatttctggcttgtgggcccttatatgcctatagatgtggacatttgcattacacaactggaatctgttctgacgtcagccccacatttcaagtcgtgaattccattgcccctgtacaagaatgcagcactcaactggacatagtcatagtgctggatggttccaacagtatttacccatgggacagtgttacagcttttttaaatgaccttcttgaaagaatggatattggtcctaaacagacacaggttggaattgtacagtatggagaaaacgtgacccatgagttcaacctcaataagtattcttccaccgaagaggtacttgttgcagcaaagaaaatagtccagagaggtggccgccagactatgacagctcttggaatagacacagcaagaaaggaggcattcacggaagcccggggtgcccgaagaggagttaaaaaagtcatggttattgtgacagatggagagtctcatgacaatcatcgactgaagaaggtcatccaagactgtgaagatgaaaacattcaacggttttccatagctattcttggcagctataaccgaggaaatttaagcactgaaaaatttgtggaggaaataaaatcaattgcaagtgaacccactgaaaagcatttcttcaatgtctctgatgaattggctctagtcaccattgttaaaactctgggagaaagaatatttgccctggaagccacagctgaccagtcagcagcttcatttgaaatggaaatgtctcagactggcttcagtgctcattattcacaggactgggtcatgcttggagcagtaggagcctatgattggaatggaacagttgtcatgcagaaggctagtcaaatcataatccctcgaaacacaacctttaatgttgagtctaccaaaaagaatgaaccgcttgcttcttatttaggttacactgtaaactctgctactgcttcttctggagatgtgctctatattgctggacagcctcggtacaatcatacaggccaggtcattatctacaggatggaagatggaaacatcaaaattctccagacgctcagtggagaacagattggttcctactttggcagtattttaacaacaactgacattgacaaggattctaatactgacattcttctagtcggagcccctatgtacatgggaacagagaaggaggagcaaggaaaagtgtatgtgtatgctctcaatcagacaaggtttgaatatcaaatgagcctggaacctattaagcagacgtgctgttcatctcggcagcacaattcatgcacaacagaaaacaaaaatgagccatgcggggctcgttttggaactgcaattgctgctgtaaaagacctcaatcttgatggatttaatgacatcgtgataggagctccgctggaagatgatcacgggggagctgtgtacatttatcatggaagtggcaagactataaggaaagagtatgcacaacgtattccatcaggtggggatggtaagacactgaaattttttggccagtctatccacggagaaatggatttaaatggtgacggtctgacagatgtgactattgggggccttggtggtgctgccctcttctggtcccgagatgtggccgtagttaaagtgaccatgaattttgagccaaataaagtgaatattcaaaagaaaaactgccatatggagggaaaggaaacagtatgcataaatgctacagtgtgttttgatgtgaaattaaagtctaaagaagacacgatttatgaagctgatttgcagtaccgtgtcaccctagattcactaagacaaatatcacgaagttttttctctggaactcaagagagaaaggttcaaaggaacatcacagttcgaaaatcagaatgcactaagcactccttctacatgttggacaagcatgactttcaggactctgtgagaataacgttggactttaatcttaccgatccagaaaatgggcctgttcttgatgattctttaccaaactcagtacatgaatatattccctttgccaaagattgtggaaataaggaaaaatgtatctcagacctcagcctgcatgtcgccaccactgaaaaggacctgctgattgtccgatcccagaatgataagttcaacgttagcctcacagtcaaaaatacaaaggacagtgcctataacaccaggacaatagtgcattattctccaaatctagttttttcaggaattgaggctatccaaaaagacagttgtgaatctaatcataatatcacatgtaaagttggatatcccttcctgagaagaggagagatggtaactttcaaaatattgtttcagtttaacacatcctatctcatggaaaatgtgaccatttatttaagtgcaacaagtgacagcgaagaacctcctgaaaccctttctgataatgtagtaaacatttctatcccggtaaaatatgaagttggactacagttttacagctctgcaagtgaataccacatttcaattgctgccaatgagacagtccctgaagttattaattctactgaggacattggaaatgaaattaatatcttctacttgattagaaaaagtggatcttttccaatgccagagcttaagctgtcaatttcattccccaatatgacatcaaatggttaccctgtgctgtacccaactggattgtcatcttctgagaatgcaaactgcagaccccatatctttgaggatcctttcagtatcaactctggaaagaaaatgactacatcaactgaccatctcaaacgaggcacaattctggactgcaatacatgtaaatttgctaccatcacatgtaatctcacttcttctgacatcagccaagtcaatgtttcgcttatcttgtggaaaccaacttttataaaatcatatttttccagcttaaatcttactataaggggagaacttcggagtgaaaatgcatctctggttttaagtagcagcaatcaaaaaagagagattatgggtcatcctgctgagtgcttttgccggattgttgctgttaatgctgctcattttagcactgtggaagattggattcttcaaaagaccactgaaaaagaaaatggagaaatgaaatattttacgaaagaaaataataacaattattcaataatctatcctcaggtttgcctcaaatatgtgacaagaaatgtataattcatgacatagtcatgtaactatgtaatccatcagggattcattacttggaaaatgacaggtcatgcattatccaaaaacaataccaaaaagacatattttataaaatgacaaaaaatattttacataattactcatttttgttgagtaagcaaaattacaaagtgtttttaaaaaaacctgtacaaatatgtttatgtattaaatcaccatccaaaatatttaaggaatatataaaaagatttttatgatcatagaaacatctattttcaaaacaatataaattaagcttttccccttgattcctgttggatatccatgttcagcatgacagtcagcactcgtaaatgccaagaaaagaattacctgaaaaagatcatttctccctattcaaatgagaatattttccctcggtagaatccatatacaatatggattgaaaattaagtcaccaagaatacatttagcatctttgtgttgggttctatacctaaaaattttccctccctgcccaaggtgattggaaagtactgcaattgagctaaaattttatctaggatggaaaatcaggatagactcgtttaaaaacaagtatattaaatgggttaaattaagcttttacagaacatgcttaattttgatattgagctctaaatgcaaaactcttttatactgaaaaaacacttaaagtagttttgtgtggcatcacagtgatttgtcatgaaaagccatatatgggggacatgctaaaatggcttctgaatgaaatacgacagcagagaaagatgccactgaaatgctgaaattatctttgctgagcagcttttgaatgctaagggttccagtatgtgacccaaagaaggagttgtctcaactccttggtacagggttcattcaaacccccaagctgtgagagtgtgtttatttttaattttttaaaaggtatttaatttccaaccacacttcttatttttttgaaaagacaattttccatttcagtattacattttaccaagaagtcactgctttttaggtgtgttgcatcaatatttaaataaaatcccagaaatgtattttaaagaatttcaggtttgaaaactcaaaccaacaggaagatatcacacctttgtatgtgcttctttgttcttgaagtagtcattatggttcattggaatctactgtagcataagctcctaggttgctccatttcttaggaaaatagcaatgaatgaatgtatagtagctgcatgtgtgaactactgctgtaaagtttgctgacatttctgcaacaacatttctccatctgatttaccagaacctgtaacaagaccagaacatgtattcatccagaaactcctgggctctgctttgttcaaagaggagcaaatccacatagaaattaaatgttataaatttatttttttcaaactaatttccaaagaatttagctgaagactcagagtcagcctacctcttgactctccacatccgcatctaagatcctgaaggccaaaggaatgtgcctgtgggatgccaaagccatcagtagctggaagaaagaatacctctttctagaggtttggtgtcctcttgctggcctgtcattatttggaaatacgcgcttttggaatttccttcattttcgctatttccaggttcagaaatcatacctaccacttgttctttctttgcccagtaaaactcagggtttctcttattcagagttaccatgttgcacacccccagtgctcagcctgcccagaagcccttctctgatctcagcaagatcttagtagtaaagctaacggatccattgaaattcatactcagcatctgtgactactagacaaagcccatttactgaaccataagtgtgcacttttaaactaaattattaactgaaagggaaaaaatagaaatgagggcattttgaagtttttagaaaagagaggaagagctgttggccagatcaaagagatacttataagcccggcacaatttttaacataagtcattcctggctattaagtaaaatatttcatgaaccagaagtcctgtttctctaatattataatttgttgaggtttgtgtgtgtgtgtgtgtgcatgtgcagacacatgtacacatataaattgaatacaaaaatagctctataacaccaaaaaacagagtttacagaaaataaacacaaaagctatatctgcaagacaagtttgattcatctagtttcatatagtttcatatagtttcatttttattaatatttaggtttaacttatagttctgcaattatttaaaaaacaagtacagagcgtttgattaaaaaaagtcaacaaatgtttcaaaacagctttgtacaaatgttataaaacatatttaatgattaagaaatgtactagactctatcatttacttttaaaacatttaattagaaaaacaggtgatatttaagactatttataaacttattggccaaattgccaaaaagtttctttttctctaactttggtattctaaataattgattattgctcccattgtaaactgaaccatgtatgcactctcttttctgaccaaactacaatggtatattggtaaattatttaacaacacactgtccaggagggaaaaaaaaaaaacagtctctgatttgtatcatttgccaatttccatggtccaaatattctctctccattttcaaactaccaaagtgaccctaatcagcttacaaaattcctggaaatgtatctgccacctcttaccaaccagtgtgagctgacttcagcacaccactgagacagattacacgatagacagatagatagatagatagatagatagatagatagatagatagatattgatagagaacatgttgtgtctatatacatatccaatgacacacagtataatcatgttttaaattatgccaaaagtactgattatatcaagcccagtaaacataatgctacacagcacccattctttaattttgatttctaaaattataaccttcctttgatattaataaaatgttatgaacttgcaggagaaggaaggagttgaaagaaggaaaatataaagggtgatccacagtgaaaatcagacctacacaagccacaaaaaaattgtctcattttcccaaggaattcaaagtcctgtgatacacattacaaaagatgacactttgtaaatattttgaacttctatgatccaatttcaacttcattggtccaatttgtcaaactattttcctctgagcactagattcatgggcaatttaatctctgaatattttctgtgtcataagtgtgcttgaaaagaggcttgtagtaaacagatatttttacaaaatttgatgcttctgcaaccataataattttatctataaatgcgtatattacatatatatatatatatacacatacactcacatgcagatatttacatatatagatattctcttttccttttataaaatcaaagtctaggctcaattggaaaatggaaatatttgcaccaaaagaaaaaagtgccattgttgtgatcaatggagtaaagctggggtatagtagaggctggggaagccctgcccatgttctctccaaggccacagcttgcacaccgtgaatggtggccccactggctccatggagtgtgccttcacgcgggggaatgtccttgtccaacacgctgtaatctactccatgggaactgactgtcctgcttttcacaacattgagaaacaggcccagagcctgtctcatgtgccaggtgcagtcacattattgttaaaataaagtggcttctgacaaatcagtttttcaaaatagcatcctatgtacttttcatttcttccaacaaccctcaggcccccttttgccagttttctcccccaggggagattttcaagactactggagaaaaatctgttaataaaacatttgctctgaaaaaaaaaaaaaaaaaaaaaaaaaaaaaaaaacaaattcgatcaaagaaaaacaacaaacgaggagggggcgccgcgcctcaaaagaaaattccccgcgaagggggccaccatcattatcagcgccgccagccgcagatttgtgtgagaaagagggggctcccacctaagggaagggcccggtatcaaacaagagcagccgccgcgggccgtgtctaaaaacgaccagtcagcagggtgcgaaaacagcgtccagtgcgggcgacacccgttgaaaggaaggaacaccccatcctggggggcggagaacaatggggcacaaactgccgg

SEQ ID NO: 406816 - DNA, 8315 bp, Homo sapiens
acccgccttcctaccaccttaggggatttggcccggagaacgagatcaccctctcaatgaaaggcagatgtccctttaaggtttgcttctacagcccgtggactttagcctaaacacggacccgcgaagctggctttatttgtccatgtctcggacagagcctgggaagctgccagtgagatttcagagaccaagagcgcgaaggggcgggcgatgtggcaatccgtctgggatgtgaaaagcgtggagcgcatttagaggcattcgacgaaaacacaggaaatcactcctctcccgctcctgggcgccgctgccactggggcagaggactgggaaccgcggcagcgggataagtggcccagccagagagcgcagctcccgcgcccggtcctgccctgcgaaccagcgcggccccctggcgctgaggctgctccggccatggcccctcggccccgcgcccgcccaggggtcgctgtcgcctgctgctggctcctcactgttgttctacgctgctgcgtatcattcaatgttgatgtgaaaaattcaatgactttcagcggcccggtggaagacatgtttggatatactgttcaacaatatgaaaatgaagaaggaaaatgggtgcttattggttctccgttagttggccaacccaaaaacagaactggagatgtctataagtgtccagttgggagaggtgaatcattaccttgcgtaaagttggatctaccagttaatacatcaattcccaatgtcacagaagtaaaggagaacatgacatttggatcaactttagtcaccaacccaaatggaggatttctggcttgtgggcccttatatgcctatagatgtggacatttgcattacacaactggaatctgttctgacgtcagccccacatttcaagtcgtgaattccattgcccctgtacaagaatgcagcactcaactggacatagtcatagtgctggatggttccaacagtatttacccatgggacagtgttacagcttttttaaatgaccttcttgaaagaatggatattggtcctaaacagacacaggttggaattgtacagtatggagaaaacgtgacccatgagttcaacctcaataagtattcttccaccgaagaggtacttgttgcagcaaagaaaatagtccagagaggtggccgccagactatgacagctcttggaatagacacagcaagaaaggaggcattcacggaagcccggggtgcccgaagaggagttaaaaaagtcatggttattgtgacagatggagagtctcatgacaatcatcgactgaagaaggtcatccaagactgtgaagatgaaaacattcaacggttttccatagctattcttggcagctataaccgaggaaatttaagcactgaaaaatttgtggaggaaataaaatcaattgcaagtgaacccactgaaaagcatttcttcaatgtctctgatgaattggctctagtcaccattgttaaaactctgggagaaagaatatttgccctggaagccacagctgaccagtcagcagcttcatttgaaatggaaatgtctcagactggcttcagtgctcattattcacaggactgggtcatgcttggagcagtaggagcctatgattggaatggaacagttgtcatgcagaaggctagtcaaatcataatccctcgaaacacaacctttaatgttgagtctaccaaaaagaatgaaccgcttgcttcttatttaggttacactgtaaactctgctactgcttcttctggagatgtgctctatattgctggacagcctcggtacaatcatacaggccaggtcattatctacaggatggaagatggaaacatcaaaattctccagacgctcagtggagaacagattggttcctactttggcagtattttaacaacaactgacattgacaaggattctaatactgacattcttctagtcggagcccctatgtacatgggaacagagaaggaggagcaaggaaaagtgtatgtgtatgctctcaatcagacaaggtttgaatatcaaatgagcctggaacctattaagcagacgtgctgttcatctcggcagcacaattcatgcacaacagaaaacaaaaatgagccatgcggggctcgttttggaactgcaattgctgctgtaaaagacctcaatcttgatggatttaatgacatcgtgataggagctccgctggaagatgatcacgggggagctgtgtacatttatcatggaagtggcaagactataaggaaagagtatgcacaacgtattccatcaggtggggatggtaagacactgaaattttttggccagtctatccacggagaaatggatttaaatggtgacggtctgacagatgtgactattgggggccttggtggtgctgccctcttctggtcccgagatgtggccgtagttaaagtgaccatgaattttgagccaaataaagtgaatattcaaaagaaaaactgccatatggagggaaaggaaacagtatgcataaatgctacagtgtgttttgatgtgaaattaaagtctaaagaagacacgatttatgaagctgatttgcagtaccgtgtcaccctagattcactaagacaaatatcacgaagttttttctctggaactcaagagagaaaggttcaaaggaacatcacagttcgaaaatcagaatgcactaagcactccttctacatgttggacaagcatgactttcaggactctgtgagaataacgttggactttaatcttaccgatccagaaaatgggcctgttcttgatgattctttaccaaactcagtacatgaatatattccctttgccaaagattgtggaaataaggaaaaatgtatctcagacctcagcctgcatgtcgccaccactgaaaaggacctgctgattgtccgatcccagaatgataagttcaacgttagcctcacagtcaaaaatacaaaggacagtgcctataacaccaggacaatagtgcattattctccaaatctagttttttcaggaattgaggctatccaaaaagacagttgtgaatctaatcataatatcacatgtaaagttggatatcccttcctgagaagaggagagatggtaactttcaaaatattgtttcagtttaacacatcctatctcatggaaaatgtgaccatttatttaagtgcaacaagtgacagcgaagaacctcctgaaaccctttctgataatgtagtaaacatttctatcccggtaaaatatgaagttggactacagttttacagctctgcaagtgaataccacatttcaattgctgccaatgagacagtccctgaagttattaattctactgaggacattggaaatgaaattaatatcttctacttgattagaaaaagtggatcttttccaatgccagagcttaagctgtcaatttcattccccaatatgacatcaaatggttaccctgtgctaatgcaaactgcagaccccatatctttgaggatcctttcagtatcaactctggaaagaaaatgactacatcaactgaccatctcaaacgaggcacaattctggactgcaatacatgtaaatttgctaccatcacatgtaatctcacttcttctgacatcagccaagtcaatgtttcgcttatcttgtggaaaccaacttttataaaatcatatttttccagcttaaatcttactataaggggagaacttcggagtgaaaatgcatctctggttttaagtagcagcaatcaaaaaagagagcttgctattcaaatatccaaagatgggctaccgggcagagtgccattatgggtcatcctgctgagtgcttttgccggattgttgctgttaatgctgctcattttagcactgtggaagattggattcttcaaaagaccactgaaaaagaaaatggagaaatgaaatattttacgaaagaaaataataacaattattcaataatctatcctcaggtttgcctcaaatatgtgacaagaaatgtataattcatgacatagtcatgtaactatgtaatccatcagggattcattacttggaaaatgacaggtcatgcattatccaaaaacaataccaaaaagacatattttataaaatgacaaaaaatattttacataattactcatttttgttgagtaagcaaaattacaaagtgtttttaaaaaaacctgtacaaatatgtttatgtattaaatcaccatccaaaatatttaaggaatatataaaaagatttttatgatcatagaaacatctattttcaaaacaatataaattaagcttttccccttgattcctgttggatatccatgttcagcatgacagtcagcactcgtaaatgccaagaaaagaattacctgaaaaagatcatttctccctattcaaatgagaatattttccctcggtagaatccatatacaatatggattgaaaattaagtcaccaagaatacatttagcatctttgtgttgggttctatacctaaaaattttccctccctgcccaaggtgattggaaagtactgcaattgagctaaaattttatctaggatggaaaatcaggatagactcgtttaaaaacaagtatattaaatgggttaaattaagcttttacagaacatgcttaattttgatattgagctctaaatgcaaaactcttttatactgaaaaaacacttaaagtagttttgtgtggcatcacagtgatttgtcatgaaaagccatatatgggggacatgctaaaatggcttctgaatgaaatacgacagcagagaaagatgccactgaaatgctgaaattatctttgctgagcagcttttgaatgctaagggttccagtatgtgacccaaagaaggagttgtctcaactccttggtacagggttcattcaaacccccaagctgtgagagtgtgtttatttttaattttttaaaaggtatttaatttccaaccacacttcttatttttttgaaaagacaattttccatttcagtattacattttaccaagaagtcactgctttttaggtgtgttgcatcaatatttaaataaaatcccagaaatgtattttaaagaatttcaggtttgaaaactcaaaccaacaggaagatatcacacctttgtatgtgcttctttgttcttgaagtagtcattatggttcattggaatctactgtagcataagctcctaggttgctccatttcttaggaaaatagcaatgaatgaatgtatagtagctgcatgtgtgaactactgctgtaaagtttgctgacatttctgcaacaacatttctccatctgatttaccagaacctgtaacaagaccagaacatgtattcatccagaaactcctgggctctgctttgttcaaagaggagcaaatccacatagaaattaaatgttataaatttatttttttcaaactaatttccaaagaatttagctgaagactcagagtcagcctacctcttgactctccacatccgcatctaagatcctgaaggccaaaggaatgtgcctgtgggatgccaaagccatcagtagctggaagaaagaatacctctttctagaggtttggtgtcctcttgctggcctgtcattatttggaaatacgcgcttttggaatttccttcattttcgctatttccaggttcagaaatcatacctaccacttgttctttctttgcccagtaaaactcagggtttctcttattcagagttaccatgttgcacacccccagtgctcagcctgcccagaagcccttctctgatctcagcaagatcttagtagtaaagctaacggatccattgaaattcatactcagcatctgtgactactagacaaagcccatttactgaaccataagtgtgcacttttaaactaaattattaactgaaagggaaaaaatagaaatgagggcattttgaagtttttagaaaagagaggaagagctgttggccagatcaaagagatacttataagcccggcacaatttttaacataagtcattcctggctattaagtaaaatatttcatgaaccagaagtcctgtttctctaatattataatttgttgaggtttgtgtgtgtgtgtgtgtgcatgtgcagacacatgtacacatataaattgaatacaaaaatagctctataacaccaaaaaacagagtttacagaaaataaacacaaaagctatatctgcaagacaagtttgattcatctagtttcatatagtttcatatagtttcatttttattaatatttaggtttaacttatagttctgcaattatttaaaaaacaagtacagagcgtttgattaaaaaaagtcaacaaatgtttcaaaacagctttgtacaaatgttataaaacatatttaatgattaagaaatgtactagactctatcatttacttttaaaacatttaattagaaaaacaggtgatatttaagactatttataaacttattggccaaattgccaaaaagtttctttttctctaactttggtattctaaataattgattattgctcccattgtaaactgaaccatgtatgcactctcttttctgaccaaactacaatggtatattggtaaattatttaacaacacactgtccaggagggaaaaaaaaaaaacagtctctgatttgtatcatttgccaatttccatggtccaaatattctctctccattttcaaactaccaaagtgaccctaatcagcttacaaaattcctggaaatgtatctgccacctcttaccaaccagtgtgagctgacttcagcacaccactgagacagattacacgatagacagatagatagatagatagatagatagatagatagatagatagatattgatagagaacatgttgtgtctatatacatatccaatgacacacagtataatcatgttttaaattatgccaaaagtactgattatatcaagcccagtaaacataatgctacacagcacccattctttaattttgatttctaaaattataaccttcctttgatattaataaaatgttatgaacttgcaggagaaggaaggagttgaaagaaggaaaatataaagggtgatccacagtgaaaatcagacctacacaagccacaaaaaaattgtctcattttcccaaggaattcaaagtcctgtgatacacattacaaaagatgacactttgtaaatattttgaacttctatgatccaatttcaacttcattggtccaatttgtcaaactattttcctctgagcactagattcatgggcaatttaatctctgaatattttctgtgtcataagtgtgcttgaaaagaggcttgtagtaaacagatatttttacaaaatttgatgcttctgcaaccataataattttatctataaatgcgtatattacatatatatatatatatacacatacactcacatgcagatatttacatatatagatattctcttttccttttataaaatcaaagtctaggctcaattggaaaatggaaatatttgcaccaaaagaaaaaagtgccattgttgtgatcaatggagtaaagctggggtatagtagaggctggggaagccctgcccatgttctctccaaggccacagcttgcacaccgtgaatggtggccccactggctccatggagtgtgccttcacgcgggggaatgtccttgtccaacacgctgtaatctactccatgggaactgactgtcctgcttttcacaacattgagaaacaggcccagagcctgtctcatgtgccaggtgcagtcacattattgttaaaataaagtggcttctgacaaatcagtttttcaaaatagcatcctatgtacttttcatttcttccaacaaccctcaggcccccttttgccagttttctcccccaggggagattttcaagactactggagaaaaatctgttaataaaacatttgctctgaaaaaaaaaaaaaaaaaaaaaaaaaaaaaaaaacaaattcgatcaaagaaaaacaacaaacgaggagggggcgccgcgcctcaaaagaaaattccccgcgaagggggccaccatcattatcagcgccgccagccgcagatttgtgtgagaaagagggggctcccacctaagggaagggcccggtatcaaacaagagcagccgccgcgggccgtgtctaaaaacgaccagtcagcagggtgcgaaaacagcgtccagtgcgggcgacacccgttgaaaggaaggaacaccccatcctggggggcggagaacaatggggcacaaactgccgg

SEQ ID NO: 406817 - DNA, 4920 bp, Homo sapiens
cgattcccactcagctgggcgctagattacaatgtcttgacctggcaaaacctgcgtcatggtacgtacccaactggattgtcatcttctgagaatgcaaactgcagaccccatatctttgaggatcctttcagtatcaactctggaaagaaaatgactacatcaactgaccatctcaaacgaggcacaattctggactgcaatacatgtaaatttgctaccatcacatgtaatctcacttcttctgacatcagccaagtcaatgtttcgcttatcttgtggaaaccaacttttataaaatcatatttttccagcttaaatcttactataaggggagaacttcggagtgaaaatgcatctctggttttaagtagcagcaatcaaaaaagagagcttgctattcaaatatccaaagatgggctaccgggcagagtgccattatgggtcatcctgctgagtgcttttgccggattgttgctgttaatgctgctcattttagcactgtggaagattggattcttcaaaagaccactgaaaaagaaaatggagaaatgaaatattttacgaaagaaaataataacaattattcaataatctatcctcaggtttgcctcaaatatgtgacaagaaatgtataattcatgacatagtcatgtaactatgtaatccatcagggattcattacttggaaaatgacaggtcatgcattatccaaaaacaataccaaaaagacatattttataaaatgacaaaaaatattttacataattactcatttttgttgagtaagcaaaattacaaagtgtttttaaaaaaacctgtacaaatatgtttatgtattaaatcaccatccaaaatatttaaggaatatataaaaagatttttatgatcatagaaacatctattttcaaaacaatataaattaagcttttccccttgattcctgttggatatccatgttcagcatgacagtcagcactcgtaaatgccaagaaaagaattacctgaaaaagatcatttctccctattcaaatgagaatattttccctcggtagaatccatatacaatatggattgaaaattaagtcaccaagaatacatttagcatctttgtgttgggttctatacctaaaaattttccctccctgcccaaggtgattggaaagtactgcaattgagctaaaattttatctaggatggaaaatcaggatagactcgtttaaaaacaagtatattaaatgggttaaattaagcttttacagaacatgcttaattttgatattgagctctaaatgcaaaactcttttatactgaaaaaacacttaaagtagttttgtgtggcatcacagtgatttgtcatgaaaagccatatatgggggacatgctaaaatggcttctgaatgaaatacgacagcagagaaagatgccactgaaatgctgaaattatctttgctgagcagcttttgaatgctaagggttccagtatgtgacccaaagaaggagttgtctcaactccttggtacagggttcattcaaacccccaagctgtgagagtgtgtttatttttaattttttaaaaggtatttaatttccaaccacacttcttatttttttgaaaagacaattttccatttcagtattacattttaccaagaagtcactgctttttaggtgtgttgcatcaatatttaaataaaatcccagaaatgtattttaaagaatttcaggtttgaaaactcaaaccaacaggaagatatcacacctttgtatgtgcttctttgttcttgaagtagtcattatggttcattggaatctactgtagcataagctcctaggttgctccatttcttaggaaaatagcaatgaatgaatgtatagtagctgcatgtgtgaactactgctgtaaagtttgctgacatttctgcaacaacatttctccatctgatttaccagaacctgtaacaagaccagaacatgtattcatccagaaactcctgggctctgctttgttcaaagaggagcaaatccacatagaaattaaatgttataaatttatttttttcaaactaatttccaaagaatttagctgaagactcagagtcagcctacctcttgactctccacatccgcatctaagatcctgaaggccaaaggaatgtgcctgtgggatgccaaagccatcagtagctggaagaaagaatacctctttctagaggtttggtgtcctcttgctggcctgtcattatttggaaatacgcgcttttggaatttccttcattttcgctatttccaggttcagaaatcatacctaccacttgttctttctttgcccagtaaaactcagggtttctcttattcagagttaccatgttgcacacccccagtgctcagcctgcccagaagcccttctctgatctcagcaagatcttagtagtaaagctaacggatccattgaaattcatactcagcatctgtgactactagacaaagcccatttactgaaccataagtgtgcacttttaaactaaattattaactgaaagggaaaaaatagaaatgagggcattttgaagtttttagaaaagagaggaagagctgttggccagatcaaagagatacttataagcccggcacaatttttaacataagtcattcctggctattaagtaaaatatttcatgaaccagaagtcctgtttctctaatattataatttgttgaggtttgtgtgtgtgtgtgtgtgcatgtgcagacacatgtacacatataaattgaatacaaaaatagctctataacaccaaaaaacagagtttacagaaaataaacacaaaagctatatctgcaagacaagtttgattcatctagtttcatatagtttcatatagtttcatttttattaatatttaggtttaacttatagttctgcaattatttaaaaaacaagtacagagcgtttgattaaaaaaagtcaacaaatgtttcaaaacagctttgtacaaatgttataaaacatatttaatgattaagaaatgtactagactctatcatttacttttaaaacatttaattagaaaaacaggtgatatttaagactatttataaacttattggccaaattgccaaaaagtttctttttctctaactttggtattctaaataattgattattgctcccattgtaaactgaaccatgtatgcactctcttttctgaccaaactacaatggtatattggtaaattatttaacaacacactgtccaggagggaaaaaaaaaaaacagtctctgatttgtatcatttgccaatttccatggtccaaatattctctctccattttcaaactaccaaagtgaccctaatcagcttacaaaattcctggaaatgtatctgccacctcttaccaaccagtgtgagctgacttcagcacaccactgagacagattacacgatagacagatagatagatagatagatagatagatagatagatagatagatattgatagagaacatgttgtgtctatatacatatccaatgacacacagtataatcatgttttaaattatgccaaaagtactgattatatcaagcccagtaaacataatgctacacagcacccattctttaattttgatttctaaaattataaccttcctttgatattaataaaatgttatgaacttgcaggagaaggaaggagttgaaagaaggaaaatataaagggtgatccacagtgaaaatcagacctacacaagccacaaaaaaattgtctcattttcccaaggaattcaaagtcctgtgatacacattacaaaagatgacactttgtaaatattttgaacttctatgatccaatttcaacttcattggtccaatttgtcaaactattttcctctgagcactagattcatgggcaatttaatctctgaatattttctgtgtcataagtgtgcttgaaaagaggcttgtagtaaacagatatttttacaaaatttgatgcttctgcaaccataataattttatctataaatgcgtatattacatatatatatatatatacacatacactcacatgcagatatttacatatatagatattctcttttccttttataaaatcaaagtctaggctcaattggaaaatggaaatatttgcaccaaaagaaaaaagtgccattgttgtgatcaatggagtaaagctggggtatagtagaggctggggaagccctgcccatgttctctccaaggccacagcttgcacaccgtgaatggtggccccactggctccatggagtgtgccttcacgcgggggaatgtccttgtccaacacgctgtaatctactccatgggaactgactgtcctgcttttcacaacattgagaaacaggcccagagcctgtctcatgtgccaggtgcagtcacattattgttaaaataaagtggcttctgacaaatcagtttttcaaaatagcatcctatgtacttttcatttcttccaacaaccctcaggcccccttttgccagttttctcccccaggggagattttcaagactactggagaaaaatctgttaataaaacatttgctctgaaaaaaaaaaaaaaaaaaaaaaaaaaaaaaaaacaaattcgatcaaagaaaaacaacaaacgaggagggggcgccgcgcctcaaaagaaaattccccgcgaagggggccaccatcattatcagcgccgccagccgcagatttgtgtgagaaagagggggctcccacctaagggaagggcccggtatcaaacaagagcagccgccgcgggccgtgtctaaaaacgaccagtcagcagggtgcgaaaacagcgtccagtgcgggcgacacccgttgaaaggaaggaacaccccatcctggggggcggagaacaatggggcacaaactgccgg

SEQ ID NO: 406818 - DNA, 775 bp, Homo sapiens
cggccgctccaacatcaaagtgtatgtggcgctggatagcccaggatttgtgagggagcagttctgcgactacatgtttcaacaagcagtgaagaccgacaacaaactgctcctggaaaaccggtccaaatttcttcaggtacatgcctcctccggacacaagtactccctgaaagaggccctttgtgaccctactgtggctagccgcctttcagacactaaagctgctggggaagtcaaagccttggatgacttctataaaatgttacagcatgaaccggatcgagctttctatggactcaagcaggtggagaaggccaatgaagccatggcaattgacacattgctcatcagcgatgagctcttcaggcatcaggatgtagccacacggagccggtatgtgaggctggtggacagtgtgaaagagaatgcaggcaccgttaggatattctctagtcttcacgtttctggggaacagctcagccagttgactggggtagctgccattctccgcttccctgttcccgaactttctgaccaagagggtgattccagttctgaagaggattaatgattgaaacttaaaattgagacaatcttgtgtttcctaaactgttacagtacatttctcagcatccttgtgacagaaagctgcaagaatggcactttttgattcatacagggatttcttatgtctttggctacactagatattttgtgattggcaagacatgtatttaaacaataaactaaaaggaaataatctccacgtact

SEQ ID NO: 406819 - DNA, 1259 bp, Homo sapiens
acccgccttcctaccaccttaggggatttggcccggagaacgagatcaccctctcaatgaaaggcagatgtccctttaaggtttgcttctacagcccgtggactttagcctaaacacggacccgcgaagctggctttatttgtccatgtctcggacagagcctgggaagctgccagtgagatttcagagaccaagagcgcgaaggggcgggcgatgtggcaatccgtctgggatgtgaaaagcgtggagcgcatttagaggcattcgacgaaaacacaggaaatcactcctctcccgctcctgggcgccgctgccactggggcagaggactgggaaccgcggcagcgggataagtggcccagccagagagcgcagctcccgcgcccggtcctgccctgcgaaccagcgcggccccctggcgctgaggctgctccggccatggcccctcggccccgcgcccgcccaggggtcgctgtcgcctgctgctggctcctcactgttgttctacgctgctgcgtatcattcaatgttgatgtgaaaaattcaatgactttcagcggcccggtggaagacatgtttggatatactgttcaacaatatgaaaatgaagaaggaaaatgggtgcttattggttctccgttagttggccaacccaaaaacagaactggagatgtctataagtgtccagttgggagaggtgaatcattaccttgcgtaaagttggatctaccagttaatacatcaattcccaatgtcacagaagtaaaggagaacatgacatttggatcaactttagtcaccaacccaaatggaggatttctggcttgtgggcccttatatgcctatagatgtggacatttgcattacacaactggaatctgttctgacgtcagccccacatttcaagtcgtgaattccattgcccctgtacaagaatgcagcactcaactggacatagtcatagtgctggatggttccaacagtatttacccatgggacagtgttacagcttttttaaatgaccttcttgaaagaatggatattggtcctaaacagacacaggttggaattgtacagtatggagaaaacgtgacccatgagttcaacctcaataagtattcttccaccgaagaggtacttgttgcagcaaagaaaatagtccagagaggtggccgccagactatgacagctcttggaatagacacagcaaggtggaaagctaattacccatgctctcacttcatctgcctgctaagatg

SEQ ID NO: 406820 - DNA, 1969 bp, Homo sapiens
tctctcacttctggccagggaacgtggaaggcgcaccgacagggatccggccagggagggcgagtgaaagaaggaaatcagaaaggaagggagttaacaaaataataaaaacagcctgagccacggctggagagaccgagacccggcgcaagagagcgcagccttagtaggagaggaacgcgagaccggcagcgcagagcgcgcagcagcagcagcagcagcagcagcagcagcagcaggcgccgcagctgagaccggcggccgacggccagccctcagggggcggtcacaagtcagcgcccaagcaagtcaagcgacagcgctcgtcttcgcccgaactgatgcgctgcaaacgccggctcaacttcagcggctttggctacagcctgccgcagcagcagccggccgccgtggcgcgccgcaacgagcgcgagcgcaaccgcgtcaagttggtcaacctgggctttgccacccttcgggagcacgtccccaacggcgcggccaacaagaagatgagtaaggtggagacactgcgctcggcggtcgagtacatccgcgcgctgcagcagctgctggacgagcatgacgcggtgagcgccgccttccaggcaggcgtcctgtcgcccaccatctcccccaactactccaacgacttgaactccatggccggctcgccggtctcatcctactcgtcggacgagggctcttacgacccgctcagccccgaggagcaggagcttctcgacttcaccaactggttctgaggggctcggcctggtcaggccctggtgcgaatggactttggaagcagggtgatcgcacaacctgcatctttagtgctttcttgtcagtggcgttgggagggggagaaaaggaaaagaaaaaaaaagaagaagaagaagaaaagagaagaagaaaaaaacgaaaacagtcaaccaaccccatcgccaactaagcgaggcatgcctgagagacatggctttcagaaaacgggaagcgctcagaacagtatctttgcactccaatcattcacggagatatgaagagcaactgggacctgagtcaatgcgcaaaatgcagcttgtgtgcaaaagcagtgggctcctggcagaagggagcagcacacgcgttatagtaactcccatcacctctaacacgcacagctgaaagttcttgctcgggtcccttcacctccccgccctttcttagagtgcagttcttagccctctagaaacgagttggtgtctttcgtctcagtagcccccaccccaataagctgtagacattggtttacagtgaaactatgctattctcagccctttgaaactctgcttctcctccagggcccgattcccaaaccccatggcttccctcacactgtcttttctaccattttcattatagaatgcttccaatcttttgtgaattttttattataaaaaatctatttgtatctatcctaaccagttcggggatatattaagatatttttgtacataagagagaaagagagagaaaaatttatagaagttttgtacaaatggtttaaaatgtgtatatcttgatactttaacatgtaatgctattacctctgcatattttagatgtgtagttcaccttacaactgcaattttccctatgtggttttgtaaagaactctcctcataggtgagatcaagaggccaccagttgtacttcagcaccaatgtgtcttactttatagaaatgttgttaatgtattaatgatgttattaaatactgttcaagaagaacaaagtttatgcagctactgtccaaactcaaagtggcagccagttggttttgataggttgccttttggagatttctattactgccttttttttcttactgttttattacaaacttacaaaaatatgtataaccctgttttatacaaactagtttcgtaataaaactttttcctttttttaaaatgaaaaaaaaaagc

SEQ ID NO: 406821 - DNA, 2020 bp, Homo sapiens
tctctcacttctggccagggaacgtggaaggcgcaccgacagggatccggccagggagggcgagtgaaagaaggaaatcagaaaggaagggagttaacaaaataataaaaacagcctgagccacggctggagagaccgagacccggcgcaagagagcgcagccttagtaggagaggaacgcgagacgcggcagagcgcgttcagcactgacttttgctgctgcttctgcttttttttttcttagaaacaagaaggcgccagcggcagcctcacacgcgagcgccacgcgaggctcccgaagccaacccgcgaagggaggaggggagggaggaggaggcggcgtgcagggaggagaaaaagcattttcactttttttgctcccactctaagaagtctcccggggattttgtatatattttttaacttccgtcagggctcccgcttcatatttccttttctttccctctctgttcctgcacccaagttctctctgtgtccccttggtcaacctgggctttgccacccttcgggagcacgtccccaacggcgcggccaacaagaagatgagtaaggtggagacactgcgctcggcggtcgagtacatccgcgcgctgcagcagctgctggacgagcatgacgcggtgagcgccgccttccaggcaggcgtcctgtcgcccaccatctcccccaactactccaacgacttgaactccatggccggctcgccggtctcatcctactcgtcggacgagggctcttacgacccgctcagccccgaggagcaggagcttctcgacttcaccaactggttctgaggggctcggcctggtcaggccctggtgcgaatggactttggaagcagggtgatcgcacaacctgcatctttagtgctttcttgtcagtggcgttgggagggggagaaaaggaaaagaaaaaaaaagaagaagaagaagaaaagagaagaagaaaaaaacgaaaacagtcaaccaaccccatcgccaactaagcgaggcatgcctgagagacatggctttcagaaaacgggaagcgctcagaacagtatctttgcactccaatcattcacggagatatgaagagcaactgggacctgagtcaatgcgcaaaatgcagcttgtgtgcaaaagcagtgggctcctggcagaagggagcagcacacgcgttatagtaactcccatcacctctaacacgcacagctgaaagttcttgctcgggtcccttcacctccccgccctttcttagagtgcagttcttagccctctagaaacgagttggtgtctttcgtctcagtagcccccaccccaataagctgtagacattggtttacagtgaaactatgctattctcagccctttgaaactctgcttctcctccagggcccgattcccaaaccccatggcttccctcacactgtcttttctaccattttcattatagaatgcttccaatcttttgtgaattttttattataaaaaatctatttgtatctatcctaaccagttcggggatatattaagatatttttgtacataagagagaaagagagagaaaaatttatagaagttttgtacaaatggtttaaaatgtgtatatcttgatactttaacatgtaatgctattacctctgcatattttagatgtgtagttcaccttacaactgcaattttccctatgtggttttgtaaagaactctcctcataggtgagatcaagaggccaccagttgtacttcagcaccaatgtgtcttactttatagaaatgttgttaatgtattaatgatgttattaaatactgttcaagaagaacaaagtttatgcagctactgtccaaactcaaagtggcagccagttggttttgataggttgccttttggagatttctattactgccttttttttcttactgttttattacaaacttacaaaaatatgtataaccctgttttatacaaactagtttcgtaataaaactttttcctttttttaaaatgaaaaaaaaaagc

SEQ ID NO: 406822 - DNA, 1369 bp, Homo sapiens
tagtttcagcactggcctctgaaaatggccttgcccaggtctccaaggagtgaagggtagtagtgaggtgcagagatactggtgaaccgaatactgggacatgttaaaagagatgtctacctgacagactctttccccagacctccatctccctctaccactagcctacacgttcaaattaacctctcctgttcttttccttatgttatagggtgatcgcacaacctgcatctttagtgctttcttgtcagtggcgttgggagggggagaaaaggaaaagaaaaaaaaagaagaagaagaagaaaagagaagaagaaaaaaacgaaaacagtcaaccaaccccatcgccaactaagcgaggcatgcctgagagacatggctttcagaaaacgggaagcgctcagaacagtatctttgcactccaatcattcacggagatatgaagagcaactgggacctgagtcaatgcgcaaaatgcagcttgtgtgcaaaagcagtgggctcctggcagaagggagcagcacacgcgttatagtaactcccatcacctctaacacgcacagctgaaagttcttgctcgggtcccttcacctccccgccctttcttagagtgcagttcttagccctctagaaacgagttggtgtctttcgtctcagtagcccccaccccaataagctgtagacattggtttacagtgaaactatgctattctcagccctttgaaactctgcttctcctccagggcccgattcccaaaccccatggcttccctcacactgtcttttctaccattttcattatagaatgcttccaatcttttgtgaattttttattataaaaaatctatttgtatctatcctaaccagttcggggatatattaagatatttttgtacataagagagaaagagagagaaaaatttatagaagttttgtacaaatggtttaaaatgtgtatatcttgatactttaacatgtaatgctattacctctgcatattttagatgtgtagttcaccttacaactgcaattttccctatgtggttttgtaaagaactctcctcataggtgagatcaagaggccaccagttgtacttcagcaccaatgtgtcttactttatagaaatgttgttaatgtattaatgatgttattaaatactgttcaagaagaacaaagtttatgcagctactgtccaaactcaaagtggcagccagttggttttgataggttgccttttggagatttctattactgccttttttttcttactgttttattacaaacttacaaaaatatgtataaccctgttttatacaaactagtttcgtaataaaactttttcctttttttaaaatgaaaaaaaaaagc

SEQ ID NO: 406823 - DNA, 2482 bp, Homo sapiens
tctctcacttctggccagggaacgtggaaggcgcaccgacagggatccggccagggagggcgagtgaaagaaggaaatcagaaaggaagggagttaacaaaataataaaaacagcctgagccacggctggagagaccgagacccggcgcaagagagcgcagccttagtaggagaggaacgcgagacgcggcagagcgcgttcagcactgacttttgctgctgcttctgcttttttttttcttagaaacaagaaggcgccagcggcagcctcacacgcgagcgccacgcgaggctcccgaagccaacccgcgaagggaggaggggagggaggaggaggcggcgtgcagggaggagaaaaagcattttcactttttttgctcccactctaagaagtctcccggggattttgtatatattttttaacttccgtcagggctcccgcttcatatttccttttctttccctctctgttcctgcacccaagttctctctgtgtccccctcgcgggccccgcacctcgcgtcccggatcgctctgattccgcgactccttggccgccgctgcgcatggaaagctctgccaagatggagagcggcggcgccggccagcagccccagccgcagccccagcagcccttcctgccgcccgcagcctgtttctttgccacggccgcagccgcggcggccgcagccgccgcagcggcagcgcagagcgcgcagcagcagcagcagcagcagcagcagcagcagcaggcgccgcagctgagaccggcggccgacggccagccctcagggggcggtcacaagtcagcgcccaagcaagtcaagcgacagcgctcgtcttcgcccgaactgatgcgctgcaaacgccggctcaacttcagcggctttggctacagcctgccgcagcagcagccggccgccgtggcgcgccgcaacgagcgcgagcgcaaccgcgtcaagttggtcaacctgggctttgccacccttcgggagcacgtccccaacggcgcggccaacaagaagatgagtaaggtggagacactgcgctcggcggtcgagtacatccgcgcgctgcagcagctgctggacgagcatgacgcggtgagcgccgccttccaggcaggcgtcctgtcgcccaccatctcccccaactactccaacgacttgaactccatggccggctcgccggtctcatcctactcgtcggacgagggctcttacgacccgctcagccccgaggagcaggagcttctcgacttcaccaactggttctgaggggctcggcctggtcaggccctggtgcgaatggactttggaagcagggtgatcgcacaacctgcatctttagtgctttcttgtcagtggcgttgggagggggagaaaaggaaaagaaaaaaaaagaagaagaagaagaaaagagaagaagaaaaaaacgaaaacagtcaaccaaccccatcgccaactaagcgaggcatgcctgagagacatggctttcagaaaacgggaagcgctcagaacagtatctttgcactccaatcattcacggagatatgaagagcaactgggacctgagtcaatgcgcaaaatgcagcttgtgtgcaaaagcagtgggctcctggcagaagggagcagcacacgcgttatagtaactcccatcacctctaacacgcacagctgaaagttcttgctcgggtcccttcacctccccgccctttcttagagtgcagttcttagccctctagaaacgagttggtgtctttcgtctcagtagcccccaccccaataagctgtagacattggtttacagtgaaactatgctattctcagccctttgaaactctgcttctcctccagggcccgattcccaaaccccatggcttccctcacactgtcttttctaccattttcattatagaatgcttccaatcttttgtgaattttttattataaaaaatctatttgtatctatcctaaccagttcggggatatattaagatatttttgtacataagagagaaagagagagaaaaatttatagaagttttgtacaaatggtttaaaatgtgtatatcttgatactttaacatgtaatgctattacctctgcatattttagatgtgtagttcaccttacaactgcaattttccctatgtggttttgtaaagaactctcctcataggtgagatcaagaggccaccagttgtacttcagcaccaatgtgtcttactttatagaaatgttgttaatgtattaatgatgttattaaatactgttcaagaagaacaaagtttatgcagctactgtccaaactcaaagtggcagccagttggttttgataggttgccttttggagatttctattactgccttttttttcttactgttttattacaaacttacaaaaatatgtataaccctgttttatacaaactagtttcgtaataaaactttttcctttttttaaaatgaaaaaaaaaagc

SEQ ID NO: 406824 - DNA, 2313 bp, Homo sapiens
tctctcacttctggccagggaacgtggaaggcgcaccgacagggatccggccagggagggcgagtgaaagaaggaaatcagaaaggaagggagttaacaaaataataaaaacagcctgagccacggctggagagaccgagacccggcgcaagagagcgcagccttagtaggagaggaacgcgagacgcggcagagcgcgttcagcactgacttttgctgctgcttctgcttttttttttcttagaaacaagaaggcgccagcggcagcctcacacgcgagcgccacgcgaggctcccgaagccaacccgcgaagggaggaggggagggaggaggaggcggcgtgcagggaggagaaaaagcattttcactttttttgctcccactctaagaagtctcccggggattttgtatatattttttaacttccgtcagggctcccgcttcatatttccttttctttccctctctgttcctgcacccaagttctctctgtgtccccctcgcgggccccgcacctcgcgtcccggatcgctctgattccgcgactccttggccgccgctgcgcatggaaagctctgccaagatggagagcggcggcgccggccagcagccccagccgcagccccagcagcccttcctgccgcccgcagcctgtttctttgccacggccgcagccgcggcggccgcagccgccgcagcggcagcgcagagcgcgcagcagcagcagcagcagcagcagcagcagcagcaggcgccgcagctgagaccggcggccgacggccagccctcagggggcggtcacaagtcagcgcccaagcaagtcaagcgacagcgctcgtcttcgcccgaactgatgcgctgcaaacgccggctcaacttcagcggctttggctacagcctgccgcagcacagctgctggacgagcatgacgcggtgagcgccgccttccaggcaggcgtcctgtcgcccaccatctcccccaactactccaacgacttgaactccatggccggctcgccggtctcatcctactcgtcggacgagggctcttacgacccgctcagccccgaggagcaggagcttctcgacttcaccaactggttctgaggggctcggcctggtcaggccctggtgcgaatggactttggaagcagggtgatcgcacaacctgcatctttagtgctttcttgtcagtggcgttgggagggggagaaaaggaaaagaaaaaaaaagaagaagaagaagaaaagagaagaagaaaaaaacgaaaacagtcaaccaaccccatcgccaactaagcgaggcatgcctgagagacatggctttcagaaaacgggaagcgctcagaacagtatctttgcactccaatcattcacggagatatgaagagcaactgggacctgagtcaatgcgcaaaatgcagcttgtgtgcaaaagcagtgggctcctggcagaagggagcagcacacgcgttatagtaactcccatcacctctaacacgcacagctgaaagttcttgctcgggtcccttcacctccccgccctttcttagagtgcagttcttagccctctagaaacgagttggtgtctttcgtctcagtagcccccaccccaataagctgtagacattggtttacagtgaaactatgctattctcagccctttgaaactctgcttctcctccagggcccgattcccaaaccccatggcttccctcacactgtcttttctaccattttcattatagaatgcttccaatcttttgtgaattttttattataaaaaatctatttgtatctatcctaaccagttcggggatatattaagatatttttgtacataagagagaaagagagagaaaaatttatagaagttttgtacaaatggtttaaaatgtgtatatcttgatactttaacatgtaatgctattacctctgcatattttagatgtgtagttcaccttacaactgcaattttccctatgtggttttgtaaagaactctcctcataggtgagatcaagaggccaccagttgtacttcagcaccaatgtgtcttactttatagaaatgttgttaatgtattaatgatgttattaaatactgttcaagaagaacaaagtttatgcagctactgtccaaactcaaagtggcagccagttggttttgataggttgccttttggagatttctattactgccttttttttcttactgttttattacaaacttacaaaaatatgtataaccctgttttatacaaactagtttcgtaataaaactttttcctttttttaaaatgaaaaaaaaaagc

SEQ ID NO: 406825 - DNA, 2439 bp, Homo sapiens
agccgaggagaaggagaaggaggaggactaggaggaggaggacggcgacgaccagaaggggcccaagagagggggcgagcgaccgagcgccgcgacgcggaagtgaggtgcgtgcgggctgcagcgcagaccccggcccggcccctccgagagcgtcctgggcgctccctcacgccttgccttcaagccttctgcctttccaccctcgtgagcggagaactgggagtggccattcgacgacagtgtggtgtaaaggaattcattagccatggatgtattcatgaaaggactttcaaaggccaaggagggagttgtggctgctgctgagaaaaccaaacagggtgtggcagaagcagcaggaaagacaaaagagggtgttctctatgtaggctccaaaaccaaggagggagtggtgcatggtgtggcaacagtggctgagaagaccaaagagcaagtgacaaatgttggaggagcagtggtgacgggtgtgacagcagtagcccagaagacagtggagggagcagggagcattgcagcagccactggctttgtcaaaaaggaccagttgggcaagaatgaagaaggagccccacaggaaggaattctggaagatatgcctgtggatcctgacaatgaggcttatgaaatgccttctgaggaagggtatcaagactacgaacctgaagcctaagaaatatctttgctcccagtttcttgagatctgctgacagatgttccatcctgtacaagtgctcagttccaatgtgcccagtcatgacatttctcaaagtttttacagtgtatctcgaagtcttccatcagcagtgattgaagtatctgtacctgcccccactcagcatttcggtgcttccctttcactgaagtgaatacatggtagcagggtctttgtgtgctgtggattttgtggcttcaatctacgatgttaaaacaaattaaaaacacctaagtgactaccacttatttctaaatcctcactatttttttgttgctgttgttcagaagttgttagtgatttgctatcatatattataagatttttaggtgtcttttaatgatactgtctaagaataatgacgtattgtgaaatttgttaatatatataatacttaaaaatatgtgagcatgaaactatgcacctataaatactaaatatgaaattttaccattttgcgatgtgttttattcacttgtgtttgtatataaatggtgagaattaaaataaaacgttatctcattgcaaaaatattttatttttatcccatctcactttaataataaaaatcatgcttataagcaacatgaattaagaactgacacaaaggacaaaaatataaagttattaatagccatttgaagaaggaggaattttagaagaggtagagaaaatggaacattaaccctacactcggaattccctgaagcaacactgccagaagtgtgttttggtatgcactggttccttaagtggctgtgattaattattgaaagtggggtgttgaagaccccaactactattgtagagtggtctatttctcccttcaatcctgtcaatgtttgctttatgtattttggggaactgttgtttgatgtgtatgtgtttataattgttatacatttttaattgagccttttattaacatatattgttatttttgtctcgaaataattttttagttaaaatctattttgtctgatattggtgtgaatgctgtacctttctgacaataaataatattcgaccatgaataaaaaaaaaaaaaaagtgggttcccgggaactaagcagtgtagaagatgattttgactacaccctccttagagagccataagacacattagcacatattagcacattcaaggctctgagagaatgtggttaactttgtttaactcagcattcctcactttttttttttaatcatcagaaattctctctctctctctctttttctctcgctctctttttttttttttttttttttacaggaaatgcctttaaacatcgttggaactaccagagtcaccttaaaggagatcaattctctagactgataaaaatttcatggcctcctttaaatgttgccaaatatatgaattctaggatttttccttaggaaaggtttttctctttcagggaagatctattaactccccatgggtgctgaaaataaacttgatggtgaaaaactctgtataaattaatttaaaaattatttggtttctctttttaattattctggggcatagtcatttctaaaagtcactagtagaaagtataatttcaagacagaatattctagacatgctagcagtttatatgtattcatgagtaatgtgatatatattgggcgctggtgaggaaggaaggaggaatgagtgactataaggatggttaccatagaaacttccttttttacct

SEQ ID NO: 406826 - DNA, 1479 bp, Homo sapiens
agccgaggagaaggagaaggaggaggactaggaggaggaggacggcgacgaccagaaggggcccaagagagggggcgagcgaccgagcgccgcgacgcggaagtgaggtgcgtgcgggctgcagcgcagaccccggcccggcccctccgagagcgtcctgggcgctccctcacgccttgccttcaagccttctgcctttccaccctcgtgagcggagaactgggagtggccattcgacgacaggttagcgggtttgcctcccactcccccagcctcgcgtcgccggctcacagcggcctcctctggggacagtcccccccgggtgccgcctccgcccttcctgtgcgctccttttccttcttctttcctattaaatattatttgggaattgtttaaattttttttttaaaaaaagagagaggcggggaggagtcggagttgtggagaagcagagggactcagtgtggtgtaaaggaattcattagccatggatgtattcatgaaaggactttcaaaggccaaggagggagttgtggctgctgctgagaaaaccaaacagggtgtggcagaagcagcaggaaagacaaaagagggtgttctctatgtaggctccaaaaccaaggagggagtggtgcatggtgtggcaacagtggctgagaagaccaaagagcaagtgacaaatgttggaggagcagtggtgacgggtgtgacagcagtagcccagaagacagtggagggagcagggagcattgcagcagccactggctttgtcaaaaaggaccagttgggcaagaatgaagaaggagccccacaggaaggaattctggaagatatgcctgtggatcctgacaatgaggcttatgaaatgccttctgaggaagggtatcaagactacgaacctgaagcctaagaaatatctttgctcccagtttcttgagatctgctgacagatgttccatcctgtacaagtgctcagttccaatgtgcccagtcatgacatttctcaaagtttttacagtgtatctcgaagtcttccatcagcagtgattgaagtatctgtacctgcccccactcagcatttcggtgcttccctttcactgaagtgaatacatggtagcagggtctttgtgtgctgtggattttgtggcttcaatctacgatgttaaaacaaattaaaaacacctaagtgactaccacttatttctaaatcctcactatttttttgttgctgttgttcagaagttgttagtgatttgctatcatatattataagatttttaggtgtcttttaatgatactgtctaagaataatgacgtattgtgaaatttgttaatatatataatacttaaaaatatgtgagcatgaaactatgcacctataaatactaaatatgaaattttaccattttgcgatgtgttttattcacttgtgtttgtatataaatggtgagaattaaaataaaacgttatctcattgca

SEQ ID NO: 406827 - DNA, 1084 bp, Homo sapiens
agtgggaggagcttgcttctccattctggtgtgatccaggaacagctgtcttccagctctgaaagagtgtggtgtaaaggaattcattagccatggatgtattcatgaaaggactttcaaaggccaaggagggagttgtggctgctgctgagaaaaccaaacagggtgtggcagaagcagcaggaaagacaaaagagggtgttctctatgtaggctccaaaaccaaggagggagtggtgcatggtgtggcaacagtggctgagaagaccaaagagcaagtgacaaatgttggaggagcagtggtgacgggtgtgacagcagtagcccagaagacagtggagggagcagggagcattgcagcagccactggctttgtcaaaaaggaccagttgggcaagaatgaagaaggagccccacaggaaggaattctggaagatatgcctgtggatcctgacaatgaggcttatgaaatgccttctgaggaagggtatcaagactacgaacctgaagcctaagaaatatctttgctcccagtttcttgagatctgctgacagatgttccatcctgtacaagtgctcagttccaatgtgcccagtcatgacatttctcaaagtttttacagtgtatctcgaagtcttccatcagcagtgattgaagtatctgtacctgcccccactcagcatttcggtgcttccctttcactgaagtgaatacatggtagcagggtctttgtgtgctgtggattttgtggcttcaatctacgatgttaaaacaaattaaaaacacctaagtgactaccacttatttctaaatcctcactatttttttgttgctgttgttcagaagttgttagtgatttgctatcatatattataagatttttaggtgtcttttaatgatactgtctaagaataatgacgtattgtgaaatttgttaatatatataatacttaaaaatatgtgagcatgaaactatgcacctataaatactaaatatgaaattttaccattttgcgatgtgttttattcacttgtgtttgtatataaatggtgagaattaaaataaaacgttatctcattgca

SEQ ID NO: 406828 - DNA, 1096 bp, Homo sapiens
agggcgggggtggatgttggatggattagaaccatcacacttgggcccgctgtttgcctgaggttgaaccacaccccgatgtggtgtaaaggaattcattagccatggatgtattcatgaaaggactttcaaaggccaaggagggagttgtggctgctgctgagaaaaccaaacagggtgtggcagaagcagcaggaaagacaaaagagggtgttctctatgtaggctccaaaaccaaggagggagtggtgcatggtgtggcaacagtggctgagaagaccaaagagcaagtgacaaatgttggaggagcagtggtgacgggtgtgacagcagtagcccagaagacagtggagggagcagggagcattgcagcagccactggctttgtcaaaaaggaccagttgggcaagaatgaagaaggagccccacaggaaggaattctggaagatatgcctgtggatcctgacaatgaggcttatgaaatgccttctgaggaagggtatcaagactacgaacctgaagcctaagaaatatctttgctcccagtttcttgagatctgctgacagatgttccatcctgtacaagtgctcagttccaatgtgcccagtcatgacatttctcaaagtttttacagtgtatctcgaagtcttccatcagcagtgattgaagtatctgtacctgcccccactcagcatttcggtgcttccctttcactgaagtgaatacatggtagcagggtctttgtgtgctgtggattttgtggcttcaatctacgatgttaaaacaaattaaaaacacctaagtgactaccacttatttctaaatcctcactatttttttgttgctgttgttcagaagttgttagtgatttgctatcatatattataagatttttaggtgtcttttaatgatactgtctaagaataatgacgtattgtgaaatttgttaatatatataatacttaaaaatatgtgagcatgaaactatgcacctataaatactaaatatgaaattttaccattttgcgatgtgttttattcacttgtgtttgtatataaatggtgagaattaaaataaaacgttatctcattgca

SEQ ID NO: 406829 - DNA, 1303 bp, Homo sapiens
agccgaggagaaggagaaggaggaggactaggaggaggaggacggcgacgaccagaaggggcccaagagagggggcgagcgaccgagcgccgcgacgcggaagtgaggtgcgtgcgggctgcagcgcagaccccggcccggcccctccgagagcgtcctgggcgctccctcacgccttgccttcaagccttctgcctttccaccctcgtgagcggagaactgggagtggccattcgacgacagtgtggtgtaaaggaattcattagccatggatgtattcatgaaaggactttcaaaggccaaggagggagttgtggctgctgctgagaaaaccaaacagggtgtggcagaagcagcaggaaagacaaaagagggtgttctctatgtaggctccaaaaccaaggagggagtggtgcatggtgtggcaacagtggctgagaagaccaaagagcaagtgacaaatgttggaggagcagtggtgacgggtgtgacagcagtagcccagaagacagtggagggagcagggagcattgcagcagccactggctttgtcaaaaaggaccagttgggcaagaatgaagaaggagccccacaggaaggaattctggaagatatgcctgtggatcctgacaatgaggcttatgaaatgccttctgaggaagggtatcaagactacgaacctgaagcctaagaaatatctttgctcccagtttcttgagatctgctgacagatgttccatcctgtacaagtgctcagttccaatgtgcccagtcatgacatttctcaaagtttttacagtgtatctcgaagtcttccatcagcagtgattgaagtatctgtacctgcccccactcagcatttcggtgcttccctttcactgaagtgaatacatggtagcagggtctttgtgtgctgtggattttgtggcttcaatctacgatgttaaaacaaattaaaaacacctaagtgactaccacttatttctaaatcctcactatttttttgttgctgttgttcagggggtcaaaagtggtcagggattggcatcctttttttacgattgaaggcgtcttcaaggtactgcctagaatatgccgttgcgaacttgggcactttttaacttcaattgtgggctgagatttgcgcttaatagacaattaaaactgcccgttgcggggaaacccggggcgtaaaaagcgcagaaaagcgttcggagaattttttcccgctataaatactggtacaagaagagccaagattattcgagggaaaagaaagcctgacaacgtggggagtgaagca

SEQ ID NO: 406830 - DNA, 1008 bp, Homo sapiens
agccgaggagaaggagaaggaggaggactaggaggaggaggacggcgacgaccagaaggggcccaagagagggggcgagcgaccgagcgccgcgacgcggaagtgaggtgcgtgcgggctgcagcgcagaccccggcccggcccctccgagagcgtcctgggcgctccctcacgccttgccttcaagccttctgcctttccaccctcgtgagcggagaactgggagtggccattcgacgacagtgtggtgtaaaggaattcattagccatggatgtattcatgaaaggactttcaaaggccaaggagggagttgtggctgctgctgagaaaaccaaacagggtgtggcagaagcagcaggaaagacaaaagagggtgttctctatgtaggctccaaaaccaaggagggagtggtgcatggtgtggcaacagtggctgagaagaccaaagagcaagtgacaaatgttggaggagcagtggtgacgggtgtgacagcagtagcccagaagacagtggagggagcagggagcattgcagcagccactggctttgtcaaaaaggaccagttgggcaagaatgaagaaggagccccacaggaaggaattctggaagatatgcctgtggatcctgacaatgaggcttatgaaatgccttctgaggaagggtatcaagactacgaacctgaagcctaagaaatatctttgctcccagtttcttgagatctgctgacagatgttccatcctgtacaagtgctcagttccaatgtgcccagtcatgacatttctcaaagtttttacagtgtatctcgaagtcttccatcagcagtgattgaagtatctgtacctgcccccactcagcatttcggtgcttccctttcactgaagtgaatacatggtagcagggtctttgtgtgctgtggattttgtggcttcaatctacgatgttatactcaggtgatacactaatgatcaatcgttttgtgtttctctgttttgtgtgtgtgtgtaa

SEQ ID NO: 406831 - DNA, 1437 bp, Homo sapiens
agccgaggagaaggagaaggaggaggactaggaggaggaggacggcgacgaccagaaggggcccaagagagggggcgagcgaccgagcgccgcgacgcggaagtgaggtgcgtgcgggctgcagcgcagaccccggcccggcccctccgagagcgtcctgggcgctccctcacgccttgccttcaagccttctgcctttccaccctcgtgagcggagaactgggagtggccattcgacgacaggttagcgggtttgcctcccactcccccagcctcgcgtcgccggctcacagcggcctcctctggggacagtcccccccgggtgccgcctccgcccttcctgtgcgctccttttccttcttctttcctattaaatattatttgggaattgtttaaattttttttttaaaaaaagagagaggcggggaggagtcggagttgtggagaagcagagggactcagtgtggtgtaaaggaattcattagccatggatgtattcatgaaaggactttcaaaggccaaggagggagttgtggctgctgctgagaaaaccaaacagggtgtggcagaagcagcaggaaagacaaaagagggtgttctctatgtagtggctgagaagaccaaagagcaagtgacaaatgttggaggagcagtggtgacgggtgtgacagcagtagcccagaagacagtggagggagcagggagcattgcagcagccactggctttgtcaaaaaggaccagttgggcaagaatgaagaaggagccccacaggaaggaattctggaagatatgcctgtggatcctgacaatgaggcttatgaaatgccttctgaggaagggtatcaagactacgaacctgaagcctaagaaatatctttgctcccagtttcttgagatctgctgacagatgttccatcctgtacaagtgctcagttccaatgtgcccagtcatgacatttctcaaagtttttacagtgtatctcgaagtcttccatcagcagtgattgaagtatctgtacctgcccccactcagcatttcggtgcttccctttcactgaagtgaatacatggtagcagggtctttgtgtgctgtggattttgtggcttcaatctacgatgttaaaacaaattaaaaacacctaagtgactaccacttatttctaaatcctcactatttttttgttgctgttgttcagaagttgttagtgatttgctatcatatattataagatttttaggtgtcttttaatgatactgtctaagaataatgacgtattgtgaaatttgttaatatatataatacttaaaaatatgtgagcatgaaactatgcacctataaatactaaatatgaaattttaccattttgcgatgtgttttattcacttgtgtttgtatataaatggtgagaattaaaataaaacgttatctcattgca

SEQ ID NO: 406832 - DNA, 1799 bp, Homo sapiens
cgcggccgcgcgaccggctgcgagagacgacagaggggaactgaagcctaagaaatatctttgctcccagtttcttgagatctgctgacagatgttccatcctgtacaagtgctcagttccaatgtgcccagtcatgacatttctcaaagtttttacagtgtatctcgaagtcttccatcagcagtgattgaagtatctgtacctgcccccactcagcatttcggtgcttccctttcactgaagtgaatacatggtagcagggtctttgtgtgctgtggattttgtggcttcaatctacgatgttaaaacaaattaaaaacacctaagtgactaccacttatttctaaatcctcactatttttttgttgctgttgttcagaagttgttagtgatttgctatcatatattataagatttttaggtgtcttttaatgatactgtctaagaataatgacgtattgtgaaatttgttaatatatataatacttaaaaatatgtgagcatgaaactatgcacctataaatactaaatatgaaattttaccattttgcgatgtgttttattcacttgtgtttgtatataaatggtgagaattaaaataaaacgttatctcattgcaaaaatattttatttttatcccatctcactttaataataaaaatcatgcttataagcaacatgaattaagaactgacacaaaggacaaaaatataaagttattaatagccatttgaagaaggaggaattttagaagaggtagagaaaatggaacattaaccctacactcggaattccctgaagcaacactgccagaagtgtgttttggtatgcactggttccttaagtggctgtgattaattattgaaagtggggtgttgaagaccccaactactattgtagagtggtctatttctcccttcaatcctgtcaatgtttgctttatgtattttggggaactgttgtttgatgtgtatgtgtttataattgttatacatttttaattgagccttttattaacatatattgttatttttgtctcgaaataattttttagttaaaatctattttgtctgatattggtgtgaatgctgtacctttctgacaataaataatattcgaccatgaataaaaaaaaaaaaaaagtgggttcccgggaactaagcagtgtagaagatgattttgactacaccctccttagagagccataagacacattagcacatattagcacattcaaggctctgagagaatgtggttaactttgtttaactcagcattcctcactttttttttttaatcatcagaaattctctctctctctctctttttctctcgctctctttttttttttttttttttttacaggaaatgcctttaaacatcgttggaactaccagagtcaccttaaaggagatcaattctctagactgataaaaatttcatggcctcctttaaatgttgccaaatatatgaattctaggatttttccttaggaaaggtttttctctttcagggaagatctattaactccccatgggtgctgaaaataaacttgatggtgaaaaactctgtataaattaatttaaaaattatttggtttctctttttaattattctggggcatagtcatttctaaaagtcactagtagaaagtataatttcaagacagaatattctagacatgctagcagtttatatgtattcatgagtaatgtgatatatattgggcgctggtgaggaaggaaggaggaatgagtgactataaggatggttaccatagaaacttccttttttacct

SEQ ID NO: 406833 - DNA, 1268 bp, Homo sapiens
agccgaggagaaggagaaggaggaggactaggaggaggaggacggcgacgaccagaaggggcccaagagagggggcgagcgaccgagcgccgcgacgcggaagtgaggtgcgtgcgggctgcagcgcagaccccggcccggcccctccgagagcgtcctgggcgctccctcacgccttgccttcaagccttctgcctttccaccctcgtgagcggagaactgggagtggccattcgacgacaggttagcgggtttgcctcccactcccccagcctcgcgtcgccggctcacagcggcctcctctggggacagtcccccccgggtgccgcctccgcccttcctgtgcgctccttttccttcttctttcctattaaatattatttgggaattgtttaaattttttttttaaaaaaagagagaggcggggaggagtcggagttgtggagaagcagagggactcagtgtggtgtaaaggaattcattagccatggatgtattcatgaaaggactttcaaaggccaaggagggagttgtggctgctgctgagaaaaccaaacagggtgtggcagaagcagcaggaaagacaaaagagggtgttctctatgtaggctccaaaaccaaggagggagtggtgcatggtgtggcaacagtggctgagaagaccaaagagcaagtgacaaatgttggaggagcagtggtgacgggtgtgacagcagtagcccagaagacagtggagggagcagggagcattgcagcagccactggctttgtcaaaaaggaccagttgggcaaggtatggctgtgtacgttttgtgttacatttataagctggtgagattacggttcattttcatgtgaggcctggaggcaggagcaagatacttactgtggggaacggctacctgaccctccccttgtgaaaaagtgctacctttatattggtcttgcttgtttcaggcattaacccagataaatgccatgcaaattttataattattatgattgtttcaatttctggaagaaagttaatgaaacaaaaaatgtagtaaaatgccaaaggaacagtgacatttcagaaagaatgagggctttcatgttaattggtaagtcttggaatttctcttccttggagtaacaaatccctttgtgcctaatttcctaatttccaaaataaagttcttttacttataaaaacaccgaaccaaacaaaaccatatatggtttaacaaattacccatccccaaacacaaataggggaatattgcttg

SEQ ID NO: 406834 - DNA, 1260 bp, Homo sapiens
agccgaggagaaggagaaggaggaggactaggaggaggaggacggcgacgaccagaaggggcccaagagagggggcgagcgaccgagcgccgcgacgcggaagtgaggtgcgtgcgggctgcagcgcagaccccggcccggcccctccgagagcgtcctgggcgctccctcacgccttgccttcaagccttctgcctttccaccctcgtgagcggagaactgggagtggccattcgacgacagtgtggtgtaaaggaattcattagccatggatgtattcatgaaaggactttcaaaggccaaggagggagttgtggctgctgctgagaaaaccaaacagggtgtggcagaagcagcaggaaagacaaaagagggtgttctctatgtaggctccaaaaccaaggagggagtggtgcatggtgtggcaacagtggctgagaagaccaaagagcaagtgacaaatgttggaggagcagtggtgacgggtgtgacagcagtagcccagaagacagtggagggagcagggagcattgcagcagccactggctttgtcaaaaaggaccagttgggcaagaatgaagaaggagccccacaggaaggaattctggaagatatgcctgtggatcctgacaatgaggcttatgaaatgccttctgaggaagggtatcaagactacgaacctgaagcctaagaaatatctttgctcccagtttcttgagatctgctgacagatgttccatcctgtacaagtgctcagttccaatgtgcccagtcatgacatttctcaaagtttttacagtgtatctcgaagtcttccatcagcagtgattgaagtatctgtacctgcccccactcagcatttcggtgcttccctttcactgaagtgaatacatggtagcagggtctttgtgtgctgtggattttgtggcttcaatctacgatgttaaaacaaattaaaaacacctaagtgactaccacttatttctaaatcctcactatttttttgttgctgttgttcagaagttgttagtgatttgctatcatatattataagatttttaggtgtcttttaatgatactgtctaagaataatgacgtattgtgaaatttgttaatatatataatacttaaaaatatgtgagcatgaaactatgcacctataaatactaaatatgaaattttaccattttgcgatgtgttttattcacttgtgtttgtatataaatggtgagaattaaaataaaacgttatctcattgca

SEQ ID NO: 406835 - DNA, 1077 bp, Homo sapiens
atctccctgtcactgatagaataatcagtgatcgctcacccccatacctttatcggggactgtggtgtaaaggaattcattagccatggatgtattcatgaaaggactttcaaaggccaaggagggagttgtggctgctgctgagaaaaccaaacagggtgtggcagaagcagcaggaaagacaaaagagggtgttctctatgtaggctccaaaaccaaggagggagtggtgcatggtgtggcaacagtggctgagaagaccaaagagcaagtgacaaatgttggaggagcagtggtgacgggtgtgacagcagtagcccagaagacagtggagggagcagggagcattgcagcagccactggctttgtcaaaaaggaccagttgggcaagaatgaagaaggagccccacaggaaggaattctggaagatatgcctgtggatcctgacaatgaggcttatgaaatgccttctgaggaagggtatcaagactacgaacctgaagcctaagaaatatctttgctcccagtttcttgagatctgctgacagatgttccatcctgtacaagtgctcagttccaatgtgcccagtcatgacatttctcaaagtttttacagtgtatctcgaagtcttccatcagcagtgattgaagtatctgtacctgcccccactcagcatttcggtgcttccctttcactgaagtgaatacatggtagcagggtctttgtgtgctgtggattttgtggcttcaatctacgatgttaaaacaaattaaaaacacctaagtgactaccacttatttctaaatcctcactatttttttgttgctgttgttcagaagttgttagtgatttgctatcatatattataagatttttaggtgtcttttaatgatactgtctaagaataatgacgtattgtgaaatttgttaatatatataatacttaaaaatatgtgagcatgaaactatgcacctataaatactaaatatgaaattttaccattttgcgatgtgttttattcacttgtgtttgtatataaatggtgagaattaaaataaaacgttatctcattgca

SEQ ID NO: 406836 - DNA, 1071 bp, Homo sapiens
  misc_feature (36)..(36): n is a, c, g, or t
  misc_feature (51)..(51): n is a, c, g, or t
gaaggcatgtaccaattttataacacagagagacanaccccctccatggtnaactgtggtgtaaaggaattcattagccatggatgtattcatgaaaggactttcaaaggccaaggagggagttgtggctgctgctgagaaaaccaaacagggtgtggcagaagcagcaggaaagacaaaagagggtgttctctatgtaggctccaaaaccaaggagggagtggtgcatggtgtggcaacagtggctgagaagaccaaagagcaagtgacaaatgttggaggagcagtggtgacgggtgtgacagcagtagcccagaagacagtggagggagcagggagcattgcagcagccactggctttgtcaaaaaggaccagttgggcaagaatgaagaaggagccccacaggaaggaattctggaagatatgcctgtggatcctgacaatgaggcttatgaaatgccttctgaggaagggtatcaagactacgaacctgaagcctaagaaatatctttgctcccagtttcttgagatctgctgacagatgttccatcctgtacaagtgctcagttccaatgtgcccagtcatgacatttctcaaagtttttacagtgtatctcgaagtcttccatcagcagtgattgaagtatctgtacctgcccccactcagcatttcggtgcttccctttcactgaagtgaatacatggtagcagggtctttgtgtgctgtggattttgtggcttcaatctacgatgttaaaacaaattaaaaacacctaagtgactaccacttatttctaaatcctcactatttttttgttgctgttgttcagaagttgttagtgatttgctatcatatattataagatttttaggtgtcttttaatgatactgtctaagaataatgacgtattgtgaaatttgttaatatatataatacttaaaaatatgtgagcatgaaactatgcacctataaatactaaatatgaaattttaccattttgcgatgtgttttattcacttgtgtttgtatataaatggtgagaattaaaataaaacgttatctcattgca

SEQ ID NO: 406837 - DNA, 2574 bp, Homo sapiens
agccgaggagaaggagaaggaggaggactaggaggaggaggacggcgacgaccagaaggggcccaagagagggggcgagcgaccgagcgccgcgacgcggaagtgaggtgcgtgcgggctgcagcgcagaccccggcccggcccctccgagagcgtcctgggcgctccctcacgccttgccttcaagccttctgcctttccaccctcgtgagcggagaactgggagtggccattcgacgacaggttagcgggtttgcctcccactcccccagcctcgcgtcgccggctcacagcggcctcctctggggacagtcccccccgggtgccgcctccgcccttcctgtgcgctccttttccttcttctttcctattaaatattatttgggaattgtttaaattttttttttaaaaaaagagagaggcggggaggagtcggagttgtggagaagcagagggactcagtgtggtgtaaaggaattcattagccatggatgtattcatgaaaggactttcaaaggccaaggagggagttgtggctgctgctgagaaaaccaaacagggtgtggcagaagcagcaggaaagacaaaagagggtgttctctatgtaggctccaaaaccaaggagggagtggtgcatggtgtggcaacagtggctgagaagaccaaagagcaagtgacaaatgttggaggagcagtggtgacgggtgtgacagcagtagcccagaagacagtggagggagcagggagcattgcagcagccactggctttgtcaaaaaggaccagttgggcaaggaagggtatcaagactacgaacctgaagcctaagaaatatctttgctcccagtttcttgagatctgctgacagatgttccatcctgtacaagtgctcagttccaatgtgcccagtcatgacatttctcaaagtttttacagtgtatctcgaagtcttccatcagcagtgattgaagtatctgtacctgcccccactcagcatttcggtgcttccctttcactgaagtgaatacatggtagcagggtctttgtgtgctgtggattttgtggcttcaatctacgatgttaaaacaaattaaaaacacctaagtgactaccacttatttctaaatcctcactatttttttgttgctgttgttcagaagttgttagtgatttgctatcatatattataagatttttaggtgtcttttaatgatactgtctaagaataatgacgtattgtgaaatttgttaatatatataatacttaaaaatatgtgagcatgaaactatgcacctataaatactaaatatgaaattttaccattttgcgatgtgttttattcacttgtgtttgtatataaatggtgagaattaaaataaaacgttatctcattgcaaaaatattttatttttatcccatctcactttaataataaaaatcatgcttataagcaacatgaattaagaactgacacaaaggacaaaaatataaagttattaatagccatttgaagaaggaggaattttagaagaggtagagaaaatggaacattaaccctacactcggaattccctgaagcaacactgccagaagtgtgttttggtatgcactggttccttaagtggctgtgattaattattgaaagtggggtgttgaagaccccaactactattgtagagtggtctatttctcccttcaatcctgtcaatgtttgctttatgtattttggggaactgttgtttgatgtgtatgtgtttataattgttatacatttttaattgagccttttattaacatatattgttatttttgtctcgaaataattttttagttaaaatctattttgtctgatattggtgtgaatgctgtacctttctgacaataaataatattcgaccatgaataaaaaaaaaaaaaaagtgggttcccgggaactaagcagtgtagaagatgattttgactacaccctccttagagagccataagacacattagcacatattagcacattcaaggctctgagagaatgtggttaactttgtttaactcagcattcctcactttttttttttaatcatcagaaattctctctctctctctctttttctctcgctctctttttttttttttttttttttacaggaaatgcctttaaacatcgttggaactaccagagtcaccttaaaggagatcaattctctagactgataaaaatttcatggcctcctttaaatgttgccaaatatatgaattctaggatttttccttaggaaaggtttttctctttcagggaagatctattaactccccatgggtgctgaaaataaacttgatggtgaaaaactctgtataaattaatttaaaaattatttggtttctctttttaattattctggggcatagtcatttctaaaagtcactagtagaaagtataatttcaagacagaatattctagacatgctagcagtttatatgtattcatgagtaatgtgatatatattgggcgctggtgaggaaggaaggaggaatgagtgactataaggatggttaccatagaaacttccttttttacct

SEQ ID NO: 406838 - DNA, 1522 bp, Homo sapiens
agccgaggagaaggagaaggaggaggactaggaggaggaggacggcgacgaccagaaggggcccaagagagggggcgagcgaccgagcgccgcgacgcggaagtgaggtgcgtgcgggctgcagcgcagaccccggcccggcccctccgagagcgtcctgggcgctccctcacgccttgccttcaagccttctgcctttccaccctcgtgagcggagaactgggagtggccattcgacgacaggttagcgggtttgcctcccactcccccagcctcgcgtcgccggctcacagcggcctcctctggggacagtcccccccgggtgccgcctccgcccttcctgtgcgctccttttccttcttctttcctattaaatattatttgggaattgtttaaattttttttttaaaaaaagagagaggcggggaggagtcggagttgtggagaagcagagggactcagtgtggtgtaaaggaattcattagccatggatgtattcatgaaaggactttcaaaggccaaggagggagttgtggctgctgctgagaaaaccaaacagggtgtggcagaagcagcaggaaagacaaaagagggtgttctctatgtaggctccaaaaccaaggagggagtggtgcatggtgtggcaacagtggctgagaagaccaaagagcaagtgacaaatgttggaggagcagtggtgacgggtgtgacagcagtagcccagaagacagtggagggagcagggagcattgcagcagccactggctttgtcaaaaaggaccagttgggcaagaatgaagaaggagccccacaggaaggaattctggaagatatgcctgtggatcctgacaatgaggcttatgaaatgccttctgaggaagggtatcaagactacgaacctgaagcctaagaaatatctttgctcccagtttcttgagatctgctgacagatgttccatcctgtacaagtgctcagttccaatgtgcccagtcatgacatttctcaaagtttttacagtgtatctcgaagtcttccatcagcagtgattgaagtatctgtacctgcccccactcagcatttcggtgcttccctttcactgaagtgaatacatggtagcagggtctttgtgtgctgtggattttgtggcttcaatctacgatgttaaaacaaattaaaaacacctaagtgactaccacttatttctaaatcctcactatttttttgttgctgttgttcagggggtcaaaagtggtcagggattggcatcctttttttacgattgaaggcgtcttcaaggtactgcctagaatatgccgttgcgaacttgggcactttttaacttcaattgtgggctgagatttgcgcttaatagacaattaaaactgcccgttgcggggaaacccggggcgtaaaaagcgcagaaaagcgttcggagaattttttcccgctataaatactggtacaagaagagccaagattattcgagggaaaagaaagcctgacaacgtggggagtgaagca

SEQ ID NO: 406839 - DNA, 214 bp, Homo sapiens
cctaagcgctaaaggagctgtgctccagacctgttcctggaggaggccacaccggtctgtgtcctgggtctcagtgcagaccactcctagatgacctggaagttggatgttgattgtatctgacttaaggtggacccttcacttctctccctatttcagaagcacagggcaggcagttgcatgcatacatatccacggagcacctactgtgtat

SEQ ID NO: 406840 - DNA, 356 bp, Homo sapiens
tttgttgtgccatttaagggagggagtgatgacttgggatggaggggtggggggacccgggtcagacttgcagcttggctatgaggatggagatcagggagcccactgtgacaacaccttcaggactcaacgtgggcctgcaagccttgctgttttctcctcggccccttctccattcctatccacatccactacgctggcaaatccatcttttgagagggcaaatctgcttaaaaattgatgtaggaacagtttccaaaacttgtcattcagataccacctgcatgtggatttttttttttttagacaggatctcactcttgtcacccaggctggagtacagtggtacagtcatg

SEQ ID NO: 406841 - DNA, 1293 bp, Homo sapiens
gagatttaccggcggcatcttcttgggggtgctgggagccgggaagaccccctgaatcgttcccattgagctgcccttcgccttcgctttctttacttttgccttttcgacgtagccaacaagcacctggtcccgaggctgagagaaggctcgggtctaagcgcgtgtcgcgcttccggtctgggtagatttgctggggaagagggaagggggagggcccgggcaaaccgttgctgtttcagcccgggctgggggccggggacggggagctcctggcaccccgtgcacttgtggcctgcggcggtccttgcagagctgttcgccgaccggggcccgcgggaacctgccaccggcgcctcccaccgcggcccacgcgggcggcgcgcggaggagggggcgggggcagcggcggctgtagcggccgcgacctgggcgggcggaggagtgtgacgggccttagggccgctgtggatggtttctaaaatgatcattgaaaacttcgaggcactcaagtcctggctcagcaagactctcgagcccatgtgagtatccgggggatatctctttgcagggatggcagtgggagataggcggacccagagatctgtgcagtttccccaagtgcctgcggtggaggccgaagcggtgaacggaggtcccagggttctgtggcttctcctcctcgtccacctcgcttccagattcaggatacccccgagagcctgagtcgagctttattttattgctgagctgctctcgttttcccgttatatatagaccgtctccaacccccacccgcaatattttccgggggcctcaaaatcggtttattttagtgaaaccgactgtattttacttcctacagattattttaccttgtttttctaaatgaagtagacggcctttattggggattcgggcagttctagcttaaatcactcacgtttcacctaaatataattcctgaaagcaaggccacgtctcccatgtgctgtctggctcatctgcacctctcttcactgattgaagatgtaacaggtgctgaggtggccagtaaaattcccctttcccgcctacgcgttcgttagcttggagaggaggaagaaaattgaatcttcatccatatggaatatttagcagttttaagtgggatgctatagatagattttgtgttgggggctgcggttagagtgctgaaatagtcttagattggaaaatttaaggagtgttttgacgacttgttaatacaaaatatgacatggaccaaagtgctaatcagattggttgatttac

SEQ ID NO: 406842 - DNA, 783 bp, Homo sapiens
gagatttaccggcggcatcttcttgggggtgctgggagccgggaagaccccctgaatcgttcccattgagctgcccttcgccttcgctttctttacttttgccttttcgacgtagccaacaagcacctggtcccgaggctgagagaaggctcgggtctaagcgcgtgtcgcgcttccggtctgggtagatttgctggggaagagggaagggggagggcccgggcaaaccgttgctgtttcagcccgggctgggggccggggacggggagctcctggcaccccgtgcacttgtggcctgcggcggtccttgcagagctgttcgccgaccggggcccgcgggaacctgccaccggcgcctcccaccgcggcccacgcgggcggcgcgcggaggagggggcgggggcagcggcggctgtagcggccgcaatgcttttttttttttttttttctcttgaaatctattttatctgatagaaatatagcaactcctactcttttttggttttcatttgtgtggaatatctttttccatccctttattttaggcctatgtgtgtatttataggtgaagagtgtttcttgtaggcaacagattgttgggtcttgttttctttttttttttttttttttttaagttttttttctttatagagagagagtcttactgtgttgcccaggctggtctcaaattcctgggctcaagtgatcctccttgacaacccattatttaaaactgatggcaacttaacactaattgcaaaaaacaaaggagagaaaattaat

SEQ ID NO: 406843 - DNA, 1960 bp, Homo sapiens
gagatttaccggcggcatcttcttgggggtgctgggagccgggaagaccccctgaatcgttcccattgagctgcccttcgccttcgctttctttacttttgccttttcgacgtagccaacaagcacctggtcccgaggctgagagaaggctcgggtctaagcgcgtgtcgcgcttccggtctgggtagatttgctggggaagagggaagggggagggcccgggcaaaccgttgctgtttcagcccgggctgggggccggggacggggagctcctggcaccccgtgcacttgtggcctgcggcggtccttgcagagctgttcgccgaccggggcccgcgggaacctgccaccggcgcctcccaccgcggcccacgcgggcggcgcgcggaggagggggcgggggcagcggcggctgtagcggccgcgacctgggcgggcggaggagtgtgacgggccttagggccgctgtggatggtttctaaaatgatcattgaaaacttcgaggcactcaagtcctggctcagcaagactctcgagcccatctgtgatgcagatccatccgccctagcaaaatatgttctggctttggtaaagaaagacaaaagtgaaaaagagttaaaggcattatgtattgatcagctggatgtatttcttcagaaagagacacagatatttgtggaaaaactttttgatgctgtgaatacaaagagttacctacctcctccagagcagccatcatcaggaagcctgaaggtagaattttttccacaccaagaaaaagatataaagaaggaagaggtaacgatttgtgttaataccttacaggttatttaaacacataagaggaataaccaaactgagtttttatcttctatatctttgtgttggagtcctcaggaccactcccagtttaaatgatttttctaggaggactcataggactctgcatataattatgcttatggccctggcttatttcagcaaaaggatataaagcaaagtcagcaaatggaaaaggtgtatgaggccaagtccagtggaaaacaagcacaagcttacaaagtcctcagagttgcacaggatgtgcttaattcccctagcagtgaactgtaacaacacatgggaattaggcaagctccttagaaactctgccctgcgttcttatttggaactggtcacataggcaccgcctacctagtatgtaccaaaattccagactcctgggaggaaggcagatgttcagtgtagaccatattgtttcataactaattcaggcatagtgaaccattccttatcagggggtaatgggaaccctcgagaaatcaaagtgcccaggagccagccttacaagcatgctggctttctaaggttagtattgtcaggcctgcttttactctgcacaatatcttacagatatagagtcttaatatctgttctatgaaaataattaggttgacaattggtctgtttgcttttgtcatacatgtatttagtaggggactgtttttaaggtagtaaaacacaaggaccttcacaagacagtggatatgacttcatacttcaagaggtcccaaaatttttgtgtgtattttacaaccttctctcttcacccttagttactagtcatataataatttatatcttttcaatttgatgttaaaagattataatttggccagggtgagcgtggtggctcatgcctgtaatcccagcactctgggaggctgaggcaggaggctcacttgagcccaggagtttgagaccagtctgggttatatagtgagacctcatctcttatgaaaaaaattttaaaattagccaggtgtgatggggtggtgcatgcttgtagtcccaactacttgaggggctgaggtgggagaactgcttgagccccagagcctgagggtgcagatcaaagcattacactgcagcctaggcaactgagcaagaccctgtctgg

SEQ ID NO: 406844 - DNA, 1883 bp, Homo sapiens
tggtagagactgggtttcgccattttgcccagactggtcttgaactcctgggctcaagcgatctgcccgcctaggtctcccaaggtgctgtcattacaggactgattcactgtgcctggcctcaatactgtttattgcataatttatctcttcttagttggtttggatgccacttttataaaatctgaattcctagtacatttggatccatttctagactttctttttttgctgtttaaactaatatactgatgggtatgtttttaagaaataaaatggctacacatagcattaaggagtgttagtataaagagaacttaaatttcttcaaggtcctctgtgacccgggtgctttttacatgtattaactcacttaactattattctcactaattcagtttgtaactggaatttgtagaatgtgcagttggctaaattttcttcaacattggtttttttctttagctgtgatgcagatccatccgccctagcaaaatatgttctggctttggtaaagaaagacaaaagtgaaaaagagttaaaggcattatgtattgatcagctggatgtatttcttcagaaagagacacagatatttgtggaaaaactttttgatgctgtgaatacaaagagttacctacctcctccagagcagccatcatcaggaagcctgaaggtagaattttttccacaccaagaaaaagatataaagaaggaagaggtaacgatttgtgttaataccttacaggttatttaaacacataagaggaataaccaaactgagtttttatcttctatatctttgtgttggagtcctcaggaccactcccagtttaaatgatttttctaggaggactcataggactctgcatataattatgcttatggccctggcttatttcagcaaaaggatataaagcaaagtcagcaaatggaaaaggtgtatgaggccaagtccagtggaaaacaagcacaagcttacaaagtcctcagagttgcacaggatgtgcttaattcccctagcagtgaactgtaacaacacatgggaattaggcaagctccttagaaactctgccctgcgttcttatttggaactggtcacataggcaccgcctacctagtatgtaccaaaattccagactcctgggaggaaggcagatgttcagtgtagaccatattgtttcataactaattcaggcatagtgaaccattccttatcagggggtaatgggaaccctcgagaaatcaaagtgcccaggagccagccttacaagcatgctggctttctaaggttagtattgtcaggcctgcttttactctgcacaatatcttacagatatagagtcttaatatctgttctatgaaaataattaggttgacaattggtctgtttgcttttgtcatacatgtatttagtaggggactgtttttaaggtagtaaaacacaaggaccttcacaagacagtggatatgacttcatacttcaagaggtcccaaaatttttgtgtgtattttacaaccttctctcttcacccttagttactagtcatataataatttatatcttttcaatttgatgttaaaagattataatttggccagggtgagcgtggtggctcatgcctgtaatcccagcactctgggaggctgaggcaggaggctcacttgagcccaggagtttgagaccagtctgggttatatagtgagacctcatctcttatgaaaaaaattttaaaattagccaggtgtgatggggtggtgcatgcttgtagtcccaactacttgaggggctgaggtgggagaactgcttgagccccagagcctgagggtgcagatcaaagcattacactgcagcctaggcaactgagcaagaccctgtctgg

SEQ ID NO: 406845 - DNA, 1110 bp, Homo sapiens
gagatttaccggcggcatcttcttgggggtgctgggagccgggaagaccccctgaatcgttcccattgagctgcccttcgccttcgctttctttacttttgccttttcgacgtagccaacaagcacctggtcccgaggctgagagaaggctcgggtctaagcgcgtgtcgcgcttccggtctgggtagatttgctggggaagagggaagggggagggcccgggcaaaccgttgctgtttcagcccgggctgggggccggggacggggagctcctggcaccccgtgcacttgtggcctgcggcggtccttgcagagctgttcgccgaccggggcccgcgggaacctgccaccggcgcctcccaccgcggcccacgcgggcggcgcgcggaggagggggcgggggcagcggcggctgtagcggccgcgacctgggcgggcggaggagtgtgacgggccttagggccgctgtggatggtttctaaaatgatcattgaaaacttcgaggcactcaagtcctggctcagcaagactctcgagcccatctgtgatgcagatccatccgccctagcaaaatatgttctggctttggtaaagaaagacaaaagtgaaaaagagttaaaggcattatgtattgatcagctggatgtatttcttcagaaagagacacagatatttgtggaaaaactttttgatgctgtgaatacaaagagttacctacctcctccagagcagccatcatcaggaagcctgaaggtagaattttttccacaccaagaaaaagatataaagaaggaagagatcactaaggaggaagagcgagagaagaagttttctagaaggctaaatcacagtcctccccagtcaagctcccgatacagggaaaatagaagccgtgatgagaggaaaaaagatgatcgttctcgcaaaagagattatgatcgaaaccctcctcgaagagattcatacagagaccggtacaatagaagacgagggcggagtcgcagttatagcaggagtcgaagtcgaagttggagtaaagagaggcttcgtgagagggacagagatagaagcaggactagaagcagaagcagaacacgaagcaggggtaaa

SEQ ID NO: 406846 - DNA, 1373 bp, Homo sapiens
gtggataggtcttggctcccagtttccttctgggcagacattgcccctctgccctgaggacctgcttgtttgggggaagaggcctttagaggcaccaggtcatgccaggtgttggacatggtgaactgggaagtgctcccatctggccacagcgcagaagtatcaccgtgctgggggatggggaacagggctgtgaatgggcctatttgcataagcagcatgtgtctggagagaaagacatcacagagcagaagagtgcgggtgcccaggagtgcacttgccacccctacttcatccctgaaagagtaaatggcctggaaggtgtctctgagaggtaatgccgcacaccaccctccctgggggcagggtcaggctacacctgccttaggtcgggggctgcagcagcctgagagctctcagtagggcctcagtagcctgggagggagcaggggcagggggcagggaaagaggcgtaatggggctgtccagaggggcctgggaaacctggtccctgaggcctgggcacagctacaatcacttcaaattggctgtggggccagtggactgggaaggaaaaaagcaataagagtgaccaagtgcagaaggctgtcaggtcccaggtcacatgccttagtgcagtgactcctcatcattttatggggtgtgggtgtcgttggtacacccattttacagatgaggacaccgaggcccagaaaagttaagttacatgtcctaagtcacacagcttgtaagtgccagaactgagatcaaaaccaagtctctttgactttaaagtctgtactctgaccccaaagagatcctgtttggccacttataggaggtccctaaagctgcagactccccttgccggcacccacatatagagacattaacccttcccctgcagggtcacctcaaatagtcttttagctgggcttctcctgcaattccacctaatgccatcccctgggttttgcccaaacctgaactgggcagtggggtgagaggaggggtttacagggttacagagcctcatacagataggagcccatggctgctggtcatctgcattcctgcaggattggctgttccttggggtccttggcaggaaaatgaggattgctccgaggcctgctccagtacttcccagaggctggcctggtgtggggctctgggaaggctgaggctggagaagcgtaagtaggagggcagagatggcactcaggtagcttgaatcaccaggacccttccaagccccacaggttctgagggagtactagggccagctctgggagaggtctcttcctatgctgtgaaccccctgcctttcttgcagcctacaacgaataaattttctttgcaaaggattccgt

SEQ ID NO: 406847 - DNA, 2057 bp, Homo sapiens
tgtagaaaacatattcattgaaaagtgagtgtccattgcacatgactgtgcatatcaacaacatataatctggccacacccacccctctttagccatgccaagggtgagctgcagagttacaacagctgttttggattcttgtaagtgttcatgtcatcatcagtacgaggtccacttctcttcacttctgcttcttcacagttaacaaaccagggaagtgtgccttgtctttctccagataggttaaaaaggccgcaggaattcagagagtaaccaacttgtcactaatacagcctttttgccaggccaccagagcatttgaaaagatagttactactgctaagagtcatatcattgagcagaaccttgtacagtgaaacatttttatgtgtgtctttgaattctttaagcaaaggcagagcagtttggtactggaaatcacaacaaagaaaagcacattgcacattccctaactgccattattaaaataattacttcatttattggagtgtttcacattgccgggcactatcatgggtgctttacactcattgtcttattcagtcctcacattgctcctacaaagactataattttattatttcccttttgcagaagaaaacaaaaacaaactaagagtcagattaagtaagcacatagcacacgacagcagaaggtgagcccaggtttgtttgaatgcctctaaagcccatgctttttcctttgtacctccccacatgctccatctactttggttaggtagctccagcctctgccctgtgccaaggggctgaaagtctctgaagacctgatgacccagcttccagtcagatccttaccctgtctacttccagtccccccatgtggctgtgctggaagctctcggatatgccttgtcccagcttctacaggctgaggaagctccagagaagatcattccccctgcttctgccagcagctccatcttggcctccactctccctcagcacatgctacaaatgttgcaacctggcccaaagctcaaccctggggtcgctgtggagtttgcctggtgccttcattacatcatctgcagccaggtcagcaatcctctgctcattggccatggggctctgtctactctggggttgctgctgttggacttggctggggctgtccagaaaaccgaggatgcaggactggagctgctggcatgccccgtgcttcgatgtctaagcaacctgctaactgaggcagcagtggagactgtgggagggcaaatgcagctcagagatgagcgtgttgtggcagccttatttatccttctgcagttctttttccagaaacagcccagtctgctccctgagggcctttggctcctcaacaacctcactgcaaacagtcctagtttctgtacctccttgctctccctggatctgattgagcctctcttacagctgttgccagtatctaacgtggtgagcgtaatggtgctcacagttctgtgcaatgttgcagaaaagggtcctgcttactgccagcggctgtggccagggcccctgcttcccgccttgctgcacacactagccttttctgacactgaagtagtaggccagagtttggagctgctgcatctgctgttcctgtatcagccagaggctgttcaggtcttcctgcagcagtcagggctgcaagccctggaaaggcatcaggaagaggcccagctccaggatcgtgtgtatgctctccagcagacagctcttcaagggtgatcttgtttctcaatgtcactcattcccctctctcttaacatcaagcttgtttgtccagtagagcctttggagatttaggaccataatgaggtctcatgttctctgctcccacacctaagccaagacctttgggtcccagctcctccccttccactcagcactatccaggcaggaggaccaaaagggactcagtgtggtctacttactctggggccctagaatccctgcccccccgccacccttcatgtttgcttcagcagctggtagcttttgatgagacagaataaagttttatttttatatta

SEQ ID NO: 406848 - DNA, 1888 bp, Homo sapiens
ggctgcgcagtcggtgccatcttctacgcccctgggagcgttgtggctgctgtttccttcggctttcctcctcctgctccaccatgtggagccgacggcagggccgcctcaggcccacggtctgcggggtggaggagctacggcgccgccggcgggagcgggaggcagcactgcggaaggcgcggagggagcagcagctggtcagcaagaggctgctgagaaacgacgccccagaggaagctggagagggatgtgtggctgcgatcctcggggaaaccgaggtgcagcagttcctgcggcaagcccagcgggggacagaggaaaaggagagagagggggctctggtcagccttcgtcgaggcttgcagcaccctgaaacacagcaaaccttcatccggctggagggcagcatgcggaccctggtcgggctcctgaccagcaaccaggccctgctgcagcttgaggcggctcggtgcctgcatgagctctctcactccgagcagtccactgttgctgaggcctgcctgccagccacttcttacctcctcacctacctctccagtcacagctcagacttcatagagctgtgtctgtatacactgggtaacctgatcgtggagagtgaggctgtgagaaggcagctcctgccacagggcattgttccagccttggctgcctgcatccagtccccccatgtggctgtgctggaagctctcggatatgccttgtcccagcttctacaggctgaggaagctccagagaagatcattccccctgcttctgccagcagctccatcttggcctccactctccctcagcacatgctacaaatgttgcaacctggcccaaagctcaaccctggggtcgctgtggagtttgcctggtgccttcattacatcatctgcagccaggtcagcaatcctctgctcattggccatggggctctgtctactctggggttgctgctgttggacttggctggggctgtccagaaaaccgaggatgcaggactggagctgctggcatgccccgtgcttcgatgtctaagcaacctgctaactgaggcagcagtggagactgtgggagggcaaatgcagctcagagatgagcgtgttgtggcagccttatttatccttctgcagttctttttccagaaacagcccagtctgctccctgagggcctttggctcctcaacaacctcactgcaaacagtcctagtttctgtacctccttgctctccctggatctgattgagcctctcttacagctgttgccagtatctaacgtggtgagcgtaatggtgctcacagttctgtgcaatgttgcagaaaagggtcctgcttactgccagcggctgtggccagggcccctgcttcccgccttgctgcacacactagccttttctgacactgaagtagtaggccagagtttggagctgctgcatctgctgttcctgtatcagccagaggctgttcaggtcttcctgcagcagtcagggctgcaagccctggaaaggcatcaggaagaggcccagctccaggatcgtgtgtatgctctccagcagacagctcttcaagggtgatcttgtttctcaatgtcactcattcccctctctcttaacatcaagcttgtttgtccagtagagcctttggagatttaggaccataatgaggtctcatgttctctgctcccacacctaagccaagacctttgggtcccagctcctccccttccactcagcactatccaggcaggaggaccaaaagggactcagtgtggtctacttactctggggccctagaatccctgcccccccgccacccttcatgtttgcttcagcagctggtagcttttgatgagacagaataaagttttatttttatatta

SEQ ID NO: 406849 - DNA, 688 bp, Homo sapiens
gagagggtatccaggcagaagaaatagcatgtgcaaaagctcggaaatgtaaaaaaaagaaaaagaaaaagctcatgttaggctggttgttgttagagtgtaggttgcatggggagaatggctagaggagtaggttttgccaggctgagaggtttaaatatccttgaaagaaccctgtatgaaggcaggatagatattgttattctcattttcaggtgaggaaacttaggttcaggtcccatatggagtaagtggcaggtatggtattagaactcagttctgattctctgtccactccactgcaagccctggaaaggcatcaggaagaggcccagctccaggatcgtgtgtatgctctccagcagacagctcttcaagggtgatcttgtttctcaatgtcactcattcccctctctcttaacatcaagcttgtttgtccagtagagcctttggagatttaggaccataatgaggtctcatgttctctgctcccacacctaagccaagacctttgggtcccagctcctccccttccactcagcactatccaggcaggaggaccaaaagggactcagtgtggtctacttactctggggccctagaatccctgcccccccgccacccttcatgtttgcttcagcagctggtagcttttgatgagacagaataaagttttatttttatatta

SEQ ID NO: 406850 - DNA, 427 bp, Homo sapiens
  misc_feature (1)..(1): n is a, c, g, or t
  misc_feature (20)..(20): n is a, c, g, or t
nttttttttttttctttttntattttacagcacaagctttatgaggaataggagaacacatttttttcacattatactaagtccagcagagcccaggctctggggctgttgctcttaatcctcagtggaggcttcaggctttaccacttagaacgttctccagggctctggttacctgatcagcactgaagttgttcaaagggacattcgtctcttggccaaatgcgtagcgggcccagagcttgggctgcacatcggagcattcgcggattaggatgggtaggtcgggattcgccttcttcagctccacgtagcgtttctcaatgaagtccctgacgccctggctgccgggcgagcgctgacataagtggatgcgaatctcacgcaggcccagctttgccccgactcctcgacttgctgcggccgc

SEQ ID NO: 406851 - DNA, 2467 bp, Homo sapiens
ggctgcgcagtcggtgccatcttctacgcccctgggagcgttgtggctgctgtttccttcggctttcctcctcctgctccaccatgtggagccgacggcagggccgcctcaggcccacggtctgcggggtggaggagctacggcgccgccggcgggagcgggaggcagcactgcggaaggcgcggagggagcagcagctggtcagcaagaggctgctgagaaacgacgccccagaggaagctggagagggatgtgtggctgcgatcctcggggaaaccgaggtgcagcagttcctgcggcaagcccagcgggggacagaggaaaaggagagagagggggctctggtcagccttcgtcgaggcttgcagcaccctgaaacacagcaaaccttcatccggctggagggcagcatgcggaccctggtcgggctcctgaccagcaaccaggccctgctgcagcttgaggcggctcggtgcctgcatgagctctctcactccgagcagtccactgttgctgaggcctgcctgccagccacttcttacctcctcacctacctctccagtcacagctcagacttcatagagctgtgtctgtatacactgggtaacctgatcgtggagagtgaggctgtgagaaggcagctcctgccacagggcattgttccagccttggctgcctgcatccagtccccccatgtggctgtgctggaagctctcggatatgccttgtcccagcttctacaggctgaggaagctccagagaagatcattccctccatcttggcctccactctccctcagcacatgctacaaatgttgcaacctggcccaaagctcaaccctggggtcgctgtggagtttgcctggtgccttcattacatcatctgcagccaggtcagcaatcctctgctcattggccatggggctctgtctactctggggttgctgctgttggacttggctggggctgtccagaaaaccgaggatgcaggactggagctgctggcatgccccgtgcttcgatgtctaagcaacctgctaactgaggcagcagtggagactgtgggagggcaaatgcagctcagagatgagcgtgttgtggcagccttatttatccttctgcagttctttttccagaaacagcccagtctgctccctgagggcctttggctcctcaacaacctcactgcaaacagtcctagtttctgtacctccttgctctccctggatctgattgagcctctcttacagctgttgccagtatctaacgtggtgagcgtaatggtgctcacagttctgtgcaatgttgcagaaaagggtcctgcttactgccagcggctgtggccagggcccctgcttcccgccttgctgcacacactagccttttctgacactgaagtagtaggccagagtttggagctgctgcatctgctgttcctgtatcagccagaggctgttcaggtcttcctgcagcagtcagggctgcaagccctggaaaggcatcaggaagaggcccagctccaggatcgtgtgtatgctctccagcagacagctcttcaagggtgatcttgtttctcaatgtcactcattcccctctctcttaacatcaagcttgtttgtccagtagagcctttggagatttaggaccataatgaggtctcatgttctctgctcccacacctaagccaagacctttgggtcccagctcctccccttccactcagcactatccaggcaggaggaccaaaagggactcagtgtggtctacttactctggggccctagaatccctgcccccccgccacccttcatgtttgcttcagcagctggtagcttttgatgagacagaataaagttttatttttatattaagctactttgcctcagtggttgcacagtaaggggtagagggtagatgaggacaagaacaccctgagaaagtattttacagcacaagctttatgaggaataggagaacacatttttttcacattatactaagtccagcagagcccaggctctggggctgttgctcttaatcctcagtggaggcttcaggctttaccacttagaacgttctccagggctctggttacctgatcagcactgaagttgttcaaagggacattcgtctcttggccaaatgcgtagcgggcccagagcttgggctgcacatcggagcattcgcggattaggatgggtaggtcgggattcgccttcttcagctccacgtagcgtttctcaatgaagtccctgcggggccggagagagcgccgcgcgtgctgtgggcgggggcttccctcaacttcagggaggtcgaggtcgtgaccctggcgtcccgaagcccgcccgcctcaccacgccgcgcctcacctgacgccctggctgccgggcgagcgctgacataagtggatgcgaatctcacgcaggcccagctttgccccgactcctcgacttgctgcggccgc

SEQ ID NO: 406852 - DNA, 2711 bp, Homo sapiens
ggctgcgcagtcggtgccatcttctacgcccctgggagcgttgtggctgctgtttccttcggctttcctcctcctgctccaccatgtggagccgacggcagggccgcctcaggcccacggtctgcggggtggaggagctacggcgccgccggcgggagcgggaggcagcactgcggaaggcgcggagggagcagcagctggtcagcaagaggctgctgagaaacgacgccccagaggaagctggagagggatgtgtggctgcgatcctcggggaaaccgaggtgcagcagttcctgcggcaagcccagcgggggacagaggaaaaggagagagagggggctctggtcagccttcgtcgaggcttgcagcaccctgaaacacagcaaaccttcatccggctggagggcagcatgcggaccctggtcgggctcctgaccagcaaccaggccctgctgcagcttgaggcggctcggtgcctgcatgagctctctcactccgagcagtccactgttgctgaggcctgcctgccagccacttcttacctcctcacctacctctccagtcacagctcagacttcatagagctgtgtctgtatacactgggtaacctgatcgtggagagtgaggctgtgagaaggcagctcctgccacagggcattgttccagccttggctgcctgcatccagtccccccatgtggctgtgctggaagctctcggatatgccttgtcccagcttctacaggctgaggaagctccagagaagatcattccctccatcttggcctccactctccctcagcacatgctacaaatgttgcaacctggcccaaagctcaaccctggggtcgctgtggagtttgcctggtgccttcattacatcatctgcagccaggtcagcaatcctctgctcattggccatggggctctgtctactctggggttgctgctgttggacttggctggggctgtccagaaaaccgaggatgcaggactggagctgctggcatgccccgtgcttcgatgtctaagcaacctgctaactgaggcagcagtggagactgtgggagggcaaatgcagctcagagatgagcgtgttgtggcagccttatttatccttctgcagttctttttccagaaacagcccagtctgctccctgagggcctttggctcctcaacaacctcactgcaaacagtcctagtttctgtacctccttgctctccctggatctgattgagcctctcttacagctgttgccagtatctaacgtggtgagcgtaatggtgctcacagttctgtgcaatgttgcagaaaagggtcctgcttactgccagcggctgtggccagggcccctgcttcccgccttgctgcacacactagccttttctgacactgaagtagtaggccagagtttggagctgctgcatctgctgttcctgtatcagccagaggtataggtttctggcccacatcctcagtcacccctgttctgaagccacacagtggctcccttcccatccagtcctaactatagttgtttctctgggcctggctaacctatataggttccatgtcagaaacttcatcctcttgttggggaatgcaccctctggagtaggctgacccatgaggctgtgggaattgagtcttaggacacagagaccaggtgtgttgaattttcttccctgcccctaggctgttcaggtcttcctgcagcagtcagggctgcaagccctggaaaggcatcaggaagaggcccagctccaggatcgtgtgtatgctctccagcagacagctcttcaagggtgatcttgtttctcaatgtcactcattcccctctctcttaacatcaagcttgtttgtccagtagagcctttggagatttaggaccataatgaggtctcatgttctctgctcccacacctaagccaagacctttgggtcccagctcctccccttccactcagcactatccaggcaggaggaccaaaagggactcagtgtggtctacttactctggggccctagaatccctgcccccccgccacccttcatgtttgcttcagcagctggtagcttttgatgagacagaataaagttttatttttatattaagctactttgcctcagtggttgcacagtaaggggtagagggtagatgaggacaagaacaccctgagaaagtattttacagcacaagctttatgaggaataggagaacacatttttttcacattatactaagtccagcagagcccaggctctggggctgttgctcttaatcctcagtggaggcttcaggctttaccacttagaacgttctccagggctctggttacctgatcagcactgaagttgttcaaagggacattcgtctcttggccaaatgcgtagcgggcccagagcttgggctgcacatcggagcattcgcggattaggatgggtaggtcgggattcgccttcttcagctccacgtagcgtttctcaatgaagtccctgcggggccggagagagcgccgcgcgtgctgtgggcgggggcttccctcaacttcagggaggtcgaggtcgtgaccctggcgtcccgaagcccgcccgcctcaccacgccgcgcctcacctgacgccctggctgccgggcgagcgctgacataagtggatgcgaatctcacgcaggcccagctttgccccgactcctcgacttgctgcggccgc

SEQ ID NO: 406853 - DNA, 2340 bp, Homo sapiens
  misc_feature (2218)..(2218): n is a, c, g, or t
ggctgcgcagtcggtgccatcttctacgcccctgggagcgttgtggctgctgtttccttcggctttcctcctcctgctccaccatgtggagccgacggcagggccgcctcaggcccacggtctgcggggtggaggagctacggcgccgccggcgggagcgggaggcagcactgcggaaggcgcggagggagcagcagctggtcagcaagaggctgctgagaaacgacgccccagaggaagctggagagggatgtgtggctgcgatcctcggggaaaccgaggtgcagcagttcctgcggcaagcccagcgggggacagaggaaaaggagagagagggggctctggtcagccttcgtcgaggcttgcagcaccctgaaacacagcaaaccttcatccggctggagggcagcatgcggaccctggtcgggctcctgaccagcaaccaggccctgctgcagcttgaggcggctcggtgcctgcatgagctctctcactccgagcagtccactgttgctgaggcctgcctgccagccacttcttacctcctcacctacctctccagtcacagctcagacttcatagagctgtgtctgtatacactgggtaacctgatcgtggagagtgaggctgtgagaaggcagctcctgccacagggcattgttccagccttggctgcctgcatccagtccccccatgtggctgtgctggaagctctcggatatgccttgtcccagcttctacaggctgaggaagctccagagaagatcattccctccatcttggcctccactctccctcagcacatgctacaaatgttgcaacctggcccaaagctcaaccctggggtcgctgtggagtttgcctggtgccttcattacatcatctgcagccaggtcagcaatcctctgctcattggccatggggctctgtctactctggggttgctgctgttggacttggctggggctgtccagaaaaccgaggatgcaggactggagctgctggcatgccccgtgcttcgatgtctaagcaacctgctaactgaggcagcagtggagactgtgggagggcaaatgcagctcagagatgagcgtgttgtggcagccttatttatccttctgcagttctttttccagaaacagcccagtctgctccctgagggcctttggctcctcaacaacctcactgcaaacagtcctagtttctgtacctccttgctctccctggatctgattgagcctctcttacagctgttgccagtatctaacgtggtgagcgtaatggtgctcacagttctgtgcaatgttgcagaaaagggtcctgcttactgccagcggctgtggccagggcccctgcttcccgccttgctgcacacactagccttttctgacactgaagtagtaggccagagtttggagctgctgcatctgctgttcctgtatcagccagaggctgttcaggtcttcctgcagcagtcagggctgcaagccctggaaaggcatcaggaagaggcccagctccaggatcgtgtgtatgctctccagcagacagctcttcaagggtgatcttgtttctcaatgtcactcattcccctctctcttaacatcaagcttgtttgtccagtagagcctttggagatttaggaccataatgaggtctcatgttctctgctcccacacctaagccaagacctttgggtcccagctcctccccttccactcagcactatccaggcaggaggaccaaaagggactcagtgtggtctacttactctggggccctagaatccctgcccccccgccacccttcatgtttgcttcagcagctggtagcttttgatgagacagaataaagttttatttttatattaagctactttgcctcagtggttgcacagtaaggggtagagggtagatgaggacaagaacaccctgagaaagtattttacagcacaagctttatgaggaataggagaacacatttttttcacattatactaagtccagcagagcccaggctctggggctgttgctcttaatcctcagtggaggcttcaggctttaccacttagaacgttctccagggctctggttacctgatcagcactgaagttgttcaaagggacattcgtctcttggccaaatgcgttagcggggcccaagagctttggggcttgcaacatccgggaacaattccgccgggaatttagggattgggntaagggtccggggaatttccgccctttcctttccaggccttcccaacggttaggcggttttccttcaaatgtgaaagtccccttggacgccctgtggcttgccggggcggaggccgcttgaa

SEQ ID NO: 406854 - DNA, 2835 bp, Homo sapiens
ggctgcgcagtcggtgccatcttctacgcccctgggagcgttgtggctgctgtttccttcggctttcctcctcctgctccaccatgtggagccgacggcagggccgcctcaggcccacggtctgcggggtggaggagctacggcgccgccggcgggagcgggaggcagcactgcggaaggcgcggagggagcagcagctggtcagcaagaggctgctgagaaacgacgccccagaggaagctggagagggatgtgtggctgcgatcctcggggaaaccgaggtgcagcagttcctgcggcaagcccagcgggggacagaggaaaaggagagagagggggctctggtcagccttcgtcgaggcttgcagcaccctgaaacacagcaaaccttcatccggtcagtgtggatggtgtggtggagggaggagttggggctctgagggatggaccacaagctaagcagggctctggtactcactcacataggctggagggcagcatgcggaccctggtcgggctcctgaccagcaaccaggccctgctgcagcttgaggcggctcggtgcctgcatgagctctctcactccgagcagtccactgttgctgaggcctgcctgccagccacttcttacctcctcacctacctctccagtcacagctcagacttcatagtaagccctgtcccttcctatcttgttcttggtttagattttaaaattgtgcttttgggaccagtttgagctggcaggtaggaggaagaaaacatgtttgcccttatgcctacagccatggctacacccatcatctccccaccctcttgtgagccgcaaggatagctgctccagcgtccccatcacctcccctccccatctccccacacgcagcctggcatgaaacaggccaagcccagtgcttttgttgcctgttctcaggagctgtgtctgtatacactgggtaacctgatcgtggagagtgaggctgtgagaaggcagctcctgccacagggcattgttccagccttggctgcctgcatccagtccccccatgtggctgtgctggaagctctcggatatgccttgtcccagcttctacaggctgaggaagctccagagaagatcattccccctgcttctgccagcagctccatcttggcctccactctccctcagcacatgctacaaatgttgcaacctggcccaaagctcaaccctggggtcgctgtggagtttgcctggtgccttcattacatcatctgcagccaggtcagcaatcctctgctcattggccatggggctctgtctactctggggttgctgctgttggacttggctggggctgtccagaaaaccgaggatgcaggactggagctgctggcatgccccgtgcttcgatgtctaagcaacctgctaactgaggcagcagtggagactgtgggagggcaaatgcagctcagagatgagcgtgttgtggcagccttatttatccttctgcagttctttttccagaaacagcccagtctgctccctgagggcctttggctcctcaacaacctcactgcaaacagtcctagtttctgtacctccttgctctccctggatctgattgagcctctcttacagctgttgccagtatctaacgtggtgagcgtaatggtgctcacagttctgtgcaatgttgcagaaaagggtcctgcttactgccagcggctgtggccagggcccctgcttcccgccttgctgcacacactagccttttctgacactgaagtagtaggccagagtttggagctgctgcatctgctgttcctgtatcagccagaggctgttcaggtcttcctgcagcagtcagggctgcaagccctggaaaggcatcaggaagaggcccagctccaggatcgtgtgtatgctctccagcagacagctcttcaagggtgatcttgtttctcaatgtcactcattcccctctctcttaacatcaagcttgtttgtccagtagagcctttggagatttaggaccataatgaggtctcatgttctctgctcccacacctaagccaagacctttgggtcccagctcctccccttccactcagcactatccaggcaggaggaccaaaagggactcagtgtggtctacttactctggggccctagaatccctgcccccccgccacccttcatgtttgcttcagcagctggtagcttttgatgagacagaataaagttttatttttatattaagctactttgcctcagtggttgcacagtaaggggtagagggtagatgaggacaagaacaccctgagaaagtattttacagcacaagctttatgaggaataggagaacacatttttttcacattatactaagtccagcagagcccaggctctggggctgttgctcttaatcctcagtggaggcttcaggctttaccacttagaacgttctccagggctctggttacctgatcagcactgaagttgttcaaagggacattcgtctcttggccaaatgcgtagcgggcccagagcttgggctgcacatcggagcattcgcggattaggatgggtaggtcgggattcgccttcttcagctccacgtagcgtttctcaatgaagtccctgcggggccggagagagcgccgcgcgtgctgtgggcgggggcttccctcaacttcagggaggtcgaggtcgtgaccctggcgtcccgaagcccgcccgcctcaccacgccgcgcctcacctgacgccctggctgccgggcgagcgctgacataagtggatgcgaatctcacgcaggcccagctttgccccgactcctcgacttgctgcggccgc

SEQ ID NO: 406855 - DNA, 2273 bp, Homo sapiens
ggctgcgcagtcggtgccatcttctacgcccctgggagcgttgtggctgctgtttccttcggctttcctcctcctgctccaccatgtggagccgacggcagggccgcctcaggcccacggtctgcggggtggaggagctacggcgccgccggcgggagcgggaggcagcactgcggaaggcgcggagggagcagcagctggtcagcaagaggctgctgagaaacgacgccccagaggaagctggagagggatgtgtggctgcgatcctcggggaaaccgaggtgcagcagttcctgcggcaagcccagcgggggacagaggaaaaggagagagagggggctctggtcagccttcgtcgaggcttgcagcaccctgaaacacagcaaaccttcatccggtagctccagcctctgccctgtgccaaggggctgaaagtctctgaagacctgatgacccagcttccagtcagatccttaccctgtctacttccagtccccccatgtggctgtgctggaagctctcggatatgccttgtcccagcttctacaggctgaggaagctccagagaagatcattccctccatcttggcctccactctccctcagcacatgctacaaatgttgcaacctggcccaaagctcaaccctggggtcgctgtggagtttgcctggtgccttcattacatcatctgcagccaggtcagcaatcctctgctcattggccatggggctctgtctactctggggttgctgctgttggacttggctggggctgtccagaaaaccgaggatgcaggactggagctgctggcatgccccgtgcttcgatgtctaagcaacctgctaactgaggcagcagtggagactgtgggagggcaaatgcagctcagagatgagcgtgttgtggcagccttatttatccttctgcagttctttttccagaaacagcccagtctgctccctgagggcctttggctcctcaacaacctcactgcaaacagtcctagtttctgtacctccttgctctccctggatctgattgagcctctcttacagctgttgccagtatctaacgtggtgagcgtaatggtgctcacagttctgtgcaatgttgcagaaaagggtcctgcttactgccagcggctgtggccagggcccctgcttcccgccttgctgcacacactagccttttctgacactgaagtagtaggccagagtttggagctgctgcatctgctgttcctgtatcagccagaggctgttcaggtcttcctgcagcagtcagggctgcaagccctggaaaggcatcaggaagaggcccagctccaggatcgtgtgtatgctctccagcagacagctcttcaagggtgatcttgtttctcaatgtcactcattcccctctctcttaacatcaagcttgtttgtccagtagagcctttggagatttaggaccataatgaggtctcatgttctctgctcccacacctaagccaagacctttgggtcccagctcctccccttccactcagcactatccaggcaggaggaccaaaagggactcagtgtggtctacttactctggggccctagaatccctgcccccccgccacccttcatgtttgcttcagcagctggtagcttttgatgagacagaataaagttttatttttatattaagctactttgcctcagtggttgcacagtaaggggtagagggtagatgaggacaagaacaccctgagaaagtattttacagcacaagctttatgaggaataggagaacacatttttttcacattatactaagtccagcagagcccaggctctggggctgttgctcttaatcctcagtggaggcttcaggctttaccacttagaacgttctccagggctctggttacctgatcagcactgaagttgttcaaagggacattcgtctcttggccaaatgcgtagcgggcccagagcttgggctgcacatcggagcattcgcggattaggatgggtaggtcgggattcgccttcttcagctccacgtagcgtttctcaatgaagtccctgcggggccggagagagcgccgcgcgtgctgtgggcgggggcttccctcaacttcagggaggtcgaggtcgtgaccctggcgtcccgaagcccgcccgcctcaccacgccgcgcctcacctgacgccctggctgccgggcgagcgctgacataagtggatgcgaatctcacgcaggcccagctttgccccgactcctcgacttgctgcggccgc

SEQ ID NO: 406856 - DNA, 1285 bp, Homo sapiens
gagagggtatccaggcagaagaaatagcatgtgcaaaagctcggaaatgtaaaaaaaagaaaaagaaaaagctcatgttaggctggttgttgttagagtgtaggttgcatggggagaatggctagaggagtaggttttgccaggctgagaggtttaaatatccttgaaagaaccctgtatgaaggcaggatagatattgttattctcattttcaggtgaggaaacttaggttcaggtcccatatggagtaagtggcaggtatggtattagaactcagttctgattctctgtccactccactgcaagccctggaaaggcatcaggaagaggcccagctccaggatcgtgtgtatgctctccagcagacagctcttcaagggtgatcttgtttctcaatgtcactcattcccctctctcttaacatcaagcttgtttgtccagtagagcctttggagatttaggaccataatgaggtctcatgttctctgctcccacacctaagccaagacctttgggtcccagctcctccccttccactcagcactatccaggcaggaggaccaaaagggactcagtgtggtctacttactctggggccctagaatccctgcccccccgccacccttcatgtttgcttcagcagctggtagcttttgatgagacagaataaagttttatttttatattaagctactttgcctcagtggttgcacagtaaggggtagagggtagatgaggacaagaacaccctgagaaagtattttacagcacaagctttatgaggaataggagaacacatttttttcacattatactaagtccagcagagcccaggctctggggctgttgctcttaatcctcagtggaggcttcaggctttaccacttagaacgttctccagggctctggttacctgatcagcactgaagttgttcaaagggacattcgtctcttggccaaatgcgtagcgggcccagagcttgggctgcacatcggagcattcgcggattaggatgggtaggtcgggattcgccttcttcagctccacgtagcgtttctcaatgaagtccctgcggggccggagagagcgccgcgcgtgctgtgggcgggggcttccctcaacttcagggaggtcgaggtcgtgaccctggcgtcccgaagcccgcccgcctcaccacgccgcgcctcacctgacgccctggctgccgggcgagcgctgacataagtggatgcgaatctcacgcaggcccagctttgccccgactcctcgacttgctgcggccgc

SEQ ID NO: 406857 - DNA, 207 bp, Homo sapiens
ttcaggtcccatatggagtaagtggcaggtatggtattagaactcagttctgattctctgtccactccactgcaaggtagatgcttattagttgcattagtgtgaatgacaagttctgaaggtgtgatattggaaggctcacaggtgaagtgggcagagagagacttaggacttgctttctgtgaaccgtgtgttctcctttccctg

SEQ ID NO: 406858 - DNA, 429 bp, Homo sapiens
tgggattacaggcataagccaccacgcctaggcaactgcttctcttcttaaaggtggaattgactatatacctagggactgcttgcttcctgttgcccagccaggtcagcaatcctctgctcattggccatggggctctgtctactctggggttgctgctgttggacttggctggggctgtccagaaaaccgaggatgcaggactggagctggtaggtgaagatgtcaggtgaaattctgggagatgtttcttgatactctggaatgcaggtaacctcttccttcttacacctgaccccccaatttgtctttgcagctggcatgccccgtgcttcgatgtctaagcaacctgctaactgaggcagcagtggagactgtgggagggcaaatgcagctcagagatgagcgtgttgtggcagccttatttat

SEQ ID NO: 406859 - DNA, 348 bp, Homo sapiens
cgtgtgtatgctctccagcagacagctcttcaagggtgatcttgtttctcaatgtcactcattcccctctctcttaacatcaagcttgtttgtccagtagagcctttggagatttaggaccataatgaggtctcatgttctctgctcccacacctaagccaagacctttgggtcccagctcctccccttccactcagcactatccaggcaggaggaccaaaagggactcagtgtggtctacttactctggggccctagaatccctgcccccccgccacccttcatgtttgcttcagcagctggtagcttttgatgagacagaataaagttttatttttatattaagct

SEQ ID NO: 406860 - DNA, 1022 bp, Homo sapiens
  misc_feature (779)..(779): n is a, c, g, or t
  misc_feature (799)..(800): n is a, c, g, or t
  misc_feature (807)..(807): n is a, c, g, or t
  misc_feature (816)..(816): n is a, c, g, or t
ggctgcgcagtcggtgccatcttctacgcccctgggagcgttgtggctgctgtttccttcggctttcctcctcctgctccaccatgtggagccgacggcagggccgcctcaggcccacggtctgcggggtggaggagctacggcgccgccggcgggagcgggaggcagcactgcggaaggcgcggagggagcagcagctggtcagcaagaggctgctgagaaacgacgccccagaggaagctggagagggatgtgtggctgcgatcctcggggaaaccgaggtgcagcagttcctgcggcaagcccagcgggggacagaggaaaaggagagagagggggctctggtcagccttcgtcgaggcttgcagcaccctgaaacacagcaaaccttcatccggctggagggcagcatgcggaccctggtcgggctcctgaccagcaaccaggccctgctgcagcttgaggcggctcggtgcctgcatgagctctctcactccgagcagtccactgttgctgaggcctgcctgccagccacttcttacctcctcacctacctctccagtcacagctcagacttcatagagctgtgtctgtatacactgggtaacctgatcgtggagagtgaggctgtgagaaggcagctcctgccacagggcattgttccagccttggctgcctgcatccagtccccccatgtggctgtgctggaagctctcggatatgccttgtcccagcttctacaggctgaggaagctccagagaagatcattccctccatnttgggctccatctccctcannaatgtanaaatgttgnaagctgggcaaaggtctgcaagcaggtaagcaatctctgtcattgcatggggtctgtctactctggggtggtgtgtgaactggtgggtgtcagaaaacgagatgagactgagtgggatgccgtgttgatgttaagaactgtactgagagagtgaatggggggcagggtagataggtggagtatatcttggagttacagaagtgagg

SEQ ID NO: 406861 - DNA, 2347 bp, Homo sapiens
ggctgcgcagtcggtgccatcttctacgcccctgggagcgttgtggctgctgtttccttcggctttcctcctcctgctccaccatgtggagccgacggcagggccgcctcaggcccacggtctgcggggtggaggagctacggcgccgccggcgggagcgggaggcagcactgcggaaggcgcggagggagcagcagctggtcagcaagaggctgctgagaaacgacgccccagaggaagctggagagggatgtgtggctgcgatcctcggggaaaccgaggtgcagcagttcctgcggcaagcccagcgggggacagaggaaaaggagagagagggggctctggtcagccttcgtcgaggcttgcagcaccctgaaacacagcaaaccttcatccggctggagggcagcatgcggaccctggtcgggctcctgaccagcaaccaggccctgctgcagcttgaggcggctcggtgcctgcatgagctctctcactccgagcagtccactgttgctgaggcctgcctgccagccacttcttacctcctcacctacctctccagtcacagctcagacttcatagagctgtgtctgtatacactgggtaacctgatcgtggagagtgaggctgtgagaaggcagctcctgccacagggcattgttccagccttggctgcctgcatccagtccccccatgtggctgtgctggaagctctcggatatgccttgtcccagcttctacaggctgaggaagctccagagaagatcattccctccatcttggcctccactctccctcagcacatgctacaaatgttgcaacctggcccaaagctcaaccctggggtcgctgtggagtttgcctggtgccttcattacatcatctgcagccaggtcagcaatcctctgctcattggccatggggctctgtctactctggggttgctgctgttggacttggctggggctgtccagaaaaccgaggatgcaggactggagctgctggcatgccccgtgcttcgatgtctaagcaacctgctaactgaggcagcagtggagactgtgggagggcaaatgcagctcagagatgagcgtgttgtggcagccttatttatccttctgcagttctttttccagaaacagcccagtctgctccctgagggcctttggctcctcaacaacctcactgcaaacagtcctagtttctgtacctccttgctctccctggatctgattgagcctctcttacagctgttgccagtatctaacgtggtgagcgtaatggtgctcacagttctgtgcaatgttgcagaaaagggtcctgcttactgccagcggctgtggccagggcccctgcttcccgccttgctgcacacactagccttttctgacactgaagtagtaggccagagtttggagctgctgcatctgctgttcctgtatcagccagaggctgttcaggtcttcctgcagcagtcagggctgcaagccctggaaaggcatcaggaagaggcccagctccaggatcgtgtgtatgctctccagcagacagctcttcaagggtgatcttgtttctcaatgtcactcattcccctctctcttaacatcaagcttgtttgtccagtagagcctttggagatttaggaccataatgaggtctcatgttctctgctcccacacctaagccaagacctttgggtcccagctcctccccttccactcagcactatccaggcaggaggaccaaaagggactcagtgtggtctacttactctggggccctagaatccctgcccccccgccacccttcatgtttgcttcagcagctggtagcttttgatgagacagaataaagttttatttttatattaagctactttgcctcagtggttgcacagtaaggggtagagggtagatgaggacaagaacaccctgagaaagtattttacagcacaagctttatgaggaataggagaacacatttttttcacattatactaagtccagcagagcccaggctctggggctgttgctcttaatcctcagtggaggcttcaggctttaccacttagaacgttctccagggctctggttacctgatcagcactgaagttgttcaaagggacattcgtctcttggccaaatgcgtagcgggcccagagcttgggctgcacatcggagcattcgcggattaggatgggtaggtcgggattcgccttcttcagctccacgtagcgtttctcaatgaagtccctgacgccctggctgccgggcgagcgctgacataagtggatgcgaatctcacgcaggcccagctttgccccgactcctcgacttgctgcggccgc

SEQ ID NO: 406862 - DNA, 2315 bp, Homo sapiens
ggctgcgcagtcggtgccatcttctacgcccctgggagcgttgtggctgctgtttccttcggctttcctcctcctgctccaccatgtggagccgacggcagggccgcctcaggcccacggtctgcggggtggaggagctacggcgccgccggcgggagcgggaggcagcactgcggaaggcgcggagggagcagcagctggtcagcaagaggctgctgagaaacgacgccccagaggaagctggagagggatgtgtggctgcgatcctcggggaaaccgaggtgcagcagttcctgcggcaagcccagcgggggacagaggaaaaggagagagagggggctctggtcagccttcgtcgaggcttgcagcaccctgaaacacagcaaaccttcatccggctggagggcagcatgcggaccctggtcgggctcctgaccagcaaccaggccctgctgcagcttgaggcggctcggtgcctgcatgagctctctcactccgagcagtccactgttgctgaggcctgcctgccagccacttcttacctcctcacctacctctccagtcacagctcagacttcatagagctgtgtctgtatacactgggtaacctgatcgtggagagtgaggctgtgagaaggcagctcctgccacagggcattgttccagccttggctgcctgcatccagtccccccatgtggctgtgctggaagctctcggatatgccttgtcccagcttctacaggctgaggaagctccagagaagatcattccctccatcttggcctccactctccctcagcacatgctacaaatgttgcaacctggcccaaagctcaaccctggggtcgctgtggagtttgcctggtgccttcattacatcatctgcagccaggtcagcaatcctctgctcattggccatggggctctgtctactctggggttgctgctgttggacttggctggggctgtccagaaaaccgaggatgcaggactggagctgctggcatgccccgtgcttcgatgtctaagcaacctgctaactgaggcagcagtggagactgtgggagggcaaatgcagctcagagatgagcgtgttgtggcagccttatttatccttctgcagttctttttccagaaacagcccagtctgctccctgagggcctttggctcctcaacaacctcactgcaaacagtcctagtttctgtacctccttgctctccctggatctgattgagcctctcttacagctgttgccagtatctaacgtggtgagcgtaatggtgctcacagttctgtgcaatgttgcagaaaagggtcctgcttactgccagcggctgtggccagggcccctgcttcccgccttgctgcacacactagccttttctgacactgaagtagtaggccagagtttggagctgctgcatctgctgttcctgtatcagccagaggctgttcaggtcttcctgcagcagtcagggctgcaagccctggaaaggcatcaggaagaggcccagctccaggatcgtgtgtatgctctccagcagacagctcttcaagggtgatcttgtttctcaatgtcactcattcccctctctcttaacatcaagcttgtttgtccagtagagcctttggagatttaggaccataatgaggtctcatgttctctgctcccacacctaagccaagacctttgggtcccagctcctccccttccactcagcactatccaggcaggaggaccaaaagggactcagtgtggtctacttactctggggccctagaatccctgcccccccgccacccttcatgtttgcttcagcagctggtagcttttgatgagacagaataaagttttatttttatattaagctactttgcctcagtggttgcacagtaaggggtagagggtagatgaggacaagaacaccctgagaaagtattttacagcacaagctttatgaggaataggagaacacatttttttcacattatactaagtccagcagagcccaggctctggggctgttgctcttaatcctcagtggaggcttcaggctttaccacttagaacgttctccagggctctggttacctgatcagcactgaagttgttcaaagggacattcgtctcttggccaaatgctgaagagagagagggaggtgtctttaactattctgcaccctggaggctaccaaagtaaaataaaagatctttgtctttatcttagtcttgttaagacaggaagagtattaaagagatatgatcaaaatacatttggtatgcctagaattaatacaataggtctcaaaca

SEQ ID NO: 406863 - DNA, 2283 bp, Homo sapiens
ggctgcgcagtcggtgccatcttctacgcccctgggagcgttgtggctgctgtttccttcggctttcctcctcctgctccaccatgtggagccgacggcagggccgcctcaggcccacggtctgcggggtggaggagctacggcgccgccggcgggagcgggaggcagcactgcggaaggcgcggagggagcagcagctggtcagcaagaggctgctgagaaacgacgccccagaggaagctggagagggatgtgtggctgcgatcctcggggaaaccgaggtgcagcagttcctgcggcaagcccagcgggggacagaggaaaaggagagagagggggctctggtcagccttcgtcgaggcttgcagcaccctgaaacacagcaaaccttcatccggagctgtgtctgtatacactgggtaacctgatcgtggagagtgaggctgtgagaaggcagctcctgccacagggcattgttccagccttggctgcctgcatccagtccccccatgtggctgtgctggaagctctcggatatgccttgtcccagcttctacaggctgaggaagctccagagaagatcattccctccatcttggcctccactctccctcagcacatgctacaaatgttgcaacctggcccaaagctcaaccctggggtcgctgtggagtttgcctggtgccttcattacatcatctgcagccaggtcagcaatcctctgctcattggccatggggctctgtctactctggggttgctgctgttggacttggctggggctgtccagaaaaccgaggatgcaggactggagctgctggcatgccccgtgcttcgatgtctaagcaacctgctaactgaggcagcagtggagactgtgggagggcaaatgcagctcagagatgagcgtgttgtggcagccttatttatccttctgcagttctttttccagaaacagcccagtctgctccctgagggcctttggctcctcaacaacctcactgcaaacagtcctagtttctgtacctccttgctctccctggatctgattgagcctctcttacagctgttgccagtatctaacgtggtgagcgtaatggtgctcacagttctgtgcaatgttgcagaaaagggtcctgcttactgccagcggctgtggccagggcccctgcttcccgccttgctgcacacactagccttttctgacactgaagtagtaggccagagtttggagctgctgcatctgctgttcctgtatcagccagaggctgttcaggtcttcctgcagcagtcagggctgcaagccctggaaaggcatcaggaagaggcccagctccaggatcgtgtgtatgctctccagcagacagctcttcaagggtgatcttgtttctcaatgtcactcattcccctctctcttaacatcaagcttgtttgtccagtagagcctttggagatttaggaccataatgaggtctcatgttctctgctcccacacctaagccaagacctttgggtcccagctcctccccttccactcagcactatccaggcaggaggaccaaaagggactcagtgtggtctacttactctggggccctagaatccctgcccccccgccacccttcatgtttgcttcagcagctggtagcttttgatgagacagaataaagttttatttttatattaagctactttgcctcagtggttgcacagtaaggggtagagggtagatgaggacaagaacaccctgagaaagtattttacagcacaagctttatgaggaataggagaacacatttttttcacattatactaagtccagcagagcccaggctctggggctgttgctcttaatcctcagtggaggcttcaggctttaccacttagaacgttctccagggctctggttacctgatcagcactgaagttgttcaaagggacattcgtctcttggccaaatgcgtagcgggcccagagcttgggctgcacatcggagcattcgcggattaggatgggtaggtcgggattcgccttcttcagctccacgtagcgtttctcaatgaagtccctgcggggccggagagagcgccgcgcgtgctgtgggcgggggcttccctcaacttcagggaggtcgaggtcgtgaccctggcgtcccgaagcccgcccgcctcaccacgccgcgcctcacctgacgccctggctgccgggcgagcgctgacataagtggatgcgaatctcacgcaggcccagctttgccccgactcctcgacttgctgcggccgc

SEQ ID NO: 406864 - DNA, 1467 bp, Homo sapiens
gggctggtacggtcggacagtttgggatgaagtgtttgccacctaatttagacttacttaaatataatagaagttatactgtagaaaacgcttatgaatgcagtgaatgcgggaaagccttcaaaaagaagtttcatttcattagacatgaaaaaaatcatacaaggaaaaaaccttttgaatgcaatgactgtggaaaagcctatagcaggaaggcacaccttgcaactcatcagaaaattcataatggagagagaccctttgtgtgcaatgattgtgggaaggcgtttatgcataaagcccaactcgtggtccaccagagacttcacactggagagaagccttatgagtgcagtcaatgtgggaaaacattcacttggaactcctcatttaatcaacacgtgaaatctcatacacttgagaagtcatttgaatgtaaggaatgtgggaaaaccttcaggtatagttcatccctttataaacattccagatttcatacaggagagaaaccctaccagtgtatcatatgtggcaaagcttttggcaacacatccgtgcttgttacacaccaaagaattcatacaggagagaaaccttacagttgtattgaatgtggcaaagccttcatcaagaagtcccatctcctcagacatcagataactcatacaggagagaagccctatgaatgtaacagatgtgggaaagcattttcccagaagtcaaatcttattgtacatcagaaaattcatacataatattcactttatgaatatgagaaggccttattaaatatttgctaaatcttattaaatactaaagaattcatggtgagaagtctacaatttaaatgaatttggaagagtagattcccataaaaaacaaccaatgccaatcatgttctggaagtgataataaactttttacagaaaatatgacagaaaacaactataaataatagagcataaagcttggaaagtaagcataacttaaaaaatcaaagaaccagtgaaaactacatttgccattcctgacttttaatttttataataaaataattatgcaagtgtgagtttaaaatatatgcttatacattatattaaagtatgcctattaacagtttctgcagtaaataacattttttcttccagtctcaacatacataattaatcaagtgagaaaatgtgttttaatatgtcatatgaatttcagtgatattttcatccatttgctggcacttttaatgggcatgacagtgtttctgaatctgagtctcctttaattatacaagtgaagacttcttattaaaattaatataaagatattttcctatgtatgtaaataccagaacaaaaaacaagacactaattgaggagagaaaggcacttgtattctgtattacagtaagtattcagttgaggaaaagaattatttaaatatgtaaataaataatttgcacttcaaaaaatt

SEQ ID NO: 406865 - DNA, 385 bp, Homo sapiens
ttccgcacacgcgtagtaggacggtagccggtattcaatcttcaaatcagcgccgcgggaagtgcgggcgggtgttgctcccctgtctctggacgacgctgtgactgatcccaggcttggagccggagctgcgagcgaggcagtgaaagggtggcaggtatggctttgctggactcggaggacgtaagagaaaggcggggactggcttctaggtttaccctaccgaagataaaactttagtctccaagcgcagtgacttcaggtttggatatgtgggtcctgttcaactcgagtagctgagagaaagcaagagttgggctccgactggcactgggtagatgtccagggctctggtgggactgggagaggctcaatttgcattcct

SEQ ID NO: 406866 - DNA, 2030 bp, Homo sapiens
ttccgcacacgcgtagtaggacggtagccggtattcaatcttcaaatcagcgccgcgggaagtgcgggcgggtgttgctcccctgtctctggacgacgctgtgactgatcccaggcttggagccggagctgcgagcgaggcagtgaaagggtggcagatttctgtgtaagagctgcagaaaatgatcagcttccaggaatcagtgacattccaggatgtggctgtggatttcactgcagaggagtggcagctgcttgattgtgctgagagaaccctgtattgggatgtgatgttggagaactatagaaacctcatctcagtgggatgtccaattaccaaaacaaaagtgatcctcaaggtagagcaaggacaagagccatggatggtggagggagcgaatccacacgagagctctccagaatctgactacccacttgttgatgaaccagggaagcatcgggaaagcaaagacaattttttgaagtcagttttgctcacattcaataaaattctgactatggagagaatccaccattataatatgagcacaagtcttaatccaatgagaaaaaaatcatataaatcgtttgagaagtgtttgccacctaatttagacttacttaaatataatagaagttatactgtagaaaacgcttatgaatgcagtgaatgcgggaaagccttcaaaaagaagtttcatttcattagacatgaaaaaaatcatacaaggaaaaaaccttttgaatgcaatgactgtggaaaagcctatagcaggaaggcacaccttgcaactcatcagaaaattcataatggagagagaccctttgtgtgcaatgattgtgggaaggcgtttatgcataaagcccaactcgtggtccaccagagacttcacactggagagaagccttatgagtgcagtcaatgtgggaaaacattcacttggaactcctcatttaatcaacacgtgaaatctcatacacttgagaagtcatttgaatgtaaggaatgtgggaaaaccttcaggtatagttcatccctttataaacattccagatttcatacaggagagaaaccctaccagtgtatcatatgtggcaaagcttttggcaacacatccgtgcttgttacacaccaaagaattcatacaggagagaaaccttacagttgtattgaatgtggcaaagccttcatcaagaagtcccatctcctcagacatcagataactcatacaggagagaagccctatgaatgtaacagatgtgggaaagcattttcccagaagtcaaatcttattgtacatcagaaaattcatacataatattcactttatgaatatgagaaggccttattaaatatttgctaaatcttattaaatactaaagaattcatggtgagaagtctacaatttaaatgaatttggaagagtagattcccataaaaaacaaccaatgccaatcatgttctggaagtgataataaactttttacagaaaatatgacagaaaacaactataaataatagagcataaagcttggaaagtaagcataacttaaaaaatcaaagaaccagtgaaaactacatttgccattcctgacttttaatttttataataaaataattatgcaagtgtgagtttaaaatatatgcttatacattatattaaagtatgcctattaacagtttctgcagtaaataacattttttcttccagtctcaacatacataattaatcaagtgagaaaatgtgttttaatatgtcatatgaatttcagtgatattttcatccatttgctggcacttttaatgggcatgacagtgtttctgaatctgagtctcctttaattatacaagtgaagacttcttattaaaattaatataaagatattttcctatgtatgtaaataccagaacaaaaaacaagacactaattgaggagagaaaggcacttgtattctgtattacagtaagtattcagttgaggaaaagaattatttaaatatgtaaataaataatttgcacttcaaaaaatt

SEQ ID NO: 406867 - DNA, 513 bp, Homo sapiens
tgattctcttgcaagttcgctagtgatacacactttagtttgaagataaatgtgctgttacaggaatcagtgacattccaggatgtggctgtggatttcactgcagaggagtggcagctgcttgattgtgctgagagaaccctgtattgggatgtgatgttggagaactatagaaacctcatctcagtgggtaaggacaatgagtggtaacttttcagtgtaattcagtgtatactaatagtgctcattttttaagacttgggaacgtttgccaattgtggtcgctcatgcttataatcccagcactttgggaggcaggagaattgcttgagcccaggatttcaagaccagcctgagcaacgttgtgagactgtctcaacaaaatttagctaggtgtggtggtacatgcctgttgtcccagctacttgggaggctgaggtggaaggatcgcttgagcctaggtgtaccactgcattccagcctgggtgacagagtgagaccctatctcaaaaa

SEQ ID NO: 406868 - DNA, 1991 bp, Homo sapiens
ttccgcacacgcgtagtaggacggtagccggtattcaatcttcaaatcagcgccgcgggaagtgcgggcgggtgttgctcccctgtctctggacgacgctgtgactgatcccaggcttggagccggagctgcgagcgaggcagtgaaagggtggcaggaatcagtgacattccaggatgtggctgtggatttcactgcagaggagtggcagctgcttgattgtgctgagagaaccctgtattgggatgtgatgttggagaactatagaaacctcatctcagtgggatgtccaattaccaaaacaaaagtgatcctcaaggtagagcaaggacaagagccatggatggtggagggagcgaatccacacgagagctctccagaatctgactacccacttgttgatgaaccagggaagcatcgggaaagcaaagacaattttttgaagtcagttttgctcacattcaataaaattctgactatggagagaatccaccattataatatgagcacaagtcttaatccaatgagaaaaaaatcatataaatcgtttgagaagtgtttgccacctaatttagacttacttaaatataatagaagttatactgtagaaaacgcttatgaatgcagtgaatgcgggaaagccttcaaaaagaagtttcatttcattagacatgaaaaaaatcatacaaggaaaaaaccttttgaatgcaatgactgtggaaaagcctatagcaggaaggcacaccttgcaactcatcagaaaattcataatggagagagaccctttgtgtgcaatgattgtgggaaggcgtttatgcataaagcccaactcgtggtccaccagagacttcacactggagagaagccttatgagtgcagtcaatgtgggaaaacattcacttggaactcctcatttaatcaacacgtgaaatctcatacacttgagaagtcatttgaatgtaaggaatgtgggaaaaccttcaggtatagttcatccctttataaacattccagatttcatacaggagagaaaccctaccagtgtatcatatgtggcaaagcttttggcaacacatccgtgcttgttacacaccaaagaattcatacaggagagaaaccttacagttgtattgaatgtggcaaagccttcatcaagaagtcccatctcctcagacatcagataactcatacaggagagaagccctatgaatgtaacagatgtgggaaagcattttcccagaagtcaaatcttattgtacatcagaaaattcatacataatattcactttatgaatatgagaaggccttattaaatatttgctaaatcttattaaatactaaagaattcatggtgagaagtctacaatttaaatgaatttggaagagtagattcccataaaaaacaaccaatgccaatcatgttctggaagtgataataaactttttacagaaaatatgacagaaaacaactataaataatagagcataaagcttggaaagtaagcataacttaaaaaatcaaagaaccagtgaaaactacatttgccattcctgacttttaatttttataataaaataattatgcaagtgtgagtttaaaatatatgcttatacattatattaaagtatgcctattaacagtttctgcagtaaataacattttttcttccagtctcaacatacataattaatcaagtgagaaaatgtgttttaatatgtcatatgaatttcagtgatattttcatccatttgctggcacttttaatgggcatgacagtgtttctgaatctgagtctcctttaattatacaagtgaagacttcttattaaaattaatataaagatattttcctatgtatgtaaataccagaacaaaaaacaagacactaattgaggagagaaaggcacttgtattctgtattacagtaagtattcagttgaggaaaagaattatttaaatatgtaaataaataatttgcacttcaaaaaatt

SEQ ID NO: 406869 - DNA, 2087 bp, Homo sapiens
tgtcggagttctgtctgggcctattcgggtccgagttcggaatttcggttcaaggcccagttcctcggattgttcctgcgcaacttcagtttcccttccaggcacgggcaatgagtgtttggccgcgacgagttggaaagcccggatgcgtccttcggttgggcggggtgtctcagtgacgtcactgggggtataaaagggcctgggtggcgggcgcctgggcagagcgtcctagcagtgtcactgcgtgggtcactgcgtgttggtttgtgtagagaggcgtgagcgagcccgttgtccggagtgcacctgctgcctgttctgtccctcccgggagcccccgccgctgtcgccgtcgagtcgccatggaagtgcagaaagaggcacagcgcatcatgaccctgtcggtgtggaagatgtatcactcccgcatgcagcgcggtggcctgcggctgcaccggagtctgcagctgtcgctggtcatgcgcagcgcccgggagctctacctctcggccaaggtggaggccctcgagcccgaggtgtcgttgccggccgccctcccctctgaccctcgcctgcacccgccccgagaagccgagtccacggccgagacagcgacccccgacggtgagcacccgtttccggagccaatggacacgcaggaggcgccgacagccgaggagacctccgcctgctgtgccccgcgccccgccaaagtcagccgcaaacgacgcagcagcagcctgagcgacggcggggacgctggactggtcccgagcaagaaagcccgtctggaagaaaaggaagaagaggagggagcgtcatccgaagtcgccgatcgcctgcagccccctccggcgcaagcggagggcgcctttcccaacctggcccgcgtcctgcagaggcgcttctccggcctcctgaactgcagccccgcggcccctccgacggcgccgcccgcgtgcgaggcaaagcccgcttgccgcccggcggacagcatgctcaacgtgctcgtgcgggccgtggtggccttctgaggaccccgagcggcgctgccggagcccagagcgcgcgtcgaaccgtcggcccgagggcgcagacctgaggcgaggccacccccctccatcctgggggaagcgcccgcgaaaaccgtggagagaagccgccgcccgggctgctgagaggcccggagagggactctgtccccggggagccatcgccttcagtgtgcagggacggcaccgaggagtctgagccgggggcgcgggcgccttccgcagagacctgcgcccacaggtgctgtcttagtggactgggacgtgaacctttcgctctccttctggactgggagaagggaggcttgggtgttgtgttttttgttttgtttgtttgtttgtttttaaagatctcctcagggtcggacttcattttgtactgtgggctgtgctggccctttcaaggtttttcaagagttggttttgcgtttccaacctcggagaattccaggcactccccttccccctccgctgacatacttgtataagcggtcatcgttgcgtcatggggcaggcgtggggagcttcctgtcgccttgcgtgggtgtggggcctgggaggaggtcctggggcgtgcacccgccctgggcagtggggaggagagtggcctgagttacttcacccccgcgtgctgctggttaatgtcccgcgtctctgcaccttcgggtgggagcggggactgatctactttcacattctcaagtttttctcatctgcattagaggtgcccagtaggttcccaggttccagcgtgcccctccctcagacacacggacacaatcagccgagaagttcctggtctgaatcacgagaatgtggaggggtggggggtgtcagtggaaaggcataaggctgagctgagaccagttgctggtgaaactgggccaatctggggaggggaacatccttgccagggagtttctgagggtctgctttgtttacctttcgtgcggtggattctttttaactccgtctacctggcgttttgttagaaatgtcagataggaaaataaaaaccatttgagtaaaaaa

SEQ ID NO: 406870 - DNA, 3261 bp, Homo sapiens
gggggcggggggcgcaccaccccttaaagggcccgcaccaggaatgaatggagccattcgaacaattctgcatcctatttttggaggaagtggaattagtatttcttggagagacggcgcgtagcggagggtagggcggagattttctatctgctctgtctctgcattgctgggtttccagctcccaacctaaccccgcctccccgaacgcggagacggaactcggcccccttgtttggggggcggcagccacgtgttcacggggactgtcgtgcgcgccgggttcgcagccgtgcgagctctgaacccacccgtggagctcctgtcgcgggaaactgcgggggaatggcttggtacgaatcacgggaacccgtagcccggggcgggtcaccgcctacaagcaagggctggcgtacgctagagaccgaagagctggaggccccagtggccccctttcacagcagtagcaaatattgtttgtttagtaaatattggcctagtgactctgccttggtttccccacttgaaggaagcagatagaacagtatcctccgaggagtggaggctggggatcggtgaattattgataaaaggagagctcttaacctagcctggcacgttgtaagcgctgttagcatgattattggtgcagaaaacactcattagacacacctggtaaatgctaagaacagtggccacaggggatgttcaggctggaacccgggtcttcccctgtgtgaagggaaacttgctgcccacgacccactggggcctccagacgggagcatgtgggtaggccgtgagctccacccccggcccccctcccttgggccaaggcgctgatgcatcggcggggctcagagaaaggagcccacccagaaagctcagcgtggagtcgggggacgctcctcctcgccagggttcccgtcccctttccctgctgggtaaatcgcattctgtctctttaaggagtgtttggccgcgacgagttggaaagcccggatgcgtccttcggttgggcggggtgtctcagtgacgtcactgggggtataaaagggcctgggtggcgggcgcctgggcagagcgtcctagcagtgtcactgcgtgggtcactgcgtgttggtttgtgtagagaggcgtgagcgagcccgttgtccggagtgcacctgctgcctgttctgtccctcccgggagcccccgccgctgtcgccgtcgagtcgccatggaagtgcagaaagaggcacagcgcatcatgaccctgtcggtgtggaagatgtatcactcccgcatgcagcgcggtggcctgcggctgcaccggagtctgcagctgtcgctggtcatgcgcagcgcccgggagctctacctctcggccaaggtggaggccctcgagcccgaggtgtcgttgccggccgccctcccctctgaccctcgcctgcacccgccccgagaagccgagtccacggccgagacagcgacccccgacggtgagcacccgtttccggagccaatggacacgcaggaggcgccgacagccgaggagacctccgcctgctgtgccccgcgccccgccaaagtcagccgcaaacgacgcagcagcagcctgagcgacggcggggacgctggactggtcccgagcaagaaagcccgtctggaagaaaaggaagaagaggagggagcgtcatccgaagtcgccgatcgcctgcagccccctccggcgcaagcggagggcgcctttcccaacctggcccgcgtcctgcagaggcgcttctccggcctcctgaactgcagccccgcggcccctccgacggcgccgcccgcgtgcgaggcaaagcccgcttgccgcccggcggacagcatgctcaacgtgctcgtgcgggccgtggtggccttctgaggaccccgagcggcgctgccggagcccagagcgcgcgtcgaaccgtcggcccgagggcgcagacctgaggcgaggccacccccctccatcctgggggaagcgcccgcgaaaaccgtggagagaagccgccgcccgggctgctgagaggcccggagagggactctgtccccggggagccatcgccttcagtgtgcagggacggcaccgaggagtctgagccgggggcgcgggcgccttccgcagagacctgcgcccacaggtgctgtcttagtggactgggacgtgaacctttcgctctccttctggactgggagaagggaggcttgggtgttgtgttttttgttttgtttgtttgtttgtttttaaagatctcctcagggtcggacttcattttgtactgtgggctgtgctggccctttcaaggtttttcaagagttggttttgcgtttccaacctcggagaattccaggcactccccttccccctccgctgacatacttgtataagcggtcatcgttgcgtcatggggcaggcgtggggagcttcctgtcgccttgcgtgggtgtggggcctgggaggaggtcctggggcgtgcacccgccctgggcagtggggaggagagtggcctgagttacttcacccccgcgtgctgctggttaatgtcccgcgtctctgcaccttcgggtgggagcggggactgatctactttcacattctcaagtttttctcatctgcattagaggtgcccagtaggttcccaggttccagcgtgcccctccctcagacacacggacacaatcagccgagaagttcctggtctgaatcacgagaatgtggaggggtggggggtgtcagtggaaaggcataaggctgagctgagaccagttgctggtgaaactgggccaatctggggaggggaacatccttgccagggagtttctgagggtctgctttgtttacctttcgtgcggtggattctttttaactccgtctacctggcgttttgttagaaatgtcagataggaaaataaaaaccatttgagtaaaaaaaaaaaaaaaaaaaaaaaaaaaaaaaaaaattttggggccggcttgggcccttgaaaagagttttttataaaccaattctcgggttgggcggcgggggacccatatatggtgttatgtgaactgtggcaataacggggttccctaaggagaaaccgtgcgccatggactaggggcgtggcttctctccacaaataaaaaaaacggccggggggaaaaccgggggtctggaacaacttccagaggggggctccggagggcacaatacagggctcttcacagggggggtcaagcgagccgagtattaaaataagccggag

SEQ ID NO: 406871 - DNA, 1080 bp, Homo sapiens
ccttgattctgcaatagtcgactctatgaggatacccttactgtttcactcttaaggagagcgcgcgtcgaaccgtcggcccgagggcgcagacctgaggcgaggccacccccctccatcctgggggaagcgcccgcgaaaaccgtggagagaagccgccgcccgggctgctgagaggcccggagagggactctgtccccggggagccatcgccttcagtgtgcagggacggcaccgaggagtctgagccgggggcgcgggcgccttccgcagagacctgcgcccacaggtgctgtcttagtggactgggacgtgaacctttcgctctccttctggactgggagaagggaggcttgggtgttgtgttttttgttttgtttgtttgtttgtttttaaagatctcctcagggtcggacttcattttgtactgtgggctgtgctggccctttcaaggtttttcaagagttggttttgcgtttccaacctcggagaattccaggcactccccttccccctccgctgacatacttgtataagcggtcatcgttgcgtcatggggcaggcgtggggagcttcctgtcgccttgcgtgggtgtggggcctgggaggaggtcctggggcgtgcacccgccctgggcagtggggaggagagtggcctgagttacttcacccccgcgtgctgctggttaatgtcccgcgtctctgcaccttcgggtgggagcggggactgatctactttcacattctcaagtttttctcatctgcattagaggtgcccagtaggttcccaggttccagcgtgcccctccctcagacacacggacacaatcagccgagaagttcctggtctgaatcacgagaatgtggaggggtggggggtgtcagtggaaaggcataaggctgagctgagaccagttgctggtgaaactgggccaatctggggaggggaacatccttgccagggagtttctgagggtctgctttgtttacctttcgtgcggtggattctttttaactccgtctacctggcgttttgttagaaatgtcagataggaaaataaaaaccatttgagtaaaaaa

SEQ ID NO: 406872 - DNA, 283 bp, Homo sapiens
cctaacgagcccttccgtaacagccttccgtaacagcgcctcctaacccctccgtaacagcgcccagtggtggggtggggggtgtcagtggaaaggcataaggctgagctgagaccagttgctggtgaaactgggccaatctggggaggggaacatccttgccagggagtttctgagggtctgctttgtttacctttcgtgcggtggattctttttaactccgtctacctggcgttttgttagaaatgtcagataggaaaataaaaaccatttgagtaaaaaa

SEQ ID NO: 406873 - DNA, 1560 bp, Homo sapiens
gggggcggggggcgcaccaccccttaaagggcccgcaccaggaatgaatggagccattcgaacaattctgcatcctatttttggaggaagtggaattagtatttcttggagagacggcgcgtagcggagggtagggcggagattttctatctgctctgtctctgcattgctgggtttccagctcccaacctaaccccgcctccccgaacgcggagacggaactcggcccccttgtttggggggcggcagccacgtgttcacggggactgtcgtgcgcgccgggttcgcagccgtgcgagctctgaacccacccgtggagctcctgtcgcgggaaactgcgggggaatggcttggtacgaatcacgggaacccgtagcccggggcgggtcaccgcctacaagcaagggctggcgtacgctagagaccgaagagctggaggccccagtggccccctttcacagcagtagcaaatattgtttgtttagtaaatattggcctagtgactctgccttggtttccccacttgaaggaagcagatagaacagtatcctccgaggagtggaggctggggatcggtgaattattgataaaaggagagctcttaacctagcctggcacgttgtaagcgctgttagcatgattattggtgcagaaaacactcattagacacacctggtaaatgctaagaacagtggccacaggggatgttcaggctggaacccgggtcttcccctgtgtgaagggaaacttgctgcccacgacccactggggcctccagacgggagcatgtgggtaggccgtgagctccacccccggcccccctcccttgggccaaggcgctgatgcatcggcggggctcagagaaaggagcccacccagaaagctcagcgtggagtcgggggacgctcctcctcgccagggttcccgtcccctttccctgctgggtaaatcgcattctgtctctttaaggagtgtttggccgcgacgagttggaaagcccggatgcgtccttcggttgggcggggtgtctcagtgacgtcactgggggtataaaagggcctgggtggcgggcgcctgggcagagcgtcctagcagtgtcactgcgtgggggaacatccttgccagggagtttctgagggtctgctttgtttacctttcgtgcggtggattctttttaactccgtctacctggcgttttgttagaaatgtcagataggaaaataaaaaccatttgagtaaaaaaaaaaaaaaaaaaaaaaaaaaaaaaaaaaattttggggccggcttgggcccttgaaaagagttttttataaaccaattctcgggttgggcggcgggggacccatatatggtgttatgtgaactgtggcaataacggggttccctaaggagaaaccgtgcgccatggactaggggcgtggcttctctccacaaataaaaaaaacggccggggggaaaaccgggggtctggaacaacttccagaggggggctccggagggcacaatacagggctcttcacagggggggtcaagcgagccgagtattaaaataagccggag

SEQ ID NO: 406874 - DNA, 2944 bp, Homo sapiens
gggggcggggggcgcaccaccccttaaagggcccgcaccaggaatgaatggagccattcgaacaattctgcatcctatttttggaggaagtggaattagtatttcttggagagacggcgcgtagcggagggtagggcggagattttctatctgctctgtctctgcattgctgggtttccagctcccaacctaaccccgcctccccgaacgcggagacggaactcggcccccttgtttggggggcggcagccacgtgttcacggggactgtcgtgcgcgccgggttcgcagccgtgcgagctctgaacccacccgtggagctcctgtcgcgggaaactgcgggggaatggcttggtacgaatcacgggaacccgtagcccggggcgggtcaccgcctacaagcaagggctggcgtacgctagagaccgaagagctggaggccccagtggccccctttcacagcagtagcaaatattgtttgtttagtaaatattggcctagtgactctgccttggtttccccacttgaaggaagcagatagaacagtatcctccgaggagtggaggctggggatcggtgaattattgataaaaggagagctcttaacctagcctggcacgttgtaagcgctgttagcatgattattggtgcagaaaacactcattagacacacctggtaaatgctaagaacagtggccacaggggatgttcaggctggaacccgggtcttcccctgtgtgaagggaaacttgctgcccacgacccactggggcctccagacgggagcatgtgggtaggccgtgagctccacccccggcccccctcccttgggccaaggcgctgatgcatcggcggggctcagagaaaggagcccacccagaaagctcagcgtggagtcgggggacgctcctcctcgccagggttcccgtcccctttccctgctgggtaaatcgcattctgtctctttaaggagtgtttggccgcgacgagttggaaagcccggatgcgtccttcggttgggcggggtgtctcagtgacgtcactgggggtataaaagggcctgggtggcgggcgcctgggcagagcgtcctagcagtgtcactgcgtgggtcactgcgtgttggtttgtgtagagaggcgtgagcgagcccgttgtccggagtgcacctgctgcctgttctgtccctcccgggagcccccgccgctgtcgccgtcgagtcgccatggaagtgcagaaagaggcacagcgcatcatgaccctgtcggtgtggaagatgtatcactcccgcatgcagcgcggtggcctgcggctgcaccggagtctgcagctgtcgctggtcatgcgcagcgcccgggagctctacctctcggccaaggtggaggccctcgagcccgaggtgtcgttgccggccgccctcccctctgaccctcgcctgcacccgccccgagaagccgagtccacggccgagacagcgacccccgacggtgagcacccgtttccggagccaatggacacgcaggaggcgccgacagccgaggagacctccgcctgctgtgccccgcgccccgccaaagtcagccgcaaacgacgcagcagcagcctgagcgacggcggggacgctggactggtcccgagcaagaaagcccgtctggaagaaaaggaagaagaggagggagcgtcatccgaagtcgccgatcgcctgcagccccctccggcgcaagcggagggcgcctttcccaacctggcccgcgtcctgcagaggcgcttctccggcctcctgaactgcagccccgcggcccctccgacggcgccgcccgcgtgcgaggcaaagcccgcttgccgcccggcggacagcatgctcaacgtgctcgtgcgggccgtggtggccttctgaggaccccgagcggcgctgccggagcccagagcgcgcgtcgaaccgtcggcccgagggcgcagacctgaggcgaggccacccccctccatcctgggggaagcgcccgcgaaaaccgtggagagaagccgccgcccgggctgctgagaggcccggagagggactctgtccccggggagccatcgccttcagtgtgcagggacggcaccgaggagtctgagccgggggcgcgggcgccttccgcagagacctgcgcccacaggtgctgtcttagtggactgggacgtgaacctttcgctctccttctggactgggagaagggaggcttgggtgttgtgttttttgttttgtttgtttgtttgtttttaaagatctcctcagggtcggacttcattttgtactgtgggctgtgctggccctttcaaggtttttcaagagttggttttgcgtttccaacctcggagaattccaggcactccccttccccctccgctgacatacttgtataagcggtcatcgttgcgtcatggggcaggcgtggggagcttcctgtcgccttgcgtgggtgtggggcctgggaggaggtcctggggcgtgcacccgccctgggcagtggggaggagagtggcctgagttacttcacccccgcgtgctgctggttaatgtcccgcgtctctgcaccttcgggtgggagcggggactgatctactttcacattctcaagtttttctcatctgcattagaggtgcccagtaggttcccaggttccagcgtgcccctccctcagacacacggacacaatcagccgagaagttcctggtctgaatcacgagaatgtggaggggtggggggtgtcagtggaaaggcataaggctgagctgagaccagttgctggtgaaactgggccaatctggggaggggaacatccttgccagggagtttctgagggtctgctttgtttacctttcgtgcggtggattctttttaactccgtctacctggcgttttgttagaaatgtcagataggaaaataaaaaccatttgagtaaaaaa

SEQ ID NO: 406875 - DNA, 1912 bp, Homo sapiens
gaacataattccggcctaaagggtttagagagcccccctggggatttaagaaagtaccaggtgcacgatggttgccgtcactgcgtgttggtttgtgtagagaggcgtgagcgagcccgttgtccggagtgcacctgctgcctgttctgtccctcccgggagcccccgccgctgtcgccgtcgagtcgccatggaagtgcagaaagaggcacagcgcatcatgaccctgtcggtgtggaagatgtatcactcccgcatgcagcgcggtggcctgcggctgcaccggagtctgcagctgtcgctggtcatgcgcagcgcccgggagctctacctctcggccaaggtggaggccctcgagcccgaggtgtcgttgccggccgccctcccctctgaccctcgcctgcacccgccccgagaagccgagtccacggccgagacagcgacccccgacggtgagcacccgtttccggagccaatggacacgcaggaggcgccgacagccgaggagacctccgcctgctgtgccccgcgccccgccaaagtcagccgcaaacgacgcagcagcagcctgagcgacggcggggacgctggactggtcccgagcaagaaagcccgtctggaagaaaaggaagaagaggagggagcgtcatccgaagtcgccgatcgcctgcagccccctccggcgcaagcggagggcgcctttcccaacctggcccgcgtcctgcagaggcgcttctccggcctcctgaactgcagccccgcggcccctccgacggcgccgcccgcgtgcgaggcaaagcccgcttgccgcccggcggacagcatgctcaacgtgctcgtgcgggccgtggtggccttctgaggaccccgagcggcgctgccggagcccagagcgcgcgtcgaaccgtcggcccgagggcgcagacctgaggcgaggccacccccctccatcctgggggaagcgcccgcgaaaaccgtggagagaagccgccgcccgggctgctgagaggcccggagagggactctgtccccggggagccatcgccttcagtgtgcagggacggcaccgaggagtctgagccgggggcgcgggcgccttccgcagagacctgcgcccacaggtgctgtcttagtggactgggacgtgaacctttcgctctccttctggactgggagaagggaggcttgggtgttgtgttttttgttttgtttgtttgtttgtttttaaagatctcctcagggtcggacttcattttgtactgtgggctgtgctggccctttcaaggtttttcaagagttggttttgcgtttccaacctcggagaattccaggcactccccttccccctccgctgacatacttgtataagcggtcatcgttgcgtcatggggcaggcgtggggagcttcctgtcgccttgcgtgggtgtggggcctgggaggaggtcctggggcgtgcacccgccctgggcagtggggaggagagtggcctgagttacttcacccccgcgtgctgctggttaatgtcccgcgtctctgcaccttcgggtgggagcggggactgatctactttcacattctcaagtttttctcatctgcattagaggtgcccagtaggttcccaggttccagcgtgcccctccctcagacacacggacacaatcagccgagaagttcctggtctgaatcacgagaatgtggaggggtggggggtgtcagtggaaaggcataaggctgagctgagaccagttgctggtgaaactgggccaatctggggaggggaacatccttgccagggagtttctgagggtctgctttgtttacctttcgtgcggtggattctttttaactccgtctacctggcgttttgttagaaatgtcagataggaaaataaaaaccatttgagtaaaaaa

SEQ ID NO: 406876 - DNA, 2547 bp, Homo sapiens
gggggcggggggcgcaccaccccttaaagggcccgcaccaggaatgaatggagccattcgaacaattctgcatcctatttttggaggaagtggaattagtatttcttggagagacggcgcgtagcggagggtagggcggagattttctatctgctctgtctctgcattgctgggtttccagctcccaacctaaccccgcctccccgaacgcggagacggaactcggcccccttgtttggggggcggcagccacgtgttcacggggactgtcgtgcgcgccgggttcgcagccgtgcgagctctgaacccacccgtggagctcctgtcgcgggaaactgcgggggaatggcttggtacgaatcacgggaacccgtagcccggggcgggtcaccgcctacaagcaagggctggcgtacgctagagaccgaagagctggaggccccagtggccccctttcacagcagtagcaaatattgtttgtttagtaaatattggcctagtgactctgccttggtttccccacttgaaggaagcagatagaacagtatcctccgaggagtggaggctggggatcggtgaattattgataaaaggagagctcttaacctagcctggcacgttgtaagcgctgttagcatgattattggtgcagaaaacactcattagacacacctggtaaatgctaagaacagtggccacaggggatgttcaggctggaacccgggtcttcccctgtgtgaagggaaacttgctgcccacgacccactggggcctccagacgggagcatgtgggtaggccgtgagctccacccccggcccccctcccttgggccaaggcgctgatgcatcggcggggctcagagaaaggagcccacccagaaagctcagcgtggagtcgggggacgctcctcctcgccagggttcccgtcccctttccctgctgggtaaatcgcattctgtctctttaaggagtgtttggccgcgacgagttggaaagcccggatgcgtccttcggttgggcggggtgtctcagtgacgtcactgggggtataaaagggcctgggtggcgggcgcctgggcagagcgtcctagcagtgtcactgcgtgggtcactgcgtgttggtttgtgtagagaggcgtgagcgagcccgttgtccggagtgcacctgctgcctgttctgtccctcccgggagcccccgccgctgtcgccgtcgagtcgccatggaagtgcagaaagaggcacagcgcatcatgaccctgtcggtgtggaagatgtatcactcccgcatgcagcgcggtggcctgcggctgcaccggagtctgcagctgtcgctggtcatgcgcagcgcccgggagctctacctctcggccaaggtggaggccctcgagcccgaggtgtcgttgccggccgccctcccctctgaccctcgcctgcacccgccccgagaagccgagtccacggccgagacagcgacccccgacggtgagcacccgtttccggagccaatggacacgcaggaggcgccgacagccgaggagacctccgcctgctgtgccccgcgccccgccaaagtcagccgcaaacgacgcagcagcagcctgagcgacggcggggacgctggactggtcccgagcaagaaagcccgtctggaagaaaaggaagaagaggagggagcgtcatccgaagtcgccgatcgcctgcagccccctccggcgcaagcggagggcgccttccgcagagacctgcgcccacaggtgctgtcttagtggactgggacgtgaacctttcgctctccttctggactgggagaagggaggcttgggtgttgtgttttttgttttgtttgtttgtttgtttttaaagatctcctcagggtcggacttcattttgtactgtgggctgtgctggccctttcaaggtttttcaagagttggttttgcgtttccaacctcggagaattccaggcactccccttccccctccgctgacatacttgtataagcggtcatcgttgcgtcatggggcaggcgtggggagcttcctgtcgccttgcgtgggtgtggggcctgggaggaggtcctggggcgtgcacccgccctgggcagtggggaggagagtggcctgagttacttcacccccgcgtgctgctggttaatgtcccgcgtctctgcaccttcgggtgggagcggggactgatctactttcacattctcaagtttttctcatctgcattagaggtgcccagtaggttcccaggttccagcgtgcccctccctcagacacacggacacaatcagccgagaagttcctggtctgaatcacgagaatgtggaggggtggggggtgtcagtggaaaggcataaggctgagctgagaccagttgctggtgaaactgggccaatctggggaggggaacatccttgccagggagtttctgagggtctgctttgtttacctttcgtgcggtggattctttttaactccgtctacctggcgttttgttagaaatgtcagataggaaaataaaaaccatttgagtaaaaaa

SEQ ID NO: 406877 - DNA, 1048 bp, Homo sapiens
gagagcttagagtgtatttttattcttttttttccatttccttttctcttttcatcttttttctttctttctttctttcctttttttcctttgtatttttatcttaacatgcctagacagagaagaacactggattgtacataatgggctttctttgactctcttttccagagtggaaataggattctgtgctccatcattctgagccatcaccaggggccgtccataatcaactatgatgatgagagtgggaagacatgtgtacatatcgcagcggcagcgggcttcagcgatattattcatgagctggcaagagtccctgagtgtaacctgcaggctctggatgtggatgacaggtatccatggtaaccagaaagtgctgggaaactagtcatttccccctaactgaatcttaaaataaaggagatgtttaaggaggtgtcctatacagctatatccctattgccagtaatacacatgggcttgtgacaataaaaattgctctattttagtgagaggagaaaaaattattgttatggagaggaagactgcgactgtacagtgttgtcagattttccactttttgctaaatgttctctgtgttctcagaagacgttctgtatttcagcttcctgctatgtgccctctttgttcctaaaggtaggttttggttgttttttttttcttcattcttggattatgttataaagtccacaagttcttttatccagagaagaacataatagagactttgtattctggactattgggcttttagaactgcaaggaactgtatcaggttgttgttgttttcgatcatcaaagatgtattgtctgaaaaaggaagctaggtccaaaaaggtaaaaagacttctgtcagagctagttagatactaaatgaagatttgtacacctgtctttcaaacttgtagcttttcatctataatgccctgcttatctaaactgttttggttaggcactgagtcaatggaaatgtaagaaaaatataacaacaaacaagactatcgaaaataagtatagacttgag

SEQ ID NO: 406878 - DNA, 772 bp, Homo sapiens
  misc_feature (52)..(52): n is a, c, g, or t
ttatggatacgtaagttaacttaaaatgagtgagaagaaaaggagaccgtgnggacaaaattttcagcatctttccccaaacagacacaaaatcagggatcttcctttcactcggaacaacctagctcccctaccagatcaaaaatttctatctggagaacctctgcggacaaaccgagtgcttcctgcaattccaagtcaacgaagacacagcacagcagcagaagagagtgaacattctgccaaccccaccagtgatgaaaattaactgtgggccactcgctgcagaaatgtagatgaatatgtattttcaactctcaaaggacaagattactccagtttgtaagaacgaagaccaatttagtaagctgcattctataagccatcagttttataactcgaaattctttattccaaataaagatactccctaaataagcacttagaatatttgggtgtgcatattaagtctgtgaatttctgtgacttccacatgccaaaattaaaagacaaaatatgttatcagtaggaaaactgagctatgtttggtttgctttgtggcatgtgcactgtttttttgttattgttctttggttgtttttttgctgaatgattttatgttttgggaaaaaaagtacgctttgctgaataaaaggcaaaaaacaaaacaaaaaaaaaaccacatcccagacaaacatgtcttcacatttattgtcattctaacttgaactaatgaaacctatttaaaaataaattcctatgatcagtcaca

SEQ ID NO: 406879 - DNA, 1908 bp, Homo sapiens
gagagcttagagtgtatttttattcttttttttccatttccttttctcttttcatcttttttctttctttctttctttcctttttttcctttgtatttttatcttaacatgcctagacagagaagaacactggattgtacataatgggctttctttgactctcttttccagagtggaaataggattctgtgctccatcattctgagccatcaccaggggccgtccataatcaactatgatgatgagagtgggaagacatgtgtacatatcgcagcggcagcgggcttcagcgatattattcatgagctggcaagagtccctgagtgtaacctgcaggctctggatgtggatgacaggacacctctgcactgggctgcagctgcagggaaggccgaatgtgtccagtcactgctggagttgggaatggacagcaacctgcgggacatcaatgagagcacgcccttggcctatgccctgtactgcggtcacacggcgtgtgtcaaactcctctcccaagagagcagaacagagcctactcgaccccctccctcccagagcagtcggccccagaagaaggagagacggttcaacgtgctcaaccaaatattctgcaaaaacaagaaagaagagcagagagcccatcagaaggatcccagcagggaccgatacagagaggaggacacctcagaagtcaatgacatcatcaccacctttgatagcatcgtgggtaccaactgccaagaacagcctggtgatcaggtggctatggttgaatttaagaagaaaacctcagacaattcaaaatatctcttaccagaaaagaaaccgctggcccgtaaggggcttccaccaatcagaacgcagagtctcccacccatcaccctgggcaataacttcctaacagcctcccatagggccacttcccatgcaggcctgagctctgctcctcatcatatggcccagcgatctcagaaaagtcgaagtgagcaggatttattaaataacagaactggctgccagatgttactagataacccctggaagagtgattctaatcaggtattttcctacaaagtttggactgtgtcttcttctgataagctgctggacagattgctcagtgtccggcctggtcaccaagaggtctccgtgccaccacaccttcgccatctacataatccatcatcaggacaaaattttcagcatctttccccaaacagacacaaaatcagggatcttcctttcactcggaacaacctagctcccctaccagatcaaaaatttctatctggagaacctctgcggacaaaccgagtgcttcctgcaattccaagtcaacgaagacacagcacagcagcagaagagagtgaacattctgccaaccccaccagtgatgaaaattaactgtgggccactcgctgcagaaatgtagatgaatatgtattttcaactctcaaaggacaagattactccagtttgtaagaacgaagaccaatttagtaagctgcattctataagccatcagttttataactcgaaattctttattccaaataaagatactccctaaataagcacttagaatatttgggtgtgcatattaagtctgtgaatttctgtgacttccacatgccaaaattaaaagacaaaatatgttatcagtaggaaaactgagctatgtttggtttgctttgtggcatgtgcactgtttttttgttattgttctttggttgtttttttgctgaatgattttatgttttgggaaaaaaagtacgctttgctgaataaaaggcaaaaaacaaaacaaaaaaaaaaccacatcccagacaaacatgtcttcacatttattgtcattctaacttgaactaatgaaacctatttaaaaataaattcctatgatcagtcaca

SEQ ID NO: 406880 - DNA, 783 bp, Homo sapiens
  misc_feature (7)..(7): n is a, c, g, or t
  misc_feature (14)..(15): n is a, c, g, or t
  misc_feature (21)..(21): n is a, c, g, or t
  misc_feature (24)..(24): n is a, c, g, or t
  misc_feature (58)..(59): n is a, c, g, or t
aagaaanaaaattnntagaanaantaaggtaatgaaggaatattataaatagaaaaannacttggacaaaattttcagcatctttccccaaacagacacaaaatcagggatcttcctttcactcggaacaacctagctcccctaccagatcaaaaatttctatctggagaacctctgcggacaaaccgagtgcttcctgcaattccaagtcaacgaagacacagcacagcagcagaagagagtgaacattctgccaaccccaccagtgatgaaaattaactgtgggccactcgctgcagaaatgtagatgaatatgtattttcaactctcaaaggacaagattactccagtttgtaagaacgaagaccaatttagtaagctgcattctataagccatcagttttataactcgaaattctttattccaaataaagatactccctaaataagcacttagaatatttgggtgtgcatattaagtctgtgaatttctgtgacttccacatgccaaaattaaaagacaaaatatgttatcagtaggaaaactgagctatgtttggtttgctttgtggcatgtgcactgtttttttgttattgttctttggttgtttttttgctgaatgattttatgttttgggaaaaaaagtacgctttgctgaataaaaggcaaaaaacaaaacaaaaaaaaaaccacatcccagacaaacatgtcttcacatttattgtcattctaacttgaactaatgaaacctatttaaaaataaattcctatgatcagtcaca

SEQ ID NO: 406881 - DNA, 1222 bp, Homo sapiens
atacttagagctagaggagaggcccctacacatgtccaccatcatccttcgggctcatttaacacttactatttctatactgtaaatggcaacaagattttccctacctcaacctgactttgagcaggagctgttgctggctaagcagcctgaacaattcacatgctcagaacagagcctactcgaccccctccctcccagagcagtcggccccagaagaaggagagacggttcaacgtgctcaaccaaatattctgcaaaaacaagaaagaagagcagagagcccatcagaaggatcccagcagggaccgatacagagaggaggacacctcagaagtcaatgacatcatcaccacctttgatagcatcgtgggtaccaactgccaagaacagcctggtgatcaggtggctatggttgaatttaagaagaaaacctcagacaattcaaaatatctcttaccagaaaagaaaccgctggcccgtaaggggcttccaccaatcagaacgcagagtctcccacccatcaccctgggcaataacttcctaacagcctcccatagggccacttcccatgcaggcctgagctctgctcctcatcatatggcccagcgatctcagaaaagtcgaagtgagcaggatttattaaataacagaactggctgccagatgttactagataacccctggaagagtgattctaatcaggtattttcctacaaagtttggactgtgtcttcttctgataagctgctggacagattgctcagtgtccggcctggtcaccaagaggtctccgtgccaccacaccttcgccatctacataatccatcatcaggacaaaattttcagcatctttccccaaacagacacaaaatcagggatcttcctttcactcggaacaacctagctcccctaccagatcaaaaatttctatctggagaacctctgcggacaaaccgagtgcttcctgcaattccaagtcaacgaagacacagcacagcagcagaagagagtgaacattctgccaaccccaccagtgatgaaaattaactgtgggccactcgctgcagaaatgtagatgaatatgtattttcaactctcaaaggacaagattactccagtttgtaagaacgaagaccaatttagtaagctgcattctataagccatcagttttataactcgaaattctttattccaaataaagatactccctaaataagc

SEQ ID NO: 406882 - DNA, 1554 bp, Homo sapiens
atacttagagctagaggagaggcccctacacatgtccaccatcatccttcgggctcatttaacacttactatttctatactgtaaatggcaacaagattttccctacctcaacctgactttgagcaggagctgttgctggctaagcagcctgaacaattcacatgctcagaacagagcctactcgaccccctccctcccagagcagtcggccccagaagaaggagagacggttcaacgtgctcaaccaaatattctgcaaaaacaagaaagaagagcagagagcccatcagaaggatcccagcagggaccgatacagagaggaggacacctcagaagtcaatgacatcatcaccacctttgatagcatcgtgggtaccaactgccaagaacagcctggtgatcaggtggctatggttgaatttaagaagaaaacctcagacaattcaaaatatctcttaccagaaaagaaaccgctggcccgtaaggggcttccaccaatcagaacgcagagtctcccacccatcaccctgggcaataacttcctaacagcctcccatagggccacttcccatgcaggcctgagctctgctcctcatcatatggcccagcgatctcagaaaagtcgaagtgagcaggatttattaaataacagaactggctgccagatgttactagataacccctggaagagtgattctaatcaggtattttcctacaaagtttggactgtgtcttcttctgataagctgctggacagattgctcagtgtccggcctggtcaccaagaggtctccgtgccaccacaccttcgccatctacataatccatcatcaggacaaaattttcagcatctttccccaaacagacacaaaatcagggatcttcctttcactcggaacaacctagctcccctaccagatcaaaaatttctatctggagaacctctgcggacaaaccgagtgcttcctgcaattccaagtcaacgaagacacagcacagcagcagaagagagtgaacattctgccaaccccaccagtgatgaaaattaactgtgggccactcgctgcagaaatgtagatgaatatgtattttcaactctcaaaggacaagattactccagtttgtaagaacgaagaccaatttagtaagctgcattctataagccatcagttttataactcgaaattctttattccaaataaagatactccctaaataagcacttagaatatttgggtgtgcatattaagtctgtgaatttctgtgacttccacatgccaaaattaaaagacaaaatatgttatcagtaggaaaactgagctatgtttggtttgctttgtggcatgtgcactgtttttttgttattgttctttggttgtttttttgctgaatgattttatgttttgggaaaaaaagtacgctttgctgaataaaaggcaaaaaacaaaacaaaaaaaaaaccacatcccagacaaacatgtcttcacatttattgtcattctaacttgaactaatgaaacctatttaaaaataaattcctatgatcagtcaca

SEQ ID NO: 406883 - DNA, 1312 bp, Homo sapiens
atacttagagctagaggagaggcccctacacatgtccaccatcatccttcgggctcatttaacacttactatttctatactgtaaatggcaacaagattttccctacctcaacctgactttgagcaggagctgttgctggctaagcagcctgaacaattcacatgctcagaacagagcctactcgaccccctccctcccagagcagtcggccccagaagaaggagagacggttcaacgtgctcaaccaaatattctgcaaaaacaagaaagaagagcagagagcccatcagaaggatcccagcagggaccgatacagagaggaggacacctcagaagtcaatgacatcatcaccacctttgatagcatcgtgggtaccaactgccaagaacagcctggtgatcaggtggctatggttgaatttaagaagaaaacctcagacaattcaaaatatctcttaccagaaaagaaaccgctggcccgtaaggggcttccaccaatcagaacgcagagtctcccacccatcaccctgggcaataacttcctaacagcctcccatagggccacttcccatgcaggcctgagctctgctcctcatcatatggcccagcgatctcagaaaagtcgaagtgagcaggatttattaaataacagaactggctgccagatgttactagataacccctggaagagtgattctaatcaggtattttcctacaaagtttggactgtgtcttcttctgataagctgctggacagattgctcagtgtccggcctggtcaccaagaggtctccgtgccaccacaccttcgccatctacataatccatcatcaggacaaaattttcagcatctttccccaaacagacacaaaatcagggatcttcctttcactcggaacaacctagctcccctaccagatcaaaaatttctatctggagaacctctgcggacaaaccgagtgcttcctgcaattccaagtcaacgaagacacagcacagcagcagaagagagtgaacattctgccaaccccaccagtgatgaaaattaactgtgggccactcgctgcagaaatgtagatgaatatgtattttcaactctcaaaggacaagattactccagtttgtaagaacgaagaccaatttagtaagctgcattctataagccatcagttttataactcgaaattctttattccaaataaagatactccctaaataagcacttagaatatttgggtgtgcatattaagtctgtgaatttctgtgacttccacatgccaaaattaaaagacaaaatatgttatcagtagg

SEQ ID NO: 406884 - DNA, 3649 bp, Homo sapiens
  misc_feature (1113)..(1113): n is a, c, g, or t
gcccaggtaaagccatgttttcctacacttaaaaatgtaaataaatatcccttagataatctggacagcagtttcttatatagcatgtctgagcactatattttgctgggctataaaaggtttaattgttgtttattggtacaataagggattctagttactaatatctacctgtagtcaataaagcaaacattgattggttgatcgaatcattgattcattcaataggtattgattcagcaccagctatgagctaggcagagttctaggccctacagagaaaactgatatcaaactaagaaagtctttttccaagtgctacagtaggggtgggggaggagagagataacaaactggtgagcaaatgttaaacaaaatgattctagagagtgctaaatactgtgaggaagataaaatgataaaataataaagacttctgaagattggttagggtaacctcttgtagaagtatcattggagaccgaaggatgacacaccagccatctgaccatgagagaacatcattcaaggcaaaggaaacagaccaccaccaacaaaaaaagatgcactggggaatttccagtaacacttttgttagctctcttaatatctgattttttgagcactagaacactgcctctcacagaatcctagcttaaaacagcaatgaacagactagaattctaggctaaaaccaacaagatgaaatgtgactgatatgaatataaatggtgcacataagttcacaaacccaattacacagcacaaaatgatatccacgtggcttgacagctgttcatattagaaaaatctagggattctaatggactacatattggagattgctctttgctgttcctgactggaaaaaaaaatatgtagatattacccttgggcagatttcagcccaacttaaagtatcattagagctgtccaaaatggaacagcctgctttgcacatagagaactcacattgctcaactcaaaaaagagcagaaggaaggaagaaggaaggacacgtaacagggatttttacaaaaacagaattcggtatttcttggagactactttaagacagtttttggtttctgtaagtctgtgacttattacttnttcctttaattccaataaaattttcttcatttttgttatttttaaaacattaagaagaaaaaaatgatattgatataaggtagatggtgaagtttagcaaaagtttagtttataatgatatctctcaaaatagcaaactgaagtttaaaattcttaagctataattttaaaggaatttagattaaacttttaatatgttgttggctaagtataatacaaaataaaaactaaataaatcttggttttgccacatattagctgtgtaatatagacaatttacttctctgttattgtttcctcagaatgagggcagtaacttgtagccgtctgaaaagattgttataagcatggagttagttgctgtatataaagcagttagaccagtacctgacaatattacatgctaagtaagtgcttgctattactgttgctgttattattaattataattgtgtgctctattctgccttcaggaattaatgaccaagttaataactgagacacctgaccagccaatcccatttctcattgaccatcttcagtctaaacaagggaaccgtggacaacttcaaagaactttgtctggatctgcagctctatgggcagaaagtgaaaaatcagaatccaaaggaacaagaagggatttcagaagctatgataaaccttggcaattaaatgcaaagaagcctaaaaaatcaaaaagtgaccttgctgtgtctaatatttctccaccatcaccggactccaaatcattgccaaggtcagtagagcatccaaagtggaactggaggactaaaccacaaagccgtgattttgatgaattgaatcacatccttcaggagagcaagaagctggggaaagcccttgagaatctctctcgaagtattgcaatttcagatgaactcgataaggaaacagtgacatttaattcttctcttctgaggccccgtgtgattggagaatggattggtagagaagaaaatgatgctgatcccctagctgctgaaatgctacagcctccaattccaagaagcaaaaatgaccaatgggaaagtgaagatagtggctctagtcctgcaggaagcttaaagatggagcctaagaacaaaggattaaaacagcagcaacagcaacataagaaactcctggccgcaatgctctctcaagattcttttgagtccatccacagccctaccccatctgtaacagaagaagatattgataatgaagatgatgcaatggaattgctggaggatcttaatgatttaagaatggagggagtaacaaccctggtaccttctgggagcaaatttaaccaaggccgtcctacttaccctgctgagcctcaggccaaggtcacactgaacatctgttcaaggtgtaggcttcaaggagacaacctggaagaaaggacagaagagtcactaccaatactccattctccagatgaaaaaatcccagattcattcgattccttgcctgggactgaagaagcactaatggaggagggtgacgaatttgagaaagcatctaaactaacaggacctggagaagcctccagtggagtaggacactcactgaaaaactacatggaagaagatgaatccttaaagcaattgcaggtagttcatcaaccatggatcttgccaagtgacacagaaagtgaaggagtggaagcagaacaagagaaacgttccgctgatcttcttctttgcgttccatgctcttcttgtcctacgctggtctactctggtttgtgaaacagagagaagaagttgcaagtggtccttaaagaaatgcagttattcaaatccttatgtatagttctaattttatttactatgtgtaatcatttagagaatggttatttttataatctcaataataaacaagtactatcgtagccagggggtgcccaagtatgtaatcagagaacactaatcctggcaaaggattgtggggtggtcaggaggccggctgccttttgacatggttagagtcctgggtttagattactttataaatagttattaagattaatatttgatatattaaatattgcctgattcaaataactttgcttaaaatttttctgtattttaacttgtctagggttttctacttcttctatttttataatattttctcattttttagattactaaacattctacttatccacatgtgccaagatgtgccatttaggtctctgcagaaattagctgtttggtatcatcacctgccatacatgttgtgtgcagcagtgagaagtatattctctaccactgctctttctcatgattattttctctattcctattaaaatgaataattgatatgttaattaagtaaagcaaatcaataaggaatgaaatgcatggcccaaaacatagaaaatgaaaatcgtttgaccatttatccaattattgaacccaattaagatgatccattttaaatttaatatatgctcgcttttggaatgtgttatgcattgatgttaagtgaatggatctaagtaaatctattgatatctcta

SEQ ID NO: 406885 - DNA, 2686 bp, Homo sapiens
agcggagcctcggggagcagcccgggctgtttgttccgtcaccggggaaaggaggtacacacagtcgcgcgcgcacggacacacacacacacgcacgcacgcacacacaccggtggcgagttcgagccccgcggcccctgtccgcccgcgtgcgcccctcgacacagctcgcctcccgccccctgattcctgctgctgccgcccagaggagaaaggaacctctgcctcgaatttccccactgcgccgggcgctgcggagagcggcgagggtgggcgcgaggcggagaacgcgatgaatgagttctcccctcgcctcggagttgtctgagttggcggcgctgcgcccaggcttccggctctcagcgccccacgcgcgcgtggctccccgggctgccacccacgcccgcggccggggccgagccagccacgcagggcagccgaggctccggagctcctgtcccggccccagtccgggtaaaaggagggttgtccccagcggaggcgcacagccgcgcgttctccctgcactctcttcgcggtcccatctgttccccatggcgtctcatccgcaaacccggatccaggcttacctggagaagaacaagatcggtcccctgtttgaggaattaatgaccaagttaataactgagacacctgaccagccaatcccatttctcattgaccatcttcagtctaaacaagggaaccgtggacaacttcaaagaactttgtctggatctgcagctctatgggcagaaagtgaaaaatcagaatccaaaggaacaagaagggatttcagaagctatgataaaccttggcaattaaatgcaaagaagcctaaaaaatcaaaaagtgaccttgctgtgtctaatatttctccaccatcaccggactccaaatcattgccaaggtcagtagagcatccaaagtggaactggaggactaaaccacaaagccgtgattttgatgaattgaatcacatccttcaggagagcaagaagctggggaaagcccttgagaatctctctcgaagtattgcaatttcagatgaactcgataaggaaacagtgacatttaattcttctcttctgaggccccgtgtgattggagaatggattggtagagaagaaaatgatgctgatcccctagctgctgaaatgctacagcctccaattccaagaagcaaaaatgaccaatgggaaagtgaagatagtggctctagtcctgcaggaagcttaaagatggagcctaagaacaaaggattaaaacagcagcaacagcaacataagaaactcctggccgcaatgctctctcaagattcttttgagtccatccacagccctaccccatctgtaacagaagaagatattgataatgaagatgatgcaatggaattgctggaggatcttaatgatttaagaatggagggagtaacaaccctggtaccttctgggagcaaatttaaccaaggccgtcctacttaccctgctgagcctcaggccaaggtcacactgaacatctgttcaaggtgtaggcttcaaggagacaacctggaagaaaggacagaagagtcactaccaatactccattctccagatgaaaaaatcccagattcattcgattccttgcctgggactgaagaagcactaatggaggagggtgacgaatttgagaaagcatctaaactaacaggacctggagaagcctccagtggagtaggacactcactgaaaaactacatggaagaagatgaatccttaaagcaattgcaggtagttcatcaaccatggatcttgccaagtgacacagaaagtgaaggagtggaagcagaacaagagaaacgttccgctgatcttcttctttgcgttccatgctcttcttgtcctacgctggtctactctggtttgtgaaacagagagaagaagttgcaagtggtccttaaagaaatgcagttattcaaatccttatgtatagttctaattttatttactatgtgtaatcatttagagaatggttatttttataatctcaataataaacaagtactatcgtagccagggggtgcccaagtatgtaatcagagaacactaatcctggcaaaggattgtggggtggtcaggaggccggctgccttttgacatggttagagtcctgggtttagattactttataaatagttattaagattaatatttgatatattaaatattgcctgattcaaataactttgcttaaaatttttctgtattttaacttgtctagggttttctacttcttctatttttataatattttctcattttttagattactaaacattctacttatccacatgtgccaagatgtgccatttaggtctctgcagaaattagctgtttggtatcatcacctgccatacatgttgtgtgcagcagtgagaagtatattctctaccactgctctttctcatgattattttctctattcctattaaaatgaataattgatatgttaattaagtaaagcaaatcaataaggaatgaaatgcatggcccaaaacatagaaaatgaaaatcgtttgaccatttatccaattattgaacccaattaagatgatccattttaaatttaatatatgctcgcttttggaatgtgttatgcattgatgttaagtgaatggatctaagtaaatctattgatatctcta

SEQ ID NO: 406886 - DNA, 613 bp, Homo sapiens
  misc_feature (492)..(492): n is a, c, g, or t
aaatgcaggaattcggtatcgagcacattatcagcaacataagaaactcctggccgcaatgctctctcaagattcttttgagtccatccacagccctaccccatctgtaacagaagaagatattgataatgaagatgatgcaatggaattgctgggcttcaaggagacaacctggaagaaaggacagaagagtcactaccaatactccattctccagatgaaaaaatcccagattcattcgattccttgcctgggactgaagaagcactaatggaggagggtgacgaatttgagaaagcatctaaactaacaggacctgatgaatccttaaagcaattgcaggtagttcatcaaccatggatcttgccaagtgacacagaaagtgaaggagtggaagcagaacaagagaaacgtgagtagacactattgtttattgacaaatttcttttaccagaaggaaatccacaataaagctatttcactttcataaanaccccaaatcccccctttaggggggcgttttaaattcaccggccgggttttaaacaggcgggattggaaaaacccggggttccccaactataaccctgtggtccctttttcccacggtggt

SEQ ID NO: 406887 - DNA, 2553 bp, Homo sapiens
agcggagcctcggggagcagcccgggctgtttgttccgtcaccggggaaaggaggtacacacagtcgcgcgcgcacggacacacacacacacgcacgcacgcacacacaccggtggcgagttcgagccccgcggcccctgtccgcccgcgtgcgcccctcgacacagctcgcctcccgccccctgattcctgctgctgccgcccagaggagaaaggaacctctgcctcgaatttccccactgcgccgggcgctgcggagagcggcgagggtgggcgcgaggcggagaacgcgatgaatgagttctcccctcgcctcggagttgtctgagttggcggcgctgcgcccaggcttccggctctcagcgccccacgcgcgcgtggctccccgggctgccacccacgcccgcggccggggccgagccagccacgcagggcagccgaggctccggagctcctgtcccggccccagtccgggtaaaaggagggttgtccccagcggaggcgcacagccgcgcgttctccctgcactctcttcgcggtcccatctgttccccatggcgtctcatccgcaaacccggatccaggcttacctggagaagaacaagatcggtcccctgtttgaggaattaatgaccaagttaataactgagacacctgaccagccaatcccatttctcattgaccatcttcagtctaaacaagggaaccgtggacaacttcaaagaactttgtctggatctgcagctctatgggcagaaagtgaaaaatcagaatccaaaggaacaagaagggatttcagaagctatgataaaccttggcaattaaatgcaaagaagcctaaaaaatcaaaaagtgaccttgctgtgtctaatatttctccaccatcaccggactccaaatcattgccaaggtcagtagagcatccaaagtggaactggaggactaaaccacaaagccgtgattttgatgaattgaatcacatccttcaggagagcaagaagctggggaaagcccttgagaatctctctcgaagtattgcaatttcagatgaactcgataaggaaacagtgacatttaattcttctcttctgaggccccgtgtgattggagaatggattggtagagaagaaaatgatgctgatcccctagctgctgaaatgctacagcctccaattccaagaagcaaaaatgaccaatgggaaagtgaagatagtggctctagtcctgcaggaagcttaaagatggagcctaagaacaaaggattaaaacagcagcaacagcaacataagaaactcctggccgcaatgctctctcaagattcttttgagtccatccacagccctaccccatctgtaacagaagaagatattgataatgaagatgatgcaatggaattgctgggcttcaaggagacaacctggaagaaaggacagaagagtcactaccaatactccattctccagatgaaaaaatcccagattcattcgattccttgcctgggactgaagaagcactaatggaggagggtgacgaatttgagaaagcatctaaactaacaggacctggagaagcctccagtggagtaggacactcactgaaaaactacatggaagaagatgaatccttaaagcaattgcaggtagttcatcaaccatggatcttgccaagtgacacagaaagtgaaggagtggaagcagaacaagagaaacgttccgctgatcttcttctttgcgttccatgctcttcttgtcctacgctggtctactctggtttgtgaaacagagagaagaagttgcaagtggtccttaaagaaatgcagttattcaaatccttatgtatagttctaattttatttactatgtgtaatcatttagagaatggttatttttataatctcaataataaacaagtactatcgtagccagggggtgcccaagtatgtaatcagagaacactaatcctggcaaaggattgtggggtggtcaggaggccggctgccttttgacatggttagagtcctgggtttagattactttataaatagttattaagattaatatttgatatattaaatattgcctgattcaaataactttgcttaaaatttttctgtattttaacttgtctagggttttctacttcttctatttttataatattttctcattttttagattactaaacattctacttatccacatgtgccaagatgtgccatttaggtctctgcagaaattagctgtttggtatcatcacctgccatacatgttgtgtgcagcagtgagaagtatattctctaccactgctctttctcatgattattttctctattcctattaaaatgaataattgatatgttaattaagtaaagcaaatcaataaggaatgaaatgcatggcccaaaacatagaaaatgaaaatcgtttgaccatttatccaattattgaacccaattaagatgatccattttaaatttaatatatgctcgcttttggaatgtgttatgcattgatgttaagtgaatggatctaagtaaatctattgatatctcta

SEQ ID NO: 406888 - DNA, 130 bp, Homo sapiens
caagacagaatgaatgcacagacaaaagaaaagggaaacttgaaattgtgagggccaaagtgagggacagtagaaagaacaaggaagggacaaaataatgtgggtttctatttctaacctcaattttagg

SEQ ID NO: 406889 - DNA, 177 bp, Homo sapiens
tcatgtctttcaatctgaaaaaaaaaaaaacccaaaaaaacaaaaaacaaaaaaaagcctcttggatgcaccactagagagtaataatccaaaaatcaggcagtccttggtctagttcatatgtcaccaccaccagctgtatgtctcccttaacctctgagtgtagattctttccta

SEQ ID NO: 406890 - DNA, 548 bp, Homo sapiens
actgctgtattcttgctgcaagaatacagcagtgaaaatatttgttgagtgaacaaattaattctgtttccacctagaaagcacttagcatagtgccttatacttgagaaagtgatcaataaatggtgtaaacaatggtcctcaccctggctgttatgctggggccccaccccagataactaaattagaattgcgggaggtgggaccttggcattgttatttttgtaaagcttctcaaaggattctaatgtaccgcttgggttgagaagcccttgtttgatacagcaaggaggttaatgatacctgactttttattaagtgcttattgttatggaggtattgaggtaagctacacagtgttatctcatgaaatcctcatcactggccagtggaagtagttactgctatccccattatttggtaaagaaactgaggctcataaagctaagggatagcaggtggtggagctgtcatttgagctcatgcaatttgtgtcaagagccccatctttttttttttttttttttttgagacagggtcttgccctg

SEQ ID NO: 406891 - DNA, 618 bp, Homo sapiens
aatcgtatgagaaacttcatccgattattaagctatcctcaaaaaactatgaaagcaaatgaaacataataaacccccaaaactgaagacagtcaaagcatttcaaacccctcagtatgcataatcctcaagattacaactaggacaatgttacttcgaatctaatactttgtaggctaatgatattattaacctctaattaatagcatcacctctaataacaacaactacatagagaacagctcctagaggtgctggatctcagtatcatttcctctggctctgaacagtacatcgtacattgtcagtcacattcccagcacaagttagaccatgtccctctcaggtttcctagcccaggtcatacatatattctgctgctttgtgacatccctgaaatgtctttaaagaatgaacggctgtcaattttaaggaatgacgaaagttatccccaaggaatgtcaggagtgttgagcatcagagaatccaatgttcccattaacagaataaagaagagaagctatatgttcattagattttttaaaaattgctgattcaacattaattcattataaaaactcaattaatgtcaaaatgtattcagtttgggcgggcaca

SEQ ID NO: 406892 - DNA, 509 bp, Homo sapiens
gagggatggtgtgctctgagcactctgcttcctcgatctgtcagcctggctggtctcccagggagggaacctgcgaagagcccccgaccctgcactgggaaagccccaaatacacagcttctcattttatgcttacggagatcctatatcactaccctcaggtcacagagaggtgcactgagttcatatgagtggaaattacccgccagtcaccagagcgtgagcaaaccggccagagcgaggggccctccccggccctcccaccacggagccggctccccttgccctttaggactcagccagacaccgccttccccgagcagtgctgttctcagcgtggaagtgcccgacatcgggagcttctccctccatcccagccagcactgctgtgggaagcacagccccttcgcttgcacttctccggatcaatgtttattttaggacctttaagtattgttttcttcagcgcagaaaatagtgcttaataaaatggaattcacctaatgcca

SEQ ID NO: 406893 - DNA, 773 bp, Homo sapiens
tgagggacccggttaccaacctgcatgacgctcagtttgcccatctgtcccagtggtaacacacagttctcgggagacgttccccattcccagaggagtagtgtgaaacgcgtgcgcctctagtcttaaacttggcgtttgtattagttgggtttcctggtgtctctttagcaagtgaagtttctggttccctccttcactgtgtgacctgcctagtcctcctgggtcgcatttacagaagtttatacgagacctagtttccagggaagaactcactgattccgcgagggagatggcttaatggatgatggtcgtcagccttaaggatacttcagtcttaactgtgtgttacaaagtttgaaagggagggttccctatgaataagaagcacacttgaaagaacagccatctggtctaacctctcactggtgcttcagaggaggaaaaaaggtcacagctatgtttccagtgtcctctgggtgtttccaagagcaacaagaaacgaataaatctctggctgcataaggggagtgaacacaaagtacatttgaccacaaaatgactctttaaaagtcagaactacggtagcatgaagccaaacgaggtccacgtaaaggctctgacactttctcggggacacactgctaagggttccacagaagtctccaatcttcaaatcttcagtgtataaaagcacagattcctgaaaggaatgggctcaaatgaaccaggaagtaggagctctctatatccctggtctgaaaaaaaagcta

SEQ ID NO: 406894 - DNA, 465 bp, Homo sapiens
aaaagcagaaattaaaagcagctgaacaaagaagagaataagaaaataatcatctggtaaccatcatagtaataattgttcaaacacaagtcatccatgaaatgctaaatctagtgggttctgaggagtaaccagatatttacagagcctcaaagtatctccatacaaaatacggttgaactacaaaaagaaaattgtaacattagcatggacaaacctgatgtggcttacccgtggattctagagaagaaagtagatgggagcaagtgtccaatacagcaacagctggaaagaaaaataaagaattttgttctttacctaaaacacttcagttaactaagtgtgagtttaaaaactaaagattgagaactttatcagagttaataagaatgagaaatatgtatgtacatttacaatacaaaattactatttaataatttacacatggcattaattctaattgtg

SEQ ID NO: 406895 - DNA, 409 bp, Homo sapiens
ttcagaacctcgtaacattgtgctggaaacctatgtgagggacaggcatttagaccctcgcagcagtgttctggaatcccatgtgagggtcaaacattcagatcctcgcagcagtgttctggaattctatgtgagtgacaaacattcagactccagcagcagtgatgtggcttacccgtggattctagagaagaaagtagatgggagcaagtgtccaatacagcaacagctggaaagaaaaataaagaattttgttctttacctaaaacacttcagttaactaagtgtgagtttaaaaactaaagattgagaactttatcagagttaataagaatgagaaatatgtatgtacatttacaatacaaaattactatttaataatttacacatggcattaattctaattgtg

SEQ ID NO: 406896 - DNA, 1530 bp, Homo sapiens
ccactccgccattttcctccggaagtgcggcacccagaggcggtcctgtagccgggccggcttggggcttggttctatgtccctgcggggaagaactcactgattccgcgagggagatggcttaatggatgatggtcgtcagccttaaggatacttcagtcttaactgtgtgttacaaagtttgaaagggagggttccctatgaataagaagcacacttgaaagaacagccatctggtctaacctctcactggtgcttcagaggaggaaaaaaggtcacagctatgtttccagtgtcctctgggtgtttccaagagcaacaagaaacgaataaatctctgttgaagagataccatttgacattttagagatggctgcatgcaaactcttgaaacatttgacgaccctccagggtgccccgactcactttccctgcagatggaggcaaggaggctccacagacaacccccctgcctgaggtcagatagtggccagcaggccagagctggcgcagagaaaatacaagctgagcttagaacatcttctgccagaaagtaaaaaagtgccgacagagtaatggagacaaatcaaagagacataaagtcagcttggaatgtctactactggcctaatcttggggaattggagcatcagaatcatgagctttctttctcccttatttattggttttatttctccatgtagaacaaagaagagaataagaaaataatcatctggtaaccatcatagtaataattgttcaaacacaagtcatccatgaaatgctaaatctagtgggttctgaggagtaaccagatatttacagagcctcaaagtatctccatacaaaatacggttgaactacaaaaagaaaattgtaacattagcatggacaaacctggcaggtactccttaactctcctaagtaataaaaactgtaaaatgcaaataagccttcgatgacctttactaacctttactaaagtatcagtgatgacttggttgtttaaacagctgacatttgggcaatttgagtatgtcaaactcaataatactggttttcatttgcaagatccacttaaaacttaaggaggccaaaaaacatcatttaaaataccctataaattataatcatacatatgatacgaaaaatatcctacttcagtaaatattggaatgttatatattttatgagaaacaattaaaatgtgtaaatagcccagtaataaagttttataatcttttaaatcatcatagaatttttccttaagactttatggttaaatattctcttcattagatgtggcttacccgtggattctagagaagaaagtagatgggagcaagtgtccaatacagcaacagctcagtcaagtagttctggcagttatttgaagtctgaggtttgaagtaggaattcttacgggcatttggggaatatattttctgttgagtcctatactagtaagattttcaacacaaggtgactctcgacctcaccttgtaggaagagtgctgagaaaatatttca

SEQ ID NO: 406897 - DNA, 969 bp, Homo sapiens
gggagaaaagtgaaacaacaataaagccccaagcataaacaaacaaaaagagttaagcaaaacaacaaatgcacaattcatatgattactgagtgttctaatggtgaacacttttatccaacttttctcaagtcagagtacagaacaaagaagagaataagaaaataatcatctggtaaccatcatagtaataattgttcaaacacaagtcatccatgaaatgctaaatctagtgggttctgaggagtaaccagatatttacagagcctcaaagtatctccatacaaaatacggttgaactacaaaaagaaaattgtaacattagcatggacaaacctggcaggtactccttaactctcctaagtaataaaaactgtaaaatgcaaataagccttcgatgacctttactaacctttactaaagtatcagtgatgacttggttgtttaaacagctgacatttgggcaatttgagtatgtcaaactcaataatactggttttcatttgcaagatccacttaaaacttaaggaggccaaaaaacatcatttaaaataccctataaattataatcatacatatgatacgaaaaatatcctacttcagtaaatattggaatgttatatattttatgagaaacaattaaaatgtgtaaatagcccagtaataaagttttataatcttttaaatcatcatagaatttttccttaagactttatggttaaatattctcttcattagatgtggcttacccgtggattctagagaagaaagtagatgggagcaagtgtccaatacagcaacagctcagtcaagtagttctggcagttatttgaagtctgaggtttgaagtaggaattcttacgggcatttggggaatatattttctgttgagtcctatactagtaagattttcaacacaaggtgactctcgacctcaccttgtaggaagagtgctgagaaaatatttca

SEQ ID NO: 406898 - DNA, 2244 bp, Homo sapiens
cctcatcactgtcaccttagagcattagagcctctataggtgctccccaatctctgccctccccacccatggtggtactggggatgcagacagaggaggggcactgcataatgctgagagggctggcaccctctctaggtggaacacaggtcatttgtaaagttgtaggtctgccaagcagtattggattcaacacatcttctcaccttctctttccagcgaccctccagggtgccccgactcactttccctgcagatggaggcaaggaggctccacagacaacccccctgcctgaggtcagatagtggccagcaggccaggtactgacaaactgcccctgaccaggttcccagtgatgaagtgatgagacccctaatgaccactcctccattgaccaagtcccactgatcaagtccccacttgaccatgtcttcctaaccaggcccacacttaataggcctcatgggccagaccccactgaccaattttccactgacctggtccccattgacaagacagggttcccactgacaagaccacaatttaccaggttgctgctcaaccgaccccccactgaacaattctccatgaacgagtacccagctgactgagccccctctgaccaggccctcactgaccaggccccaagccactaaggccccacactgaccaggcccgtgatatattgtgtatgccccaccaaccagtttttcattgtttatgttccaacagatcaggccccactaataaagccaccactgactaggtccccccactgaccaggcttccaatgactaggtcaccaggtccccactgaggaggccgccactaaccaggcccctgctgatcaggtcccaaatgatcaggtcctgatgaccaggtcatctctgaccatggtccactgaccaggccccagagcaacggggttcaaagtctcattacaatgtccccctcagctcatagaccctccctccctgcatgtgtgcccggaggtcaggccctggggtttttttttgggacgtggcctttcctccaagacacagggagagacagttggcctcaggctccaagttcccagctccacactcaccccaaaggccctctgggcccgtctcaaaggagaaagtgaggtggcctgacactgcctggacaccaccatctaccctattctgagttttcagagtgtgaggaagggagggaccatttggcagataaggcacgctgtgctgttgggtctctcagggcccttcccacagagccccgatctaaagacacaacacagaggctacaggaagacttaatccagaacctctgagacagccagggaccacatgagtactctccccagacagccagaaggccctttgcttagtttcttggtacttcagtggatgtggcagtggttcttctgttggggaccagtgagtacacactggggagggctcacctgtgtttcctcagtggctccacctctgcttctaaaaaaaatgactcattccagagctggcgcagagaaaatacaagctgagcttagaacatcttctgccagaaagtaaaaaagtgccgacagagtaatggagacaaatcaaagagacataaagtcagcttggaatgtctactactggcctaatcttggggaattggagcatcagaatcatgagctttctttctcccttatttattggttttatttctccatgtagaacaaagaagagaataagaaaataatcatctggtaaccatcatagtaataattgttcaaacacaagtcatccatgaaatgctaaatctagtgggttctgaggagtaaccagatatttacagagcctcaaagtatctccatacaaaatacggttgaactacaaaaagaaaattgtaacattagcatggacaaacctggcaggtactccttaactctcctaagtaataaaaactgtaaaatgcaaataagccttcgatgacctttactaacctttactaaagtatcagtgatgacttggttgtttaaacagctgacatttgggcaatttgagtatgtcaaactcaataatactggttttcatttgcaagatccacttaaaacttaaggaggccaaaaaacatcatttaaaataccctataaattataatcatacatatgatacgaaaaatatcctacttcagtaaatattggaatgttatatattttatgagaaacaattaaaatgtgtaaatagcccagtaataaagttttataatctttt

SEQ ID NO: 406899 - DNA, 463 bp, Homo sapiens
tcaatttctgtgagcttagtaagcacttcagacttcctcagtgaattagtaaggatgcttatccacttacccaggcatgatggtctgtacttttcctctgtccactcaggaatttggagcccttttttgtacttgcaaaataatttatacatcagagctcttaacccagacacgtgaattatgtacgttgtgttccagccactccaagttcttttcttctgtctatacctttggtccttaagaaccaaagcttgctacctcctagccccttttctgttaagaactgccatgcagaagtctacattcacactgagacttctttcttgaatttggaaaaaaaaaatctgctgggtgcgatggctcacacctgtaatcccagcgctgtggaaggctgagaggattgcttgatcccatgagtttgagaccagcttgggcaacatagtgagaccctgtctctaccaaa

SEQ ID NO: 406900 - DNA, 634 bp, Homo sapiens
tgaaaaagtgcccatcattattggtcatcagggaaatgcaaattaagtcacaataagatccccaaaacagcctctagaatggctaaattgaagagatggataaccctgaatgttagcaaggttgtcaggaatgcaagttctcatacattgttggtggcaatgaagatggtacaaccacttgaatagtttgacaatttcttaaaaagttaaatatgaatctgccctatgattaatctgtgatggaaatcagagtagtagcaggatctggttgctcacacctgtaatcccagcactttgggagcctgagatgggaggaggatcccttgagcccaggaattcgagatcagtcttggcaacatagtgaaatgacacctcttctctacaaaaacaaaaataaaaaaattagctgagcatggtggcacacaactcaagtgggaggatcacttgagcctgggaggtggagcttgcagtgagccgagatcacaccacactgtactccagtctgagcgacacagtgagaccctgtctccaaaaatagctagctagctagctagatcgaggttttctatgggtagaggccaggagtttgagaccagcctgggtgacacagtgagaccctgtctctaccccccca

SEQ ID NO: 406901 - DNA, 638 bp, Homo sapiens
tgtatatcgatgcaccctgaagatatgcgattccttacctctcaatagtgtcactgtttctaattcatggtaatggggatggggacttaacagcaggtaattagagcaatggcagaattggctactgaattacaatggcagattcctgagaatggaagaagtgctgcccaggaatggagttcaacagatcctctccacacccgggtaaacatggcatttcgcagcacctgctgtggtccccccgccactggaagtcttcccgtctctaaatggaattagtggagcccggagcctctggtgtaacgcacagacatgatccatgggcgcagcgtgcttcacattgtagcaagtttaatcatcctccatttgtctggggcaaccaagaaaggaacagaaaagcaaaccacctcagaaacacagaagtcagtgcagtgtggaacttggacaaaacatgcagagggaggtatctttacctctcccaactatcccagcaagtatccccctgaccgggaatgcatctacatcatagaagatttacttacgattcttggactatgagatgcagaattcaaatgagtgcaagaggaattttgtggctgtgtatgatggaagcagttccgtggaggatttgaaagcta

SEQ ID NO: 406902 - DNA, 759 bp, Homo sapiens
agcgtggggtgtgatgcgagcgtcacggtggggatgctgctggctgcgcggcgctgagggccagcgagagcgagagcccgcccggggcggaggacggactcatccggatctggctgcagcgtgggctcggagctcccccttcctctcggtctccctctcggcccccctttatttccttcttgctttgcgtctttaacacctctcgaccctgtcctccccccgccactggaagtcttcccgtctctaaatggaattagtggagcccggagcctctggtgtaacgcacagacatgatccatgggcgcagcgtgcttcacattgtagcaagtttaatcatcctccatttgtctggggcaaccaagaaaggaacagaaaagcaaaccacctcagaaacacagaagtcagtgcagtgtggaacttggacaaaacatgcagagggaggtatctttacctctcccaactatcccagcaagtatccccctgaccgggaatgcatctacatcatagaagccgctccaagacagtgcattgaactttactttgatgaaaagtactctattgaaccgtcttgggagtgcaaatttgatcatattgaagttcgagatggaccttttggcttttctccaataattggacgtttctgtggacaacaaaatccacctgtcataaaatccagtggaagatttctatggattaaattttttgctgatggagagctggaatctatgggattttcagctcgatacaatttcacacctg

SEQ ID NO: 406903 - DNA, 495 bp, Homo sapiens
taccttctggcccctctcttcattcagagatgctggcagagccattccctaaggttgtagcaagtttaatcatcctccatttgtctggggcaaccaagaaaggaacagaaaagcaaaccacctcagaaacacagaagtcagtgcagtgtggaacttggacaaaacatgcagagggaggtatctttacctctcccaactatcccagcaagtatccccctgaccgggaatgcatctacatcatagaagccgctccaagacagtgcattgaactttactttgatgaaaagtactctattgaaccgtcttgggagtgcaaatttgatcatattgaagttcgagatggaccttttggcttttctccaataattggacgtttctgtggacaacaaaatccacctgtcataaaatccagtggaagatttctatggattaaattttttgctgatggagagctggaatctatgggattttcagctcgatacaatttcacacctg

SEQ ID NO: 406904 - DNA, 523 bp, Homo sapiens
taacttatacaatcaaaaaaatctgatggctgctggaccaatttaaaaccagacagaagccacatggtaatgcccctgaagattgtagggcttagattatagtaaaacttagattatagtaaaaaggagttattttcttacaataaaggcatagaaagcttacattttgaggaaatgacaaaatatctaaccaatcttgagaagcattattatttctagatcacacagcttttaaaaaaaggaagttttgttgggcgtggtggctcaagcctgtaatcacagcactttgggaggctaaggggagcggatcacctgaggtcaggagttcaagaccagcctggccaacatggtgataccccgtctctattaaaaatacaaaaattagctgggcatggtggtgtgcacctgtagtcccagctatttgggaggctgaggcacaagaattgcttaaacccagcagaggctgcagagagccaagatcgtgccactgcattccagcctggttgatacagtgaaactctgc

SEQ ID NO: 406905 - DNA, 1035 bp, Homo sapiens
gcggccgcattggccttcacggggtccacggggtgccgcagcatggccagcacctcaggcagctcagggtcccgccagcgcggctccttgcgggcgctatccactgagggcgagcgccgcaccagccggtccaggctgcccatgctgccccgttcaggctgggccaggggcgccgtcaccattgggaacgcaggccgctcgtccgccagctcgccgccatcatctgctgtgtcctcgtaggccctgcacaggcaagtggggcgcgtggacatcgtcacaggcagccgccagccctgcctctgagctgccccatcacaccttcttcaggactgcaaactcacccagcagcgctgggctgagagcacctgtatcttggcccggagcatggtggggacacagagagtcatgcaccagcccagtgagaaccaattcagagccaaatgccaaaccccagccagcggctaccaggacccaggcaaccctcccaggacagcaaactcactcactgctgtcaccgggcagtttcccaatcccgagcaaaacaagtttctgtgagacatctgctatggctgctggagagaccgtctcacctcccttccacaaaaccaccccatcttccatgaggcccatctctggctgtgccaggatgtagggggagtaaatggccctctccgcatgaagccatcccagtaggaccacctgaggagtattcaggccaccagccccttggggcacaagatctccttagctctcagtagccctgtgggttgctgtcatcaaaccgcctgccctgaggctaggagtgacggtcaggtgacttggccagggtcacacaacaaaatcctgacccgggctgtggtcacatccccactccagagatgcagaaactgagggcaatggggacagaaccaggggctgtgacaagggccagggctctgggttctggttacccagagtgtggctggagcaaggccagtggccggcactcttcccagctttcctgggccctgggcctgcaggacagtgcccagccga

SEQ ID NO: 406906 - DNA, 813 bp, Homo sapiens
ggattctgagactgaaaagtttgagaaaaacaaatggaaagagatgactgcaggacttatttgagtccgttacacattcccatgcaggggaatccaggctgtgctgtttcccagttgtgtttgctggtgagaacgttttttcaggcaggcaagtctgctcggaatagtgttctttggaacatactttgggaaatgctgacatgatggttaagagcgctggctttggtgtcagacccagattcaaattcttgctctgacgcttcctggctgtgtgatttttgacaagtcacttaacccctctgagcctcgatttcctctttctgtcaaatggaatgatcatagtactttcatcttaaagctgttgtgaggattaactacgagtgaatgcagtgtttcccaaagtgtgtacattcagcgtcagtgatatatgggatgatttcaggtcttacgtgagtaaactttaaaaaatagtcctgagttagcttttgtgaactttagaaagctgagtgtcatgcctcagccccttgatttcacacgcgattgcttagggggaggctaagttaaaaaaaaaaaaaggaaattgagttcttaaaagaagccattgatgcagttcagatggttactttgctgggcagcagtggggaaggtggcgtggaatgttggagacttggattagcttttaaagcaggtgccagcacttggcctacagcaggtgcttgccacagggtaagaactattgacacttactattgatgctctattttgtcaccgtcattgtcattgttattattgagaaaactaaggctcagagag

SEQ ID NO: 406907 - DNA, 1108 bp, Homo sapiens
aactctacggcctagcaaccgttgccaaggagctcgactctgggagcggtctagagcccgggcgcctcctggggggtggggaaacggtttcgtgaggagaatttgagttaaaattataagacctaattatgagtgatcaaattaaattcattatggacagtctcaataaggagccctttaggaagaactataatttaatcacgtttgattccttggagccaatgcaactattacaagttctcagtgatgttctggctgagattgacccaaagcaacttgtggatatcagagaggagatgccagagcagacagccaaacgaatgttgagccttcttggtattcttaagtacaaaccttcaggaaatgccacagatatgagtacttttcgtcagggtttggtgattggaagtaaacctgtaatttacccagtgctccactggcttcttcagaggactaatgaactgaagaaaagagcatatttagctcgttttttaataaaacttgaggtaccaagtgagtttcttcaggatgaaactgtggctgacaccaataaacagtatgaagagttaatggaagcctttaaaactttgcataaagaatatgagcagctcaagatatctggattttctacagcagaaataagaaaggatatcagtgcaatggaagaagaaaaggatcagctcattaagagagttgaacatttgaagaaaagggttgagacagctcagaatcatcaatggatgcttaaaatagcaaggcaacttcgagttgaaaaagagagagaagaatatcttgcacaacagaaacaggaacaaaagaatcagctatttcatgcagtgcaaagattgcaaagagtacaaaaccagctgaaaagcatgcgccaagctgcagcagatgcaaagcctgaaagtttaatgaagaggctagaggaggagataaaatttaatttatatatggtaactgaaaaatttcctaaagaattagaaaataagaaaaaggaattacattttttacaaaaagtagtttcagagccagctatgggccattctgatcttcttgaacttgaatctaaaataaatgaaataaacacagaaattaaccagttgat

SEQ ID NO: 406908 - DNA, 3048 bp, Homo sapiens
aactctacggcctagcaaccgttgccaaggagctcgactctgggagcggtctagagcccgggcgcctcctggggggtggggaaacggtttcgtgaggagaatttgaggtaacctcgccaactcgcggtcggaagctcctctgaaccccgaaataggagagagctcccgtcctctctcggtcctgatgcagcacctcgcaagtggaaggggtcgtcgcggttaagcccccggataggggaatcgggccccttctgggattcgagcggatccaggccgctccctggagggatgaactgtcgaggggcccagggcagcccccgctagaggcccggtcgggtgtggggtcccctgtcccctgtcccgagcccggggagggggacactatttctggtactcccaggaggctgcgggtcgatgctcgtgccagcctgggacccaggcagcacggtttctctcccaaattgtgccagagaacacgcacgtcctggttttcattgttccccgcctcctgcgactcgtttgtggttaaaattataagacctaattatgagtgatcaaattaaattcattatggacagtctcaataaggagccctttaggaagaactataatttaatcacgtttgattccttggagccaatgcaactattacaagttctcagtgatgttctggctgagattgacccaaagcaacttgtggatatcagagaggagatgccagagcagacagccaaacgaatgttgagccttcttggtattcttaagtacaaaccttcaggaaatgccacagatatgagtacttttcgtcagggtttggtgattggaagtaaacctgtaatttacccagtgctccactggcttcttcagaggactaatgaactgaagaaaagagcatatttagctcgttttttaataaaacttgaggtaccaagtgagtttcttcaggatgaaactgtggctgacaccaataaacagtatgaagagttaatggaagcctttaaaactttgcataaagaatatgagcagctcaagatatctggattttctacagcagaaataagaaaggatatcagtgcaatggaagaagaaaaggatcagctcattaagagagttgaacatttgaagaaaagggttgagacagctcagaatcatcaatggatgcttaaaatagcaaggcaacttcgagttgaaaaagagagagaagaatatcttgcacaacagaaacaggaacaaaagaatcagctatttcatgcagtgcaaagattgcaaagagtacaaaaccagctgaaaagcatgcgccaagctgcagcagatgcaaagcctgaaagtttaatgaagaggctagaggaggagataaaatttaatttatatatggtaactgaaaaatttcctaaagaattagaaaataagaaaaaggaattacattttttacaaaaagtagtttcagagccagctatgggccattctgatcttcttgaacttgaatctaaaataaatgaaataaacacagaaattaaccagttgattgaaaagaaaatgatgagaaatgagcccattgaaggcaaactctcactgtataggcaacaggcatctatcatttcccgtaaaaaagaagccaaagctgaggaacttcaggaggccaaggagaagttagccagcctagagagagaagcatcagtaaagagaaatcagacccgtgaatttgatggtactgaagttttaaagggagatgagagacaggatctcactctgtcacccaggctggagtgcggtggtgtgatcatggcttactgcagcctgaaactcctaggctcaagtgatcctcctacctcagcctcctgagaagctcggactacaggcacgagccaccatgcccagctaattttctttttttgttttgttttgtagagatgtggtctcactatgtttcccaggctggtcttaaactcccggcctcaagcagtcctcccacttcggcctcctgaagtgttaggattacaggcgtgagcctgcgcctggctgtaattactatacccagtttttacagataaaggatctgagacatgcagaggttttaagctgacttgcctgacaccccattgctagtaagtagtagaaccaggagttggatttagcagtctggctgtagagtcatcaatagtttgcacatgacagaaagctggaagaaatagtcaacctgaaacacatgatggaattataattcagaatcatcttggtagataggggcactgtgcttaaacaaaatgccattaatgggattataataaatataatgtggtagaattcaagttttgtttgccaattcaacacatcatctgttactaacgcagctttaaaaaatgcataaacgattatactacattaatttttttaaaaagtatcctgtttatggtctgattatgcctggagtattattttatatttttgacttcatgttttaagagacaatcatgccagagtcccacatgagggtgactaaaatggacaaaaagtctggaaactttcatatcaataattgattatgtattaactgaaacaaaagactagagaaagacacagtgggaattgattatgtattaactgaggaataaaagactgaagaaagacataataaatagttaaaggattatggaaaagatggtgttcagaaaaaaattaacatgcaggcctgagactgctatccctagaaaggtctgcttgcaaagttggcccttggctggcatctgggggaacttggttcttggatggattcctgccattcactgataagaatggctcaccttgcctaaagtatatgaagagtgtgctttatgtcgagctcctgcttgcttgcctctttctttgtctttctttcttttccttcctcccttccttccttccttccttccttccttccttccttccttccttccttccttccttccttcctctctctctctctttctttctttcttctttctggaattttggtacaggctaggcagaatgtgcctagatgatcagctcctagtaaaaaccttgagaact

SEQ ID NO: 406909 - DNA, 2540 bp, Homo sapiens
aactctacggcctagcaaccgttgccaaggagctcgactctgggagcggtctagagcccgggcgcctcctggggggtggggaaacggtttcgtgaggagaatttgagttaaaattataagacctaattatgagtgatcaaattaaattcattatggacagtctcaataaggagccctttaggaagaactataatttaatcacgtttgattccttggagccaatgcaactattacaagttctcagtgatgttctggctgagattgacccaaagcaacttgtggatatcagagaggagatgccagagcagacagccaaacgaatgttgagccttcttggtattcttaagtacaaaccttcaggaaatgccacagatatgagtacttttcgtcagggtttggtgattggaagtaaacctgtaatttacccagtgctccactggcttcttcagaggactaatgaactgaagaaaagagcatatttagctcgttttttaataaaacttgaggtaccaagtgagtttcttcaggatgaaactgtggctgacaccaataaacaggatatcagtgcaatggaagaagaaaaggatcagctcattaagagagttgaacatttgaagaaaagggttgagacagctcagaatcatcaatggatgcttaaaatagcaaggcaacttcgagttgaaaaagagagagaagaatatcttgcacaacagaaacaggaacaaaagaatcagctatttcatgcagtgcaaagattgcaaagagtacaaaaccagctgaaaagcatgcgccaagctgcagcagatgcaaagcctgaaagtttaatgaagaggctagaggaggagataaaatttaatttatatatggtaactgaaaaatttcctaaagaattagaaaataagaaaaaggaattacattttttacaaaaagtagtttcagagccagctatgggccattctgatcttcttgaacttgaatctaaaataaatgaaataaacacagaaattaaccagttgattgaaaagaaaatgatgagaaatgagcccattgaaggcaaactctcactgtataggcaacaggcatctatcatttcccgtaaaaaagaagccaaagctgaggaacttcaggaggccaaggagaagttagccagcctagagagagaagcatcagtaaagagaaatcagacccgtgaatttgatggtactgaagttttaaagggagatgagagacaggatctcactctgtcacccaggctggagtgcggtggtgtgatcatggcttactgcagcctgaaactcctaggctcaagtgatcctcctacctcagcctcctgagaagctcggactacaggcacgagccaccatgcccagctaattttctttttttgttttgttttgtagagatgtggtctcactatgtttcccaggctggtcttaaactcccggcctcaagcagtcctcccacttcggcctcctgaagtgttaggattacaggcgtgagcctgcgcctggctgtaattactatacccagtttttacagataaaggatctgagacatgcagaggttttaagctgacttgcctgacaccccattgctagtaagtagtagaaccaggagttggatttagcagtctggctgtagagtcatcaatagtttgcacatgacagaaagctggaagaaatagtcaacctgaaacacatgatggaattataattcagaatcatcttggtagataggggcactgtgcttaaacaaaatgccattaatgggattataataaatataatgtggtagaattcaagttttgtttgccaattcaacacatcatctgttactaacgcagctttaaaaaatgcataaacgattatactacattaatttttttaaaaagtatcctgtttatggtctgattatgcctggagtattattttatatttttgacttcatgttttaagagacaatcatgccagagtcccacatgagggtgactaaaatggacaaaaagtctggaaactttcatatcaataattgattatgtattaactgaaacaaaagactagagaaagacacagtgggaattgattatgtattaactgaggaataaaagactgaagaaagacataataaatagttaaaggattatggaaaagatggtgttcagaaaaaaattaacatgcaggcctgagactgctatccctagaaaggtctgcttgcaaagttggcccttggctggcatctgggggaacttggttcttggatggattcctgccattcactgataagaatggctcaccttgcctaaagtatatgaagagtgtgctttatgtcgagctcctgcttgcttgcctctttctttgtctttctttcttttccttcctcccttccttccttccttccttccttccttccttccttccttccttccttccttccttccttcctctctctctctctttctttctttcttctttctggaattttggtacaggctaggcagaatgtgcctagatgatcagctcctagtaaaaaccttgagaact

SEQ ID NO: 406910 - DNA, 483 bp, Homo sapiens
gggaaaaaaaagttgttgtgaggattcagtgagctcatgcatgtcctgaatgttattaggtgttaccactagaggaaaggttgtgtgtgaaggggttttagcaatgagggcaggttgaacaataggtgttgttgactggaatcattcgtgtggatagcatggatctctgtatttcctcagtgtagaatagaatgacccagggctggaggtacccatgtaggtcttcaaacctagaagttgattgccatcaaatcctgattcttttttagggcaaaggtaaataattaaaatctcttgtgcaatacattttgaatacttaagaaattaaaatttaggcagaaatttaggaaagtggtttgctcccaagcttgttataagatcttgttataagctagttataagcttgttataagatcagagctacttctccacacttaaattgttttatttaacacctctgcctagtcataaatatattttttc

SEQ ID NO: 406911 - DNA, 464 bp, Homo sapiens
ctggacccaggatggggctgaactgggagaggtagctgtggacctgctcctcgctctgccctcaccctaagagctgatggggcatccaccaggaagagcattcctgggcagggagagggccatgagcagccttgtcctgtatgtgagacacagctcagcccggtcacaagatccagatgactatgactgcaattcaggggaagtagagaatgaagattgaccagaataaccctctgggaatgtgccctgggcctcctagagggaagagcttcccttctattcagcgctgcaggatccacagaggaaggagagccctggccaccagggaggagccacatgagaggacccggtgtccccacaaatgggaacggtcctgggcccagtctgtgctgacgcagccgccctcagtgtctggggccccagggcagagggtcaccatctcctgcactgggagcagctccaac

SEQ ID NO: 406912 - DNA, 963 bp, Homo sapiens
tgctggaattacaggcatgagccactgcgcctcaccacatttctctttttgtaagatgagggaacaagtctttatgattttctaggacctctctgggaaatcttaggcataaaacacatcctaaaaattttattttttcaaaacagaggttcagtttggaaaggcaaaaccagagttgtatacagtaagaccttcttcttcaaagggttcccttgtcctttgttccctgctttcaaggccagactctcttactctctgtgttcccttgccctgggaaacaaccttcctctcagtctttatctatagagcccacattccacatctgctactcactctgtaaatcacccctcccatcacaacgccccctcccccgactgccaaaactgtttttccaccggtgtaaccacatccctgcacttctcaagttagccaaccgtgttcggcttagattgtgctgtccaactctagccagtggggactggacacagcagtaggagccaacgcgttagtgataaagctgctgctttcctttgttggatgtgctcttgtgatcagactaatgagcagcacccttctgcagaagtaaactttgccttgctgagaaatcaactattggagtgttcatttcatttgtgacttcgagctttatttctaacaagagttgtcaagggaattttaagtagggtaagacaggagcacaggtgtttaagaagcaatgtctggttatataatcaaagcggtaaaacatttaaaaataaacatagatgataacacaattttaaataatttaaaattcttttcacacgtgagtactccttgttctctctctctcttttttttttcttaagagcattaatcaagtcaacataaagcactgaaaataattctggtgagacacagaatgtctgctagctaggcagattccacagaaggtaaagaacatcctttcacattgtaggcatt

SEQ ID NO: 406913 - DNA, 479 bp, Homo sapiens
aatgcgtagatttagggagctgatgagtttggtcctagttcttacccatgatgcttcaaacaaagacaacagggtgagctttgagggcttccaagtggatgtccttaggacagtccaagtgaagcagctgaactactccatcgggagaaaattctgcacagaaggaaagttacaagtgcaagtttccatgggcacatgaggctcagaggtggctcaaggccacaggaggctccagaggtccccgcaaagaaagccagctgctctagctccacttcctgcctggcggttctgagatttttagttcttatcctgaaatattaggctatatccgtcgcaccggaagaacaagttcctgcttcatcacagaacaggcactctatatttgctgcagcgagtgaactctgggcaagggtacagaaaagaggtgcacagaggcctgtttctagtaacacaggctggcctcctgttgaagacatgag

SEQ ID NO: 406914 - DNA, 391 bp, Homo sapiens
ggatattatataaaaatatccttgaaatggaaaattactgaacacactttaaactttagatataatgtaaaaatattaatatcattgtgcagccatgtcaaaattttttaatcagccagtaaggtcaaatattctaaccgtggaggcagaggttgttttaagagcctgtacattggagtcagactgcctgggattgaaccccatttctacaaattaaccttctgtatgcctctttttcctcacttgtaaaatagaaaacaatgataacatgtctttctcagtaattttgaggattaaatgaatttacatatatataagcacttagaatagaacttgacggagagtgttatttaaatgtttgttttcatttgtcacaaaatctaaaataaaa

SEQ ID NO: 406915 - DNA, 405 bp, Homo sapiens
ctaaagcccagaagacagaccagtgcaccggatgcccgtaccgcgtgatggccaggaaggcccggctgtgcagctcctgcttgatggcgctttgcagacggagccagtgaccaccgaggctgtgccactgcatcgggccaccatgctgatatgcccggtcccagagctgctagagaagaggtacagaggcagcgaagacacgttgagggggaggacgagaccaactgcgagacgccgagtcccgggctctcaggacgctctcccgtacctgcgccctcgtcagcccatcaccgaaagaacggcctgacccagggtcacactgcagactttgcagtgagccgagatcatgcgactgcactccagtctgggcaacagagactccatctcaaaaaaataaataaaaat

SEQ ID NO: 406916 - DNA, 805 bp, Homo sapiens
ctaaagcccagaagacagaccagtgcaccggatgcccgtaccgcgtgatggccaggaaggcccggctgtgcagctcctgcttgatggcgctttgcagacggagccagtgaccaccgaggctgtgccactgcatcgggccaccatgctgatatgcccggtcccagagctgctagagaagaggtacagaggcagcgaagacacgttgagggggaggacgagaccaactgcgagacgccgagtcccgggctctcaggacgctctcccgtacctgcgccctcgtcagcccatcaccgaaagaacggcctgacccagggtcacactgcactgaatgcttcctgttttgctgtctctcggaggataaaagacactcttggctgggcgcagtgtctcaagcctgtaatcccagcacttcaggaggctgaggcaggaggatcacttgagctcaggagttggagacagtgagaccctgtctttacaaaaaattaaaaaatgacctagcctcaacttggtcaggcgtggtggctcacgcctgtaatctcagcattttgggaggctgagatgggtggatcacgaggtcaggagttcaagaccagccaaaaatggggtatttaaaaacccgcccataatttctcactgctctgagaccaagataaaaacgtggccccggccagcctcacacaggagcctttctgctcctacaaagccccatgagcctgctccctccctagagggaaggttctggggccctggggatcccatgaggctctttccacagacaacagaggttcagagaagtgaagtggtg

SEQ ID NO: 406917 - DNA, 441 bp, Homo sapiens
tgtaatgacaaggtttcaccatcttgcccaggctggtcttgaactcctgggctcaagcaagcctccctccttggcctcccaaagtgctaggattacaggtgtgagccaccgtgcctggcctcaagtgttttttaaaaacaaataaggaaacaggtctaactgggaaagtgtcttacacaggatcacacatctagctagaggcacaggggagaccttcaagtctgagccaggacttaccacccattactgcttctatcaggtccaaacagcctggcagtaatcctcttgaaaatgtttcctaattgtccataaaaccactctgataataggttctgctttctctcctccttggccccttagctttcttcaacatagacagctccctttcctgacaagctcttcatgaagctatttcacgagactgaaacccttacctgtttc

SEQ ID NO: 406918 - DNA, 497 bp, Homo sapiens
ccatgaaggacagagacgacaaaggcaggtggaatagatagagaagagattcaaggtctgagctctacattactcaaactgttagagattaggaagaagaggaagacctggcaaaagaatgtcctgggatgtagaaagaaaaccagaagcttgtgttctctggaaaccaaatgaagaaagggcttccagaaggacagacaaagtgtagtgtgtcaaaggctcctgagcaatcagaggagagcacaaaggggctcacaggactttggtatctggatcacccagtgacacttcctgatcatgagaaactgtcagaccaacaggggcactttctgaaaccagcagttcttcagtgcccaaatgcaaccttgatggtttgattttggaggatggcaattcattaacagcactccccagtgataaatatgaaaaccaataaaaccccccacccaaggcaatctctcccagctcctcgctttgagtaaagtgagtaacctcca

SEQ ID NO: 406919 - DNA, 439 bp, Homo sapiens
gcggccgcgccgcagaaggtgaaggaacagcgcgaggcacgcagccgccgcaccgtggcgcgcacgagctcagccggccggcgaccccagcgcgcccacaggacagtggcagccggaaagtgggttcctgcatggtaacaagaccttaaaattgtgtcactggagaaggacgtgcagttcccgctgaggagagacttggccactccaggacaacacaggactacaagtcaggaatttgaagatgaaaagtgctcaacagtgataaatcctaaatgtttcactgaacaacctttcagatagccttcttgaagtttgctgaattatggctataaggaccactccccacccctgctaggtatggagaggtcatctcctaggttgcagtgagccgagattgcaccactgcactcaagcctgggtgacagaaaaagactccatc

SEQ ID NO: 406920 - DNA, 583 bp, Homo sapiens
ggaaaatggataataatgaagcccacagattttcactccagaactgactttgctgcagaggagtgaggagagctgcctggcaacgcaacgcatcgctgtgcataaactttgtttacagccaaggctggagtaaaggaacagatggcaagaaaatcggatttaaagaaaggaaggatgtgcttgcatctgggagctcggtaaatctcttggcttctggtgtgcgtacaagggtgacgtctagctaccccagcagtcgcgtcccagtttgctgttgatttttgcctgtttggatctgtctctgaggatggttaatacatcttattacaagcatttatctcatccctcccacaggaaatgtgttttcccagggatttgtatgttccctaaccttttatggaaagcagtttcttgatcatccatgtgattgtgtatctaaaatttcaagaatatttaagctgttaatcctgcttgtctgtagaagatgggtttatatttctatgatcttggaaatatttacaatgagcatgtataacaaggagaaataagcataaacatttatgcctgccacattcgtaagcatgct

SEQ ID NO: 406921 - DNA, 511 bp, Homo sapiens
  misc_feature (510)..(510): n is a, c, g, or t
ctaatttttgtatttttagtagagacagggttttatcatgttggccaggctggcctcgaactcctgacctcaagtgatctacccgccttggcctctcaaagtgcagggattataggagtgaacaactgtgcccaggctgtcttcagcatattttctattactcaagaataagaactgtacactctacctaatgtggactacattccctaccttggatacacattttggctccacacttacattcatgctattccctttacctagaatattctttttcttttcacacttaaaaaaatttcttctggtgaaatcaaactgtctctctaataccatatccacatataatcatctccctgaggttttccctaatcatccttgttctctgttcctaatagtttggtaatgcttaatttttattactccagggttactgataacataattgtatttagggtacttattttaatacacatcttacgagtgcaatctggggatcctgctagagatcgnc

SEQ ID NO: 406922 - DNA, 538 bp, Homo sapiens
tactccagggttactgataacataattgtatttagggtacttattttaatacacatcttacgatactcagcaaatgtttgttggcaatcataataaaccagaaagtgctaaatcaattagtatctttagtgttcttatattaaaattgaaataaggatattaatacattaatataatttaaccacaggaagcagggtggatagaaaagagcttagattttagaacctatagagttcaagtactaacgtcactgtgtactagcgatgtgacttctagcaagtcagcctctttgtgcctcagtatcttcacctataaaacgatgcattatttgaatttaaaaggattatgaaatttaaattcaatttttattagctttcctccctcttcgtgatagaattttatggcttactcctttacagataacaccaatgggcgtgaaatctactataaagttcagtgatatatcctaaacattcaaatttaccttacttacaaattgtggccattttgtctgttttaataaatagatttctacatt

SEQ ID NO: 406923 - DNA, 366 bp, Homo sapiens
ggattacaagcaggtgccaccaggcccagctaatttttgtatttttagtagagacagggttttatcatgttggccaggctggcctcgaactcctgacctcaagtgatctacccgccttggcctctcaaagtgcagggattataggagtgaacaactgtgcccaggctgtcttcagcatattttctattactcaagaataagaactgtacactctacctaatgtggactacattccctaccttggatacacattttggctccacacttacattcatgctattccctttacctagaatattctttttcttttcacacttaaaaaaatttcttctggtgaaatcaaactgtctctctaataccatatcc

SEQ ID NO: 406924 - DNA, 460 bp, Homo sapiens
gccatcaaactccaaatggtcgtgcaaccggagcctcggaagatggcgccttctgccgggaacccttagataggcttctgagggagctctgactgccgtttcccaaaacaccgctccctgttagcaggaagcagtttagatcggtcttcgtcctcacccctatccttgttctaacagtagtttgatgtacttcttgagaggggggaatgagacagccaagtgtaaaggggtccccagagaacctctgacaaacccgcacactgggaggaatgtgcactggggtggagcctctggaagttcgtgctgaggagcctggcccctcctcttccagggtggaacctgggattcaacctgagaggtgggaagcgtgtactagcaggactctcactctgccgagggtccccgtttccccgctttttttttttgcccaataaattccatttttctcacccttcaaagt

SEQ ID NO: 406925 - DNA, 1547 bp, Homo sapiens
cggccgccctggggacgcagacgccaaggcccctccggccagggccgggagccgggccggcctagccagttctgaaagccccatggccccagcaggcctctgagccccaccatgggcagcttgtactcggagtacctgaaccccaacaaggtccaggaacactataattataccaaggagacgctggaaacgcaggagacgacctcccgccaggtggcctcggccttcatcgtcatcctctgttgcgccattgtggtggaaaaccttctggtgctcattgcggtggcccgaaacagcaagttccactcggcaatgtacctgtttctgggcaacctggccgcctccgatctactggcaggcgtggccttcgtagccaataccttgctctctggctctgtcacgctgaggctgacgcctgtgcagtggtttgcccgggagggctctgccttcatcacgctctcggcctctgtcttcagcctcctggccatcgccattgagcgccacgtggccattgccaaggtcaagctgtatggcagcgacaagagctgccgcatgcttctgctcatcggggcctcgtggctcatctcgctggtcctcggtggcctgcccatccttggctggaactgcctgggccacctcgaggcctgctccactgtcctgcctctctacgccaagcattatgtgctgtgcgtggtgaccatcttctccatcatcctgttggccatcgtggccctgtacgtgcgcatctactgcgtggtccgctcaagccacgctgacatggccgccccgcagacgctagccctgctcaagacggtcaccatcgtgctaggcgtctttatcgtctgctggctgcccgccttcagcatcctccttctggactatgcctgtcccgtccactcctgcccgatcctctacaaagcccactactttttcgccgtctccaccctgaattccctgctcaaccccgtcatctacacgtggcgcagccgggacctgcggcgggaggtgcttcggccgctgcagtgctggcggccgggggtgggggtgcaaggacggaggcgggtcgggaccccgggccaccacctcctgccactccgcagctccagctccctggagaggggcatgcacatgcccacgtcacccacgtttctggagggcaacacggtggtctgagggtgggggtggaccaacaaccaggccagggcagaggggttcatggagaggccactgggtgaccccagatagagacgtggggctactgagccagatgcccccgccccacagacctgggtgatgttgcaaatatttcacacctggaaaggccagataaggcactgactagtcacatagcagtgttgcagtgcggtcctgagggccagtccagtggctagtgtgacccctttagaactggatcctggggaggccagggcaggggacctgtgaagagccagggtgagggcaggcagcatttaaggggagctcagggcaggagcactttaccacctggtacaaaggatttttttttttttttgagacggaatcttgca

SEQ ID NO: 406926 - DNA, 868 bp, Homo sapiens
cggccgccctggggacgcagacgccaaggcccctccggccagggccgggagccgggccggcctagccaggtgagcgcgcgtggcgacaaggaggcagaaaaggcgggcctggtcccctgaggtctcgggatccgagctgaggggccccaatcggggggctggggcgcgcacgcgccgcctgggttcctgctgcacggagcgggtggtcacagtgcgccctctccaagaatccgggcggcccccactgcctcggccgcgaacccgcagactgtgctccccgcctttctcagcggcaggaagttggcgccggggagaaggctgaatccgagcgctttcgactggagtctttgggaggcaggacgccgtgctcggggaccggggtcttggggagtgtgtttgggggggggcaacacccctcctggctgactccggctgagcgagggcaaaaggatgtgcgcgccgtggagcctccaagccaaggggcggcacccacgggagggcggtcggacgtcgggctttctgcctcggtttccccaagttgtttgcctcctccggtcccccggcggggggcgtggctttgttttgtaaggaaagagaaagtgactgcgtggctcagacgcctcctctttcaactccggctcagggatgggtcgtgggtgaaggcgcgcgtggcgcggacctcgcgtggccccgagccgggcggagcgtcggaactcgcccccttctcaggcacgggttgactcacccggggatttccaccccctcctctgtctctgtccttgtcagatgctccgggccccacgcgctgagcccacagtccccctcgtggggcgacacggccaggcgcggaactcgcggtgcagctgct

SEQ ID NO: 406927 - DNA, 740 bp, Homo sapiens
cacttagtaggaatttatttgttgggtggacacacagtaggcacttaatgcctatttgctgcgttgacacctagtaggtacttccaaggctctttgttgagtcaataaatgtgacctcgtgttttcttccaagtccagggtcccaggggtaagcccagaggtaacctggggttgaagacagttgtttcaggttgaggccacctggccaggagtactgtgacgtcaccaggctgcgtgacgtttcgcgccggccggttctcacgggtgggggctgggaggggcagagtgagagatcgggtggggggggcggacaaagggccctccgtgcagctcctgtcggcccccgcccaaggggcggcacccacgggagggcggtcggacgtcgggctttctgcctcggtttccccaagttgtttgcctcctccggtcccccggcggggggcgtggctttgttttgtaaggaaagagaaagtgactgcgtggctcagacgcctcctctttcaactccggctcagggatgggtcgtgggtgaaggcgcgcgtggcgcggacctcgcgtggccccgagccgggcggagcgtcggaactcgcccccttctcaggcacgggttgactcacccggggatttccaccccctcctctgtctctgtccttgtcagatgctccgggccccacgcgctgagcccacagtccccctcgtggggcgacacggccaggcgcggaactcgcggtgcagctgct

SEQ ID NO: 406928 - DNA, 1231 bp, Homo sapiens
cggccgccctggggacgcagacgccaaggcccctccggccagggccgggagccgggccggcctagccagttctgaaagccccatggccccagcaggcctctgagccccaccatgggcagcttgtactcggagtacctgaaccccaacaaggtccaggaacactataattataccaaggagacgctggaaacgcaggagacgacctcccgccagatggcagcgacaagagctgccgcatgcttctgctcatcggggcctcgtggctcatctcgctggtcctcggtggcctgcccatccttggctggaactgcctgggccacctcgaggcctgctccactgtcctgcctctctacgccaagcattatgtgctgtgcgtggtgaccatcttctccatcatcctgttggccatcgtggccctgtacgtgcgcatctactgcgtggtccgctcaagccacgctgacatggccgccccgcagacgctagccctgctcaagacggtcaccatcgtgctaggcgtctttatcgtctgctggctgcccgccttcagcatcctccttctggactatgcctgtcccgtccactcctgcccgatcctctacaaagcccactactttttcgccgtctccaccctgaattccctgctcaaccccgtcatctacacgtggcgcagccgggacctgcggcgggaggtgcttcggccgctgcagtgctggcggccgggggtgggggtgcaaggacggaggcgggtcgggaccccgggccaccacctcctgccactccgcagctccagctccctggagaggggcatgcacatgcccacgtcacccacgtttctggagggcaacacggtggtctgagggtgggggtggaccaacaaccaggccagggcagaggggttcatggagaggccactgggtgaccccagatagagacgtggggctactgagccagatgcccccgccccacagacctgggtgatgttgcaaatatttcacacctggaaaggccagataaggcactgactagtcacatagcagtgttgcagtgcggtcctgagggccagtccagtggctagtgtgacccctttagaactggatcctggggaggccagggcaggggacctgtgaagagccagggtgagggcaggcagcatttaaggggagctcagggcaggagcactttaccacctggtacaaaggatttttttttttttttgagacggaatcttgca

SEQ ID NO: 406929 - DNA, 124 bp, Homo sapiens
ggaaaggaaactacactgacattttagcaaaattcagacccctccaataatactaatgctatagcttttcattagtaaagaggggttaggtttagggagggactattatcatccttgcttcaaa

SEQ ID NO: 406930 - DNA, 436 bp, Homo sapiens
aacccaatcctcttatcacaacaattaaaaacagggaagctgaaagccaccgtggcccacccaaactgcacctggtcaccttgtctacattcagatttagatgaaagccacaccatggaggcagccagaggcccatgggagatgtctggattcgcagaggaatagctccatgtgatgcaaaccttgactaatgggaacaggaaaagggaggaaaccaggaagataaatctccctcccttctcattgctccttgcaacccttcccacttgaagcatgaccacatttaatgaacaacctgctgtgtctcttggaagcttgctgcaaggcagcaatcagcacaataacattgtattgtatcttcctctgcttcacttctcttcctccctcaccctcactgccctgagctggcacatcccaaagaaagcattaccacatt

SEQ ID NO: 406931 - DNA, 916 bp, Homo sapiens
accctcagaacctagctttcctgcctgcccccagggctaatccagaggtgggggaggggctaaagacactgggctctgccaggggccttggatgagcttatcatggaacataagaaaaataaaacagatgtcagcctgtgtatgaagaattcatccacaagatttgagcagaccgaagactgtgagacttcctccccacagtgagctaaaaggacgcttttgtcagagtggggaaataaaagggctttatgggaaggaagataagaacagatgagtcagaggtttctgcttaatggtggtacagccaagcagacaggcaagtaagtggccatactgctactgcctcatgtaggatccggcaggctggtgggttatcagtcctcacgtgggaccctcccaccatggcagctgagcacatccaagctgggggatcctgaagagaccttcacctgggtgccacgtggaagattggccagcaccattttgactcctgtggatgggtgagtgttttgcccacccccaccccaataacatcagcacccaaactgcacctggtcaccttgtctacattcagatttagatgaaagccacaccatggaggcagccagaggcccatgggagatgtctggattcgcagaggaatagctccatgtgatgcaaaccttgactaatgggaacaggaaaagggaggaaaccaggaagataaatctccctcccttctcattgctccttgcaacccttcccacttgaagcatgaccacatttaatgaacaacctgctgtgtctcttggaagcttgctgcaaggcagcaatcagcacaataacattgtattgtatcttcctctgcttcacttctcttcctccctcaccctcactgccctgagctggcacatcccaaagaaagcattaccacatt

SEQ ID NO: 406932 - DNA, 1256 bp, Homo sapiens
accctcagaacctagctttcctgcctgcccccagggctaatccagaggtgggggaggggctaaagacactgggctctgccaggggccttggatgagcttatcatggaacataagaaaaataaaacagatgtcagcctgtgtatgaagaattcatccacaagatttgagcagaccgaagactgtgagacttcctccccacagtgagctaaaaggacgcttttgtcagagtggggaaataaaagggctttatgggaaggaagataagaacagatgagtcagaggtttctgcttaatgctcactcttcaattctttcccgagcaaaaccaagaatcttcttgggctaagccccaatttggggttcacctgccttgcagcaacatggcaccaaacatgcggcagaagagagaaaacgacagcatgagagacggagaaagaaatggccagttggcaaggtggtaatgagagacagcagttggcaagacagtgagagacagcaagagatggcaagtgacagttattgttaagatgacaaatggagagatggcaagaaatagagaagcagtcagtgatggaggctgcaagagttgtaacactaaccaaaggctctttttagaatcatcgttttccctggcaggtggtacagccaagcagacaggcaagtaagtggccatactgctactgcctcatgtaggatccggcaggctggtgggttatcagtcctcacgtgggaccctcccaccatggcagctgagcacatccaagctgggggatcctgaagagaccttcacctgggtgccacgtggaagattggccagcaccattttgactcctgtggatgggtgagtgttttgcccacccccaccccaataacatcagcacccaaactgcacctggtcaccttgtctacattcagatttagatgaaagccacaccatggaggcagccagaggcccatgggagatgtctggattcgcagaggaatagctccatgtgatgcaaaccttgactaatgggaacaggaaaagggaggaaaccaggaagataaatctccctcccttctcattgctccttgcaacccttcccacttgaagcatgaccacatttaatgaacaacctgctgtgtctcttggaagcttgctgcaaggcagcaatcagcacaataacattgtattgtatcttcctctgcttcacttctcttcctccctcaccctcactgccctgagctggcacatcccaaagaaagcattaccacatt

SEQ ID NO: 406933 - DNA, 1390 bp, Homo sapiens
accctcagaacctagctttcctgcctgcccccagggctaatccagaggtgggggaggggctaaagacactgggctctgccaggggccttggatgagcttatcatggaacataagaaaaataaaacagatgtcagcctgtgtatgaagaattcatccacaagatttgagcagaccgaagactgtgagacttcctccccacagtgagctaaaaggacgcttttgtcagagtggggaaataaaagggctttatgggaaggaagataagaacagatgagtcagaggtttctgcttaatgctcactcttcaattctttcccgagcaaaaccaagaatcttcttgggctaagccccaatttggggttcacctgccttgcagcaacatggcaccaaacatgcggcagaagagagaaaacgacagcatgagagacggagaaagaaatggccagttggcaaggtggtaatgagagacagcagttggcaagacagtgagagacagcaagagatggcaagtgacagttattgttaagatgacaaatggagagatggcaagaaatagagaagcagtcagtgatggaggctgcaagagttgtaacactaaccaaaggctctttttagaatcatcgttttccctggcaggtggtacagccaagcagacaggcaagtaagtggccatactgctactgcctcatgtaggatccggcaggctggtgggttatcagtcctcacgtgggaccctcccaccatggcagctgagcacatccaagctgggggatcctgaagagaccttcacctgggtgccacgtggaagattggccagcaccattttgactcctgtggatggctaaagtgacccagcaggcttcctgagccttaggcattacctgtcatcttcactcttggagacctcaatcctcagttccaggtaaagacaatccttgcacaaggcttccaactcgacccgcctactgacctggagaatgaaagtgtcctgcctcggggcccctcagatcagcacccaaactgcacctggtcaccttgtctacattcagatttagatgaaagccacaccatggaggcagccagaggcccatgggagatgtctggattcgcagaggaatagctccatgtgatgcaaaccttgactaatgggaacaggaaaagggaggaaaccaggaagataaatctccctcccttctcattgctccttgcaacccttcccacttgaagcatgaccacatttaatgaacaacctgctgtgtctcttggaagcttgctgcaaggcagcaatcagcacaataacattgtattgtatcttcctctgcttcacttctcttcctccctcaccctcactgccctgagctggcacatcccaaagaaagcattaccacatt

SEQ ID NO: 406934 - DNA, 1140 bp, Homo sapiens
accctcagaacctagctttcctgcctgcccccagggctaatccagaggtgggggaggggctaaagacactgggctctgccaggggccttggatgagcttatcatggaacataagaaaaataaaacagatgtcagcctgtgtatgaagaattcatccacaagatttgagcagaccgaagactgtgagacttcctccccacagtgagctaaaaggacgcttttgtcagagtggggaaataaaagggctttatgggaaggaagataagaacagatgagtcagaggtttctgcttaatggtggtacagccaagcagacaggcaagtaagtggccatactgctactgcctcatgtaggatccggcaggctggtgggttatcagtcctcacgtgggaccctcccaccatggcagctgagcacatccaagctgggggatcctgaagagaccttcacctgggtgccacgtggaagattggccagcaccattttgactcctgtggatgggaaaccctggaacagtgtctataagtcatgaaaaacagagcaattgaaatggaatctcacttgggaccccagtcactgctccagactgaccagtcagtggacaaggcttctcgcattgctcaccagcacccaaactgcacctggtcaccttgtctacattcagatttagatgaaagccacaccatggaggcagccagaggcccatgggagatgtctggattcgcagaggaatagctccatgtgatgcaaaccttgactaatgggaacaggaaaagggaggaaaccaggaagataaatctccctcccttctcattgctccttgcaacccttcccacttgaagcatgaccacatttaatgaacaacctgctgtgtctcttggaagcttgctgcaaggcagcaatcagcacaataacattgtattgtatcttcctctgcttaatttttctcttaccttatggctgagtgcatccaaagaaagatacccttaaaaaaaaaaaaaaagggggggtaaaatccggggccattacgtccgtttgaagggccagaggagaaaaaagagggggaaagggggaaaggggtctgagaccctggggaggaccaaacagaaaattgaccgcgggtactctaaataaggtctga

SEQ ID NO: 406935 - DNA, 462 bp, Homo sapiens
ctttgaagccaggcattcacttatctctctagctatcagttctagatgactacttcttccaataggaagttgttttgtctgcactgaaaatgttgagtgtagccaacttcatttacgatcttggctagatattctggataacttgctacttcaccttgcatttttgctatggagatggcttctttccttaaacctcatgaaccaaccactgctagcttcaaacatgacttctggttcctgacctctctcagccttcataaaattgaagagaattagggccttactctggggttacgctttggcctaagggaatgttgtggctagtttgatctcctatagagaccactaaaactttctccatatcagaaataaggctgtttgctttttaaattattcatctgttcactggagtagcacctctagtttttttcaagaacttttcagccagagaatgagaagctg

SEQ ID NO: 406936 - DNA, 533 bp, Homo sapiens
aagtcaaactcatagaagcagagcgtagaacggtggttaccagaagctgggccatgaagggattgggaagatgttgttcaaagggtacacactttcacttataagatgaacaagttctgggggtctaatgtagcacatggcaactatggttaacaatactgtattgtatacttgaaatttgctaacagagtagctctcaaatgttatcacacaaaatggtaactagatacagtgatcagtgtgtgttaactgacttgattgtggtaatcatttcacaatgtatttgtataaaactcatcacattatatatcttacatttatacaatttgtcagttatacctcaataaagctgcaaagaaatatcatttctaggttgtgcccatcacaacctgtaggagttaagatttcagcctgagtttcagtttcaattccaataccactactttctatgtaatactgaacaagttttctaacatctctaaactttaatttcttcctctataatgggaataaaatcaaattattttttcaaa

SEQ ID NO: 406937 - DNA, 145 bp, Homo sapiens
cattagcagcttttaatccactaaaaaaacaagagtcttggagaatgggacctttatcttatctctgtgtctcaaatcttagcacaacgcctggcacttaataaatactgaatagcatttctggatgaatcaacgagtgaatgaa

SEQ ID NO: 406938 - DNA, 633 bp, Homo sapiens
tgttgggcaccaatgatgccaggcactactctaggtgctcaggatacaataattaataaggcagacaatgccctggcttcatggagataaatgtgttgatgaacaggaagtagatagagtggtcagagaaggctggtggagagcacagttgaccagagatctgatggaagtgagaaagcaaactatgggaatatctggaaaaagagcattccaggcagaggaatgagcaagtggcaaagatcctcaaatgcctatacttccatggaagaaggccagtgagtgaggaaaagagaggtagcaaaggggatcagagaggatacagggatccagatctcaaagggacttgtaggtaatggccaccactttggacttcatgttttcggagtgacggaaagtccctacagcctttcccagcccctagctaagcctctattgattacttctccttcttgtgctcttatcacctgtacttttatttaccagttagtctatattccatggatttctattcatctcttgtgtatcaattctatgtcctcaactatgtctcaacggcaagaatcagtcatattctcttctgtattcccagggcctggcacctaacagatgctcaataaatctttccagaaggtg

SEQ ID NO: 406939 - DNA, 370 bp, Homo sapiens
tgttgggcaccaatgatgccaggcactactctaggtgctcaggatacaataattaataaggcagacaatgccctggcttcatggagataaatgtgttgatgaacaggaagtagatagagtggtcagagaaggctggtggagagcacagttgaccagagatctgatggaagtgagaaagcaaactatgggaatatctggaaaaagagcattccaggcagaggaatgagcaagtggcaaagatcctcaaatgcctatacttccatggaagaaggccagtgagtgaggaaaagagaggtagcaaaggggctgggaaaggctgtagggactttccgtcactccgaaaacatgaagtccaaagtgtgcctacata

SEQ ID NO: 406940 - DNA, 1032 bp, Homo sapiens
  misc_feature (80)..(80): n is a, c, g, or t
  misc_feature (105)..(105): n is a, c, g, or t
gggcggtcgctgtagctgagcaggactggggctaggttctatgtccctgtggctatgtgccatggtgtcctctgggtgtntccaagagcaacaagaaacgaatanatctctggtgactttttgaaaaaatagtatctcttgttgcaagaaatggtccatctgtgatttcaagtctctcgcttgagtgaattggatggaagtggtgaatttcagccaaagtggccaaagaaatcctgttcctgtgataatgacgccatcagcctctgcatctctgtcttcccttctgccacatgttgcctgttctccgtgactttgacccttctcaggtgcagccagagagacactagcccactgatggacggacagacgtgggcagggtccgtgtcactaaaccacccaccactgccacagctgcctacaacagacacatcagatgacactccgggcaaataaatgattttcactgaggacttactggttttaataataggtcctggtgtagagaagtccctcaacctattgtgcaatgagttttgagaagcgggtaagctgtatgttttgtggttttgtttcataaattcatctacaggaagaccaatattgactgaatgaagctttcatttaaagagctaaaatatgctttgtgtttttatatgtggatactactttaaacctaacgactattcattgtatcatagcttgtgatgtattctgctcatggcttttaaggtaaattgtgccatgatccactgccattctaattgctttaacaagtcattaccacactactgttacatcttaattatgcatacagacaggtagacttgttttacatatgtgaactaactagttgtcaaagcaaatgcagattgtattctgcaagtaaagtctttttctctctgaaatttctagggatgttctttaagtgaaattcatattaaaactgaagattttagttacagaactgagtgcagattaaagtcttttgtgattcaacatagtcagcagtacaccttccgtgcgggatcctca

SEQ ID NO: 406941 - DNA, 829 bp, Homo sapiens
  misc_feature (80)..(80): n is a, c, g, or t
  misc_feature (105)..(105): n is a, c, g, or t
gggcggtcgctgtagctgagcaggactggggctaggttctatgtccctgtggctatgtgccatggtgtcctctgggtgtntccaagagcaacaagaaacgaatanatctctgacccttctcaggtgcagccagagagacactagcccactgatggacggacagacgtgggcagggtccgtgtcactaaaccacccaccactgccacagctgcctacaacagacacatcagatgacactccgggcaaataaatgattttcactgaggacttactggttttaataataggtcctggtgtagagaagtccctcaacctattgtgcaatgagttttgagaagcgggtaagctgtatgttttgtggttttgtttcataaattcatctacaggaagaccaatattgactgaatgaagctttcatttaaagagctaaaatatgctttgtgtttttatatgtggatactactttaaacctaacgactattcattgtatcatagcttgtgatgtattctgctcatggcttttaaggtaaattgtgccatgatccactgccattctaattgctttaacaagtcattaccacactactgttacatcttaattatgcatacagacaggtagacttgttttacatatgtgaactaactagttgtcaaagcaaatgcagattgtattctgcaagtaaagtctttttctctctgaaatttctagggatgttctttaagtgaaattcatattaaaactgaagattttagttacagaactgagtgcagattaaagtcttttgtgattcaacatagtcagcagtacaccttccgtgcgggatcctca

SEQ ID NO: 406942 - DNA, 370 bp, Homo sapiens
gtaagagcttccttgtgtatgaggatgatgtccaggatgttggtctggtgtccctgagacagcactaacaggtccatggctgggtccaggtcattcctggactcattggcaaagagcttactgatgttcttgaaggcatctctggtgaagtggatggcctagtcaagttccaaggcctggctgaagctgaagaaaaactggccacctcctgatgctctttctaaaagcctgtcactgtcatctgcttgcttgtcaactcattggctgtgaggatgagctgagtggcctgtgtccatcttcttggggaagcatttgaagccatcagtcttgctctcccacccctaaaggttgagggtcaccacctggggtt

SEQ ID NO: 406943 - DNA, 851 bp, Homo sapiens
ggtagttgctctgtcctgttgtagcctactttgcattgctgtgtgaaagactgggaaagactgaaaggctctggattgaacatagtggcctgtttcagttaccgtagggcccagagcttacccagaggaaaaataaactcatctacaacactaaaatagtcacagggtcaccaaggcaaagacctagaggggtccatggaggactctatgtgcatagagaaacactggatgtgaggtaataaccagggatttgggtagactggtgaactagggcacatgccatcatggacaaaggaatagccatagttccccatcaactgggactgtgcagggtgagggtgtgcagaacaactccagagctacagacctttgtatttgccatgttaaagtttttgccacagttaaagcagataaatgcaatgtcatgtacattcacttcacctctctcaaactgtatcttggcacccatcactccccaggtaggaactgggagctgagagaagtgatagcctgacgtccaggaaagtggtttttgcagtctggccagggtttctggtcactaacacacacttcatgccttcacagtcttgctggccaacagagtgggcacaggcagatgggggcatttaacacagttgacagagctggtattttagaaggagctagagatccagaaccttgtagaatatggtgtttggcaccttttttttttgatatggagtcttgctctgtcgcccaagctggagtgcagtggcgcgattttggctcacggcaagctccacctcctaaatggctcacgccattctcctgcctcagcctcccgagtagctggaactacagttgcccgccac

SEQ ID NO: 406944 - DNA, 1265 bp, Homo sapiens
tcggaaacagccagggctttcgcaacagtgaagctgcagatcccatttatttccgtcttagtagcattgtctctgttcaaatgaggtcactgaacttttaaaaacttcactgagggtcgtgcttctttgcatattgatcatgtgaatgtttagtggacttgccttagttgctggtacctaagatagagattaagggccctcaaggggtattcagacctcaaattcagccaaacacaggcgcagcttttcctgggtctgagtgagctgaggaaagcacttttgaatgtgcaaggacaataagattaataaccactaccatctctgcagtacgtactgtgtaccagacgctgtgccaagtgaccaacagacattaccgaattcatctttgccgcaacccaacaagggaactgagggtcagagaaggggtccagccaggggccgccaaggttcggactcagcctgggaccactggctccaaagctgggggtccttactcctgttgagctgcaggcccctccaacacaggcagtgggtgggcccccaaatagctcatcttcaaggatatggcctccggaaagcccagggaaagtgtggatcgattttcctgggtcaaggaagaatcaaacctacacttctttacctatttgatgacacaaacccctttgagaaccaggggttggatggagcctctccctgcaaaaaagaccccatctgccaaactgcaggggtccagagaccccctgccccctgaaacccttccatggacctcaggtttagaatctctccattaagccatgagcatgattatttgaaagttaaaatgaggccagaagggataatagtaacagtcataataatacgaataacaggatacattttactgatcacctgttgtcaggcatttatgccaggggtcggcaaacattttctgtaaaaggctaaatactaaacattttagactttgcaggctatacagtctcagatccattgaccagaaccacaggccagccactgggaccctggatgactccaacaagccctggagccatctacgcaactccatgaggagtcgggggatgggggccaccaagctccccttgttattagccacagacaatatgtaaacaaatggtcacgcttgtgttcccataaaacttcacggacaccaaaacctgaagtttatataatgttcatgtgtcacgaaatgctacaaaatgctattcttttgattttttccccccaaaattaaaaagtgtaaaaaccgg

SEQ ID NO: 406945 - DNA, 1788 bp, Homo sapiens
  misc_feature (1)..(1): n is a, c, g, or t
  misc_feature (6)..(6): n is a, c, g, or t
ngacgngggcggggatcagagagaagcgagggcctggttctgaggggtcggcttgagatcggctgagggaagcgggctcagggtctgtgaggaggcaaggttcgcagagaacaggccagccaggaggtcaggaggccccagagaagcactgaagaagacctgcctgtgggtctcaattgcccagctccggcccacactctcctgctgccctgacctgagtcatcatgcttcttgggcagaagagtcagcgctacaaggctgaggaaggccttcaggcccaaggagaggcaccagggcttatggatgtgcagattcccacagctgaggagcagaaggctgcatcctcctcctctactctgatcatgggaacccttgaggaggtgactgattctgggtcaccaagtcctccccagagtcctgagggtgcctcctcttccctgactgtcaccgacagcactctgtggagccaatccgatgagggttccagcagcaatgaagaggaggggccaagcacctccccggacccagctcacctggagtccctgttccgggaagcacttgatgagaaagtggctgagttagttcgtttcctgctccgcaaatatcaaattaaggagccggtcacaaaggcagaaatgcttgagagtgtcatcaaaaattacaagaaccactttcctgatatcttcagcaaagcctctgagtgcatgcaggtgatctttggcattgatgtgaaggaagtggaccctgccggccactcctacatccttgtcacctgcctgggcctctcctatgatggcctgctgggtgatgatcagagtacgcccaagaccggcctcctgataatcgtcctgggcatgatcttaatggagggcagccgcgccccggaggaggcaatctgggaagcgttgagtgtgatggggctgtatgatgggagggagcacagtgtctattggaagctcaggaagctgctcacccaagagtgggtgcaggagaactacctggagtaccgccaggcgcccggcagtgatcctgtgcgctacgagttcctgtggggtccaagggcccttgctgaaaccagctatgtgaaagtcctggagcatgtggtcagggtcaatgcaagagttcgcatttcctacccatccctgcatgaagaggctttgggagaggagaaaggagtttgagcaggagttgcagctagggccagtggggcaggttgtgggagggcctgggccagtgcacgttccagggccacatccaccactttccctgctctgttacatgaggcccattcttcactctgtgtttgaagagagcagtcacagttctcagtagtggggagcatgttgggtgtgagggaacacagtgtggaccatctctcagttcctgttctattgggcgatttggaggtttatctttgtttccttttggaattgttccaatgttccttctaatggatggtgtaatgaacttcaacattcattttatgtatgacagtagacagacttactgctttttatatagtttaggagtaagagtcttgcttttcatttatactgggaaacccatgttatttcttgaattcagacactacaagagcagaggattaaggtttttttagaaatgtgaaacaacatagcagtaaaatacatgagataaagacataaagaaattaaacaatagttaattcttgccttacctgtacctcttagtgtaccctatgtacctgaatttgcttggcttctttgagaatgaaattgaattaaatatgaataaataagtccccctgct

SEQ ID NO: 406946 - DNA, 2039 bp, Homo sapiens
  misc_feature (1)..(1): n is a, c, g, or t
  misc_feature (6)..(6): n is a, c, g, or t
ngacgngggcggggatcagagagaagcgagggcctggttctgaggggtcggcttgagatcggctgagggaagcgggctcagggtctgtgaggaggcaaggagctccaggaaccaggctgtgaggtcttggtctgaggcagtatcttcaatcacagagcataagaggcccaggcagtagtagcagtcaagctgaggtggtgtttcccctgtatgtataccagaggcccctctggcatcagaacagcaggaaccccacagttcctggccctaccagcccttttgtcagtcctggagccttggcctttgccaggaggctgcaccctgagatgccctctcaatttctccttcaggttcgcagagaacaggccagccaggaggtcaggaggccccagagaagcactgaagaagacctgcctgtgggtctcaattgcccagctccggcccacactctcctgctgccctgacctgagtcatcatgcttcttgggcagaagagtcagcgctacaaggctgaggaaggccttcaggcccaaggagaggcaccagggcttatggatgtgcagattcccacagctgaggagcagaaggctgcatcctcctcctctactctgatcatgggaacccttgaggaggtgactgattctgggtcaccaagtcctccccagagtcctgagggtgcctcctcttccctgactgtcaccgacagcactctgtggagccaatccgatgagggttccagcagcaatgaagaggaggggccaagcacctccccggacccagctcacctggagtccctgttccgggaagcacttgatgagaaagtggctgagttagttcgtttcctgctccgcaaatatcaaattaaggagccggtcacaaaggcagaaatgcttgagagtgtcatcaaaaattacaagaaccactttcctgatatcttcagcaaagcctctgagtgcatgcaggtgatctttggcattgatgtgaaggaagtggaccctgccggccactcctacatccttgtcacctgcctgggcctctcctatgatggcctgctgggtgatgatcagagtacgcccaagaccggcctcctgataatcgtcctgggcatgatcttaatggagggcagccgcgccccggaggaggcaatctgggaagcgttgagtgtgatggggctgtatgatgggagggagcacagtgtctattggaagctcaggaagctgctcacccaagagtgggtgcaggagaactacctggagtaccgccaggcgcccggcagtgatcctgtgcgctacgagttcctgtggggtccaagggcccttgctgaaaccagctatgtgaaagtcctggagcatgtggtcagggtcaatgcaagagttcgcatttcctacccatccctgcatgaagaggctttgggagaggagaaaggagtttgagcaggagttgcagctagggccagtggggcaggttgtgggagggcctgggccagtgcacgttccagggccacatccaccactttccctgctctgttacatgaggcccattcttcactctgtgtttgaagagagcagtcacagttctcagtagtggggagcatgttgggtgtgagggaacacagtgtggaccatctctcagttcctgttctattgggcgatttggaggtttatctttgtttccttttggaattgttccaatgttccttctaatggatggtgtaatgaacttcaacattcattttatgtatgacagtagacagacttactgctttttatatagtttaggagtaagagtcttgcttttcatttatactgggaaacccatgttatttcttgaattcagacactacaagagcagaggattaaggtttttttagaaatgtgaaacaacatagcagtaaaatacatgagataaagacataaagaaattaaacaatagttaattcttgccttacctgtacctcttagtgtaccctatgtacctgaatttgcttggcttctttgagaatgaaattgaattaaatatgaataaataagtccccctgct

SEQ ID NO: 406947 - DNA, 2067 bp, Homo sapiens
  misc_feature (1)..(1): n is a, c, g, or t
  misc_feature (6)..(6): n is a, c, g, or t
ngacgngggcggggatcagagagaagcgagggcctggttctgaggggtcggcttgagatcggctgagggaagcgggctcagggtctgtgaggaggcaagcaggcaaaaaacagatgggggcccaacagaaatctgcccggcctcttttgtcacccctgagagcatgagcaggactatcagctgaggcccctgtgttataccagactcattggtctcagggagaagaaggccttggtctgagggcactgcattcaggtcagcagagcgggggtccaaggccctgccaggagtcagggactcagaggacaccactcaccaaacacacaggaccgaaccccaccctgcaccttctgtcagccatgggaagtgcagggaaaggttcgcagagaacaggccagccaggaggtcaggaggccccagagaagcactgaagaagacctgcctgtgggtctcaattgcccagctccggcccacactctcctgctgccctgacctgagtcatcatgcttcttgggcagaagagtcagcgctacaaggctgaggaaggccttcaggcccaaggagaggcaccagggcttatggatgtgcagattcccacagctgaggagcagaaggctgcatcctcctcctctactctgatcatgggaacccttgaggaggtgactgattctgggtcaccaagtcctccccagagtcctgagggtgcctcctcttccctgactgtcaccgacagcactctgtggagccaatccgatgagggttccagcagcaatgaagaggaggggccaagcacctccccggacccagctcacctggagtccctgttccgggaagcacttgatgagaaagtggctgagttagttcgtttcctgctccgcaaatatcaaattaaggagccggtcacaaaggcagaaatgcttgagagtgtcatcaaaaattacaagaaccactttcctgatatcttcagcaaagcctctgagtgcatgcaggtgatctttggcattgatgtgaaggaagtggaccctgccggccactcctacatccttgtcacctgcctgggcctctcctatgatggcctgctgggtgatgatcagagtacgcccaagaccggcctcctgataatcgtcctgggcatgatcttaatggagggcagccgcgccccggaggaggcaatctgggaagcgttgagtgtgatggggctgtatgatgggagggagcacagtgtctattggaagctcaggaagctgctcacccaagagtgggtgcaggagaactacctggagtaccgccaggcgcccggcagtgatcctgtgcgctacgagttcctgtggggtccaagggcccttgctgaaaccagctatgtgaaagtcctggagcatgtggtcagggtcaatgcaagagttcgcatttcctacccatccctgcatgaagaggctttgggagaggagaaaggagtttgagcaggagttgcagctagggccagtggggcaggttgtgggagggcctgggccagtgcacgttccagggccacatccaccactttccctgctctgttacatgaggcccattcttcactctgtgtttgaagagagcagtcacagttctcagtagtggggagcatgttgggtgtgagggaacacagtgtggaccatctctcagttcctgttctattgggcgatttggaggtttatctttgtttccttttggaattgttccaatgttccttctaatggatggtgtaatgaacttcaacattcattttatgtatgacagtagacagacttactgctttttatatagtttaggagtaagagtcttgcttttcatttatactgggaaacccatgttatttcttgaattcagacactacaagagcagaggattaaggtttttttagaaatgtgaaacaacatagcagtaaaatacatgagataaagacataaagaaattaaacaatagttaattcttgccttacctgtacctcttagtgtaccctatgtacctgaatttgcttggcttctttgagaatgaaattgaattaaatatgaataaataagtccccctgct

SEQ ID NO: 406948 - DNA, 385 bp, Homo sapiens
attcagtattgccaccatatctaagcttatgattagtggtctcttcttgttgaagaagctgtgggtcagtttgagtgacaaactcaaatggcaaatcacatctggtgggagttgtgttgcacattagtcctgtgaagtaaggtcacatatcagtttgcaggagtttggaaatctaaaaaaacgagtcctttaccatgggtagtttgagatgcactgctctggagaatgacgttagagagctctctaggttggcttaaaatgtgggattttgttggatgctcttccattaactggtcctgctactaagtgctgtattagcactggtgcacattgaactacagaagcattgttgctcttcactagtcaatgcaaacttgtaagtagt

SEQ ID NO: 406949 - DNA, 550 bp, Homo sapiens
tacctactgtgtcacagcactgcatgtggctcaacagaccagggctttaaatgcctttgacatctactctctgaagaaatacatttatatcacaacccagtgtacaatacatgaagccatcgtgcctggcctagtcttctttttactaaaaagtgagattattaagtgtaaaaagacctactagtaccaaatgagatttttttctaaactcgattatgagaattgaaagaaaagtggaaaaataatcacttcttctgtgggtgatttgtgttatttgctgcccaatctgggttccacctaaaaccgtctcaggtacaccactgcgcagcctcccagaaccacccacctccttcctgacggccaggagacaaaggacccttgggcgcgatcagccgcaccttcaggctgagtggccaggagtcctcccgtggcccagcccacctctctctttcaggaattcaagtcagcgtttttgttggtccggatctgaagccacttcttccaggcagctgcccctgatctctcaacttcatagcattttggctcttta

SEQ ID NO: 406950 - DNA, 550 bp, Homo sapiens
tataccaggggtccccaacccccaggccatggacaagtactggtccatggcctgttaggaactgggccacacagcaggaggtgagcagaaggtgagtgagcattaccacctgagccgcctcctgtcatatcagcggcagcattcgattctcataaaagtgcaaagcctattgtgaactgcataggcgagggatctaggttgcccgctccttatgagaatctaatgtctggtgatctgaggtggaacagtttcatcccaaaaccatccctccacacctgtctgtggaaaaattgtcttctatgaaattggtccatgccaaaaaggttgccaaaaaggttggggaccactggtacataggacttgctctataaatgtttgttgaatgatttctgcagtgctaatgagctccatgcacaaggtttaggaaattgggctgaatctgtacaaatcccagatcatactttgaaaaactgtgattagttttcttgatactaaattcctcatatgagcttgtcctgttagcactttctttcacaaagtgagatgtaga

SEQ ID NO: 406951 - DNA, 453 bp, Homo sapiens
gttcctctcttttggacataatctggggtttttagtattcctcctaaattgttgtacccagaaagagcaaagagagtggtatctcttcattgtggtgaagaacagagcttttcacccgtttcattctgccgtatgtctttgaattgtagtatattgatttctgctttgaggtctcttttaatagcatcccaattttaattattgtttggttgctattttgttattctgttttcttataaggatgtgtgtcattaatattcattgagtactcactgtgcatattactgtattctgccaaataggaaaaacttagaatagaaaaatttgttcttctctcaagtgtcttatagaatgatcaaggataaggtgcatatttactgatgctttaaaaataatacttaaactgcagtacttaaagtagtgctcatggactctaaatccagagaaaatgga

SEQ ID NO: 406952 - DNA, 538 bp, Homo sapiens
  misc_feature (531)..(531): n is a, c, g, or t
ggctcccgggctggtagcgcgccgctctcggtcgcgcggagtgatcgtgtggaatcgcgggtcgcggacgctcgccgccggccatagctcagcctagcgccgccaaggccgacggccctcagcctctgccatggacttcgaggacgattacacacactccgcctgcaggaatacttatcagggctttaatggaatggatcgtgattatggccctggatcttatggaggtctgacattcaaggatatttatctaaaaattcttcttttgagtgccagtaaagcatatgggtgattttggaagcattcatagacccggaattgttgttgactatcaaaacaaatccaccaatgtgacagttgctgctgcaagaggaataaagagaaaaatgatgcagccatttaataagcccagtggaacctttatcaagaaacccaaactagcaaaacctatggagaagataagcctcagcaaatcacccacaaaaactgatcctaaaagtgaagaagaataaaagagaaagaaaggaagancggcaga

SEQ ID NO: 406953 - DNA, 1538 bp, Homo sapiens
  misc_feature (451)..(451): n is a, c, g, or t
ggctcccgggctggtagcgcgccgctctcggtcgcgcggagtgatcgtgtggaatcgcgggtcgcggacgctcgccgccggccatagctcagcctagcgccgccaaggccgacggccctcagcctctgccatggacttcgaggacgattacacacactccgcctgcaggaatacttatcagggctttaatggaatggatcgtgattatggccctggatcttatggagggatggatcgtgactatggccatggatcctatgggggtcagagatccatggattcctacctaaaccagtcatatggcatggacaatcacagtggtggtggtgggggtagcaggtaaattgcttaatcatttggccaaataattagacaactataagattttggatatattattttaagtactctttaggcatgttatgatacttgaacttcactgtttgctatngaatcatcaccttaaatatttaaaggtgttaattaatgggtataaaatttaaatcagtattactggcagacgttattttaggaaaacaccagataactatatcatgtcaatataatagagtaagatacactttttagcagtgaacttttaaaaaattcttttacttttaacttcttgtcaaagtatcctgaaaaatgatataaaaatgttattgaaaatattatttatgaagctttttcttaataattaaaaaaaatcttttctaatgtggggtgctatgtaaattagcaaagcagtctaactagaatggattttactgaaccagtctaacatttactttccaagaaacattcaggacatattcctttaattctaattttaaaggaagagcatattgcaataataaaaatatttttaaaattatgttcaggttatttattgacaggtactacttacaccaaagcacttgtgctctaggctagaagcattgtattaaagccatgaatactatacctttgactagtcgagattgtatttatattttcctgttactactgtataaagcttaaacctacttaaacaactacaagctttaaggttgaccatatttcaggagaaggggtgtctactttttgaggcacaaaggttcctgctgaatataagtaaaactagttagtagacatgtgaaacagtcatccttctgcataaattgaaggatccggattccttaatgatggactgaatgatgcttactttccttctttctgcttccagtgtaccactatggtttatagtaaagaaaaattaagaaagtgaacagttgcaactattttgcttatgtgatagatgttttgaaaaatgtagttggaaataggaataatttttatatggttactaggattcagaagtaaatctatttagtgatctgtaaataattgaagtaatgtaacacttaatgttttaatatgtcagttattgcccttttatattgtgaatgtaatgtgcataagctatatccgtagatgttattgttttatctcatgtgtaattgtgggcctttataaaattgtgttgtaagatatcaagc

SEQ ID NO: 406954 - DNA, 494 bp, Homo sapiens
gtgtatatatgtgtgtgtgtgtgtgtgtgtgtatgattatttagaaatacagttaaggggaaaatatgacctttaagcatttcagttatggaggataaagtaatggcttcagtaaattatatgctcacattggtatggaatggacagtcaacaaatacttaatgaatttgttataatttacaatgaaaagtttcaaaatggcatttatttctcatgatatggcaagtaaaaatttcacttgccagatcatgtaataatgaatgtgctgattttgaaagccatgttctatttgctgatggtgagaatccttttgaaattcaagaccattctcaggatcagcaaatagaaggagatgaggaggatgaagagaagattgatgaacctattgaagaagaggaggatgaagatgaagaagaagaagcagaggaagtgggggaagtagaggaagtggaagaagtagaggaagtgagagaaggaggaatagagggcgaggg

SEQ ID NO: 406955 - DNA, 2145 bp, Homo sapiens
ggctcccgggctggtagcgcgccgctctcggtcgcgcggagtgatcgtgtggaatcgcgggtcgcggacgctcgccgccggccatagctcagcctagcgccgccaaggccgacggccctcagcctctgccatggacttcgaggacgattacacacactccgcctgcaggaatacttatcagggctttaatggaatggatcgtgattatggccctggatcttatggagggatggatcgtgactatggccatggatcctatgggggtcagagatccatggattcctacctaaaccagtcatatggcatggacaatcacagtggtggtggtgggggtagcaggtttggaccttatgagtcttacgactccaggtcttctctgggtgggcgagatctgtacagatctggctatggttttaatgaacccgaacaaagccgcttcggaggtagttatggtggtcgatttgagagctcctaccggaatagccttgactctttcggaggtagaaaccagggcgggtctagctgggaagcaccttactcccgttcaaaattgaggcctgggtttatggaggacagaggaagagagaattactcttcctacagcagtttttcttcaccccatatgaagcctgcacctgtaggctctcgggggagaggaacgcctgcttatcctgaaagtacgtttggaagcagaaactatgatgcttttggaggaccatcaacaggcagaggccgaggccgaggacatatgggtgattttggaagcattcatagacccggaattgttgttgactatcaaaacaaatccaccaatgtgacagttgctgctgcaagaggaataaagagaaaaatgatgcagccatttaataagcccagtggaacctttatcaagaaacccaaactagcaaaacctatggagaagataagcctcagcaaatcacccacaaaaactgatcctaaaaatgaagaggaagaaaagcggcgaattgaggctcggcgagagaaacaaaggcgcagaagagaaaaaaacagtgagaaatacggagatggatacagaatggcatttacatgttcattttgtaaatttcgaacatttgaagaaaaagatattgaactgcatctggaaagttcttcacatcaggaaacattagatcatatacagaaacaaactaaatttgataaagtagttatggagtttttgcatgagtgtatggtgaataaattcaagaaaacatctattcgtaagcaacagacaaataatcaaacagaagtagttaaaataattgaaaaagatgttatggaaggtgttactgtagatgatcacatgatgaaggtagagacagttcattgcagcgcttgcagtgtttatatccctgctttacatagttcagttcagcagcacttaaaatctcctgatcatatcaaagggaagcaggcttataaggaacaaataaaaagagagagtgtcttgactgctacaagcattttaaataatccaatagtgaaggcgcgatatgaacgttttgttaagggtgagaatccttttgaaattcaagaccattctcaggatcagcaaatagaaggagataagcctcagcaaatcacccacaaaaatgatcctaaaaatgaagaggaagaaaagcggcgaattgaggctcggcgagagaaaccaaaggcgcaaggaagagaaaaaaaccagtgagaaatacggagatggatacagaatggcatttaccatgttcatttttcgtacactttccgaacatttgaagaaaaagatattgaacttgcatctggaaagttcttcacatcaggaaacattagatcatatacagaaacaaactaaatttgataaagtagttcatggagtttttggcatgagtgtattgggggaattagatgcaaggaacaacattttatttcgtaagggcaaagacaaattattccaccagaaagtagttaaacataaattgacaacgatgggttggacgtgttctgtggatgtcacttgtggaggttcagcagttatgaggttggcagtgttaatcctgttattattagtcagggctaaactctggacttcaaggaaccggttagaaataagaagggttgggtatttaatacagggcaaattgcgggaactgg

SEQ ID NO: 406956 - DNA, 1594 bp, Homo sapiens
  misc_feature (451)..(451): n is a, c, g, or t
ggctcccgggctggtagcgcgccgctctcggtcgcgcggagtgatcgtgtggaatcgcgggtcgcggacgctcgccgccggccatagctcagcctagcgccgccaaggccgacggccctcagcctctgccatggacttcgaggacgattacacacactccgcctgcaggaatacttatcagggctttaatggaatggatcgtgattatggccctggatcttatggagggatggatcgtgactatggccatggatcctatgggggtcagagatccatggattcctacctaaaccagtcatatggcatggacaatcacagtggtggtggtgggggtagcaggtaaattgcttaatcatttggccaaataattagacaactataagattttggatatattattttaagtactctttaggcatgttatgatacttgaacttcactgtttgctatngaatcatcaccttaaatatttaaaggtgttaattaatgggtataaaatttaaatcagtattactggcagacgttattttaggaaaacaccagataactatatcatgtcaatataatagagtaagatacactttttagcagtgaacttttaaaaaattcttttacttttaacttcttgtcaaagtatcctgaaaaatgatataaaaatgttattgaaaatattatttatgaagctttttcttaataattaaaaaaaatcttttctaatgtggggtgctatgtaaattagcaaagcagtctaactagaatggattttactgaaccagtctaacatttactttccaagaaacattcaggacatattcctttaattctaattttaaaggaagagcatattgcaataataaaaatatttttaaaattatgttcaggttatttattgacaggtactacttacaccaaagcacttgtgctctaggctagaagcattgtattaaagccatgaatactatacctttgactagtcgagattgtatttatattttcctgttactactgtataaagcttaaacctacttaaacaactacaagctttaaggttgaccatatttcaggagaaggggtgtctactttttgaggcacaaaggttcctgctgaatataagtaaaactagttagtagacatgtgaaacagtcatccttctgcataaattgaaggatccggattccttaatgatggactgaatgatgcttactttccttctttctgcttccagtgtaccactatggtttatagtaaagaaaaattaagaaagtgaacagttgcaactattttgcttatgtgatagatgttttgaaaaatgtagttggaaataggaataatttttatatggttactaggattcagaagtaaatctatttagtgatctgtaaataattgaagtaatgtaacacttaatgttttaatatgtcagttattgcccttttatattgtgaatgtaatgtgcataagctatatccgtagatgttattgttttatctcatgtgtaattgtgggcctttataaaattgtgttgtaagatatcaagcaacttttgtaatccatgctttgggtttgtgagaaggaagatgatttatttcttctg

SEQ ID NO: 406957 - DNA, 739 bp, Homo sapiens
gcctcttggtgtagtagatttggataatgacaagagaagaggaagggacacaaagagtcgtttggttgcatgactcttcatctgtaaacttttgtttcttgggcttctgggtcagaaaatgtttctctaggtaagaatgtgaatggaacgtcagatgcaattctttatctgaagtgtgtcttggaagttgatgcatggttatgctttaactctcctatttcatactaatgttccatctcgccttctcattccctttttcaacagggagaatactaaatgatttctggatcttttttacttcaaactacaaatatggtcttctttgtgtatcttagttttagtaaaataaagatttcttttagggtcttttcatgggaaaacatcaattaggaactctgaagaggagttgtcagagagttgtacaagtggtaacatttggacaggcacatatgttgtctataatctcaagtaattttgaaatgtaaaagtaaaaacatagttagcaaatattcattatttgttctactggaaataaaaatactaattcaatggatttgagtttatgtaataatttacagagtttttcaatgtgttttttcagaatggacatgtaaaatttagttacattccagggaattttcaggtgaaaattagtagatagttaacatgaaaattttatatgaattcatattttttcttggacaatatgctaatatttattgatttcacaaatttacag

SEQ ID NO: 406958 - DNA, 175 bp, Homo sapiens
tttgttttaactattctcagttttgcagataattgggttaatgtcattttaaaaattgtgcttgttttttactggatcggcatataattttgaattattgctaatatcacactaattcctttttgttaaatgtgtcttcatagattacacacactccgcctgcaggaatacttat

SEQ ID NO: 406959 - DNA, 1728 bp, Homo sapiens
ggctcccgggctggtagcgcgccgctctcggtcgcgcggagtgatcgtgtggaatcgcgggtcgcggacgctcgccgccggccatagctcagcctagcgccgccaaggccgacggccctcagcctctgccatggacttcgaggacgattacacacactccgcctgcaggaatacttatcagggctttaatggaatggatcgtgattatggccctggatcttatggagggatggatcgtgactatggccatggatcctatgggggtcagagatccatggattcctacctaaaccagtcatatggcatggacaatcacagtggtggtggtgggggtagcaggtttggaccttatgagtcttacgactccaggtcttctctgggtgggcgagatctgtacagatctggctatggttttaatgaacccgaacaaagccgcttcggaggtagttatggtggtcgatttgagagctcctaccggaatagccttgactctttcggaggtagaaaccagggcgggtctagctgggaagcaccttactcccgttcaaaattgaggcctgggtttatggaggacagaggaagagagaattactcttcctacagcagtttttcttcaccccatatgaagcctgcacctgtaggctctcgggggagaggaacgcctgcttatcctgaaagtacgtttggaagcagaaactatgatgcttttggaggaccatcaacaggcagaggccgaggccgaggacatatgggtgattttggaagcattcatagacccggaattgttgttgactatcaaaacaaatccaccaatgtgacagttgctgctgcaagaggaataaagagaaaaatgatgcagccatttaataagcccagtggaacctttatcaagaaacccaaactagcaaaacctatggagaagataagcctcagcaaatcacccacaaaaactgatcctaaaaatgaagaggaagaaaagcggcgaattgaggctcggcgagagaaacaaaggcgcagaagagaaaaaaacagtgagaaatacggagatggatacagaatggcatttacatgttcattttgtaaatttcgaacatttgaagaaaaagatattgaactgcatctggaaagttcttcacatcaggaaacattagatcatatacagaaacaaactaaatttgataaagtagttatggagtttttgcatgagtgtatggtgaataaattcaagaaaacatctattcgtaagcaacagacaaataatcaaacagaagtagttaaaataattgaaaaagatgttatggaaggtgttactgtagatgatcacatgatgaaggtagagacagttcattgcagcgcttgcagtgtttatatccctgctttacatagttcagttcagcagcacttaaaatctcctgatcatatcaaagggaagcaggcttataaggaacaaataaaaagagagagtgtcttgactgctacaagcattttaaataatccaatagtgaaggcgcgatatgaacgttttgttaagggtgagaatccttttgaaattcaagaccattctcaggatcagcaaatagaaggagatgaggaggatgaagagaagattgatgaacctattgaagaagaggaggatgaagatgaagaagaagaagcagaggaagtgggggaagtagaggaagtggaagaagtagaggaagtgagagaaggaggaatagagggcgaggg

SEQ ID NO: 406960 - DNA, 501 bp, Homo sapiens
ggcacgagggtggtatacgcctgtggtttcagcctcccaagtagttgagactacaggcatgcaccaccacgcccagctaatttttgtatttttagtagagatgggggtctcactatgttgaccagactggtctcgaactcctgacctcaagtcatctgcccacctcggcctcccaaagtgctggggttacaggcatgagctaccatgcccagacccacacctcattttccattaatggaaccaggactccttggttccaacctggggccgggaaaatatattatgaacttagaatactgtattttatagaacatccggaaagtaaggacctattcaaagcatgatgggggaaatgtcacaggcaaaagtagtgatgacttgagcatcaaaataaataactttagaaacgttataacccaggtaatcaaataggttgcagtgagccgagattgtgccactgtactccagcgtgggtgacagagtgagactctgtctcaaatt

SEQ ID NO: 406961 - DNA, 674 bp, Homo sapiens
aattaactatctgacctctaccccacccccccgcaacttcatggaaaaatgactttctcagcgttcgttcctgaaattattgccaaacccagtgttttattcttcaccctgtttgcctcctctgagcattgaatgttacctacctctctccttgaatcctggctccagctatcctggttacgttctgaatgtgcctttgcacggtattttgtgactcttcttttctgtactgataccttttctttctggatactttcttctatggcagtctcatacattctcaaggatttaacatttactccacttaaaagagttccaagatcatctactgaatcattaagcaaatatttgttaaatccaggctctatgcccttccaagttgaggcaacagcagtgggaaggaggcaggaaacaaactgcatctgttggaggaactgcaagaagctagtgtgattgggagggctgtggggagcagagggaagtggctggagtctgatctctaagtgtctagccccttcctttctcccaaggccccagtccacactatctggcatcttcacttcatggctaatttaacactgtcagtgctgtcaattgctcttcccccagaactgtatttttcacatctgaagttctgttaaaggacaacgtttcacaaataaaaatgataacta

SEQ ID NO: 406962 - DNA, 2455 bp, Homo sapiens
actccgtgctggaagtaggaggagagtcaggactcccaggacagagagtgcacaaactacccagcacagccccctccgccccctctggaggctgaagagggattccagcccctgccacccacagacacgggctgactggggtgtctgccccccttgggggggggcagcacagggcctcaggcctgggtgccacctggcacctagaagatgcctgtgccctggttcttgctgtccttggcactgggccgaagcccagtggtcctttctctggagaggcttgtggggcctcaggacgctacccactgctctccgggcctctcctgccgcctctgggacagtgacatactctgcctgcctggggacatcgtgcctgctccgggccccgtgctggcgcctacgcacctgcagacagagctggtgctgaggtgccagaaggagaccgactgtgacctctgtctgcgtgtggctgtccacttggccgtgcatgggcactgggaagagcctgaagatgaggaaaagtttggaggagcagctgactcaggggtggaggagcctaggaatgcctctctccaggcccaagtcgtgctctccttccaggcctaccctactgcccgctgcgtcctgctggaggtgcaagtgcctgctgcccttgtgcagtttggtcagtctgtgggctctgtggtatatgactgcttcgaggctgccctagggagtgaggtacgaatctggtcctatactcagcccaggtacgagaaggaactcaaccacacacagcagctgcctgccctgccctggctcaacgtgtcagcagatggtgacaacgtgcatctggttctgaatgtctctgaggagcagcacttcggcctctccctgtactggaatcaggtccagggccccccaaaaccccggtggcacaaaaacctgactggaccgcagatcattaccttgaaccacacagacctggttccctgcctctgtattcaggtgtggcctctggaacctgactccgttaggacgaacatctgccccttcagggaggacccccgcgcacaccagaacctctggcaagccgcccgactgcgactgctgaccctgcagagctggctgctggacgcaccgtgctcgctgcccgcagaagcggcactgtgctggcgggctccgggtggggacccctgccagccactggtcccaccgctttcctgggagaacgtcactgtggacaaggttctcgagttcccattgctgaaaggccaccctaacctctgtgttcaggtgaacagctcggagaagctgcagctgcaggagtgcttgtgggctgactccctggggcctctcaaagacgatgtgctactgttggagacacgaggcccccaggacaacagatccctctgtgccttggaacccagtggctgtacttcactacccagcaaagcctccacgagggcagctcgccttggagagtacttactacaagacctgcagtcaggccagtgtctgcagctatgggacgatgacttgggagcgctatgggcctgccccatggacaaatacatccacaagcgctgggccctcgtgtggctggcctgcctactctttgccgctgcgctttccctcatcctccttctcaaaaaggatcacgcgaaagggtggctgaggctcttgaaacaggacgtccgctcggggggtgagtgggagcaagcgctgggcggagggccgcccccggggagccaggcctgtgccagctcacctcttccctccccatctgttttctccggcagcggccgccaggggccgcgcggctctgctcctctactcagccgatgactcgggtttcgagcgcctggtgggcgccctggcgtcggccctgtgccagctgccgctgcgcgtggccgtagacctgtggagccgtcgtgaactgagcgcgcaggggcccgtggcttggtttcacgcgcagcggcgccagaccctgcaggagggcggcgtggtggtcttgctcttctctcccggtgcggtggcgctgtgcagcgagtggctacaggatggggtgtccgggcccggggcgcacggcccgcacgacgccttccgcgcctcgctcagctgcgtgctgcccgacttcttgcagggccgggcgcccggcagctacgtgggggcctgcttcgacaggctgctccacccggacgccgtacccgcccttttccgcaccgtgcccgtcttcacactgccctcccaactgccagacttcctgggggccctgcagcagcctcgcgccccgcgttccgggcggcttcaagagagagcggagcaagtgtcccgggcccttcagccagccctggatagctacttccatcccccggggactcccgcgccgggacgtggggtgggaccaggggcgggacctggggcgggggacgggacttaaataaaggcagacgctgtttttctacccatgtggccc

SEQ ID NO: 406963 - DNA, 2425 bp, Homo sapiens
actccgtgctggaagtaggaggagagtcaggactcccaggacagagagtgcacaaactacccagcacagccccctccgccccctctggaggctgaagagggattccagcccctgccacccacagacacgggctgactggggtgtctgccccccttgggggggggcagcacagggcctcaggcctgggtgccacctggcacctagaagatgcctgtgccctggttcttgctgtccttggcactgggccgaagcccagtggtcctttctctggagaggcttgtggggcctcaggacgctacccactgctctccgggcctctcctgccgcctctgggacagtgacatactctgcctgcctggggacatcgtgcctgctccgggccccgtgctggcgcctacgcacctgcagacagagctggtgctgaggtgccagaaggagaccgactgtgacctctgtctgcgtgtggctgtccacttggccgtgcatgcctctctccaggcccaagtcgtgctctccttccaggcctaccctactgcccgctgcgtcctgctggaggtgcaagtgcctgctgcccttgtgcagtttggtcagtctgtgggctctgtggtatatgactgcttcgaggctgccctagggagtgaggtacgaatctggtcctatactcagcccaggtacgagaaggaactcaaccacacacagcagctgcctgactgcagggggctcgaagtctggaacagcatcccgagctgctgggccctgccctggctcaacgtgtcagcagatggtgacaacgtgcatctggttctgaatgtctctgaggagcagcacttcggcctctccctgtactggaatcaggtccagggccccccaaaaccccggtggcacaaaaacctgactggaccgcagatcattaccttgaaccacacagacctggttccctgcctctgtattcaggtgtggcctctggaacctgactccgttaggacgaacatctgccccttcagggaggacccccgcgcacaccagaacctctggcaagccgcccgactgcgactgctgaccctgcagagctggctgctggacgcaccgtgctcgctgcccgcagaagcggcactgtgctggcgggctccgggtggggacccctgccagccactggtcccaccgctttcctgggagaacgtcactgtggacaaggttctcgagttcccattgctgaaaggccaccctaacctctgtgttcaggtgaacagctcggagaagctgcagctgcaggagtgcttgtgggctgactccctggggcctctcaaagacgatgtgctactgttggagacacgaggcccccaggacaacagatccctctgtgccttggaacccagtggctgtacttcactacccagcaaagcctccacgagggcagctcgccttggagagtacttactacaagacctgcagtcaggccagtgtctgcagctatgggacgatgacttgggagcgctatgggcctgccccatggacaaatacatccacaagcgctgggccctcgtgtggctggcctgcctactctttgccgctgcgctttccctcatcctccttctcaaaaaggatcacgcgaaagggtggctgaggctcttgaaacaggacgtccgctcggggggtgagtgggagcaagcgctgggcggagggccgcccccggggagccaggcctgtgccagctcacctcttccctccccatctgttttctccggcagcggccgccaggggccgcgcggctctgctcctctactcagccgatgactcgggtttcgagcgcctggtgggcgccctggcgtcggccctgtgccagctgccgctgcgcgtggccgtagacctgtggagccgtcgtgaactgagcgcgcaggggcccgtggcttggtttcacgcgcagcggcgccagaccctgcaggagggcggcgtggtggtcttgctcttctctcccggtgcggtggcgctgtgcagcgagtggctacaggatggggtgtccgggcccggggcgcacggcccgcacgacgccttccgcgcctcgctcagctgcgtgctgcccgacttcttgcagggccgggcgcccggcagctacgtgggggcctgcttcgacaggctgctccacccggacgccgtacccgcccttttccgcaccgtgcccgtcttcacactgccctcccaactgccagacttcctgggggccctgcagcagcctcgcgccccgcgttccgggcggcttcaagagagagcggagcaagtgtcccgggcccttcagccagccctggatagctacttccatcccccggggactcccgcgccgggacgtggggtgggaccaggggcgggacctggggcgggggacgggacttaaataaaggcagacgctgtttttctacccatgtggccc

SEQ ID NO: 406964 - DNA, 1946 bp, Homo sapiens
actccgtgctggaagtaggaggagagtcaggactcccaggacagagagtgcacaaactacccagcacagccccctccgccccctctggaggctgaagagggattccagcccctgccacccacagacacgggctgactggggtgtctgccccccttgggggggggcagcacagggcctcaggcctgggtgccacctggcacctagaagatgcctgtgccctggttcttgctgtccttggcactgggccgaagcccagtggtcctttctctggagaggcttgtggggcctcaggacgctacccactgctctccgggcctctcctgccgcctctgggacagtgacatactctgcctgcctggggacatcgtgcctgctccgggccccgtgctggcgcctacgcacctgcagacagagctggtgctgaggtgccagaaggagaccgactgtgacctctgtctgcgtgtggctgtccacttggccgtgcatgggcactgggaagagcctgaagatgaggaaaagtttggaggagcagctgactcaggggtggaggagcctaggaatgcctctctccaggcccaagtcgtgctctccttccaggcctaccctactgcccgctgcgtcctgctggaggtgcaagtgcctgctgcccttgtgcagtttggtcagtctgtgggctctgtggtatatgactgcttcgaggctgccctagggagtgaggtacgaattggtcccaccgctttcctgggagaacgtcactgtggacgtgaacagctcggagaagctgcagctgcaggagtgcttgtgggctgactccctggggcctctcaaagacgatgtgctactgttggagacacgaggcccccaggacaacagatccctctgtgccttggaacccagtggctgtacttcactacccagcaaagcctccacgagggcagctcgccttggagagtacttactacaagacctgcagtcaggccagtgtctgcagctatgggacgatgacttgggagcgctatgggcctgccccatggacaaatacatccacaagcgctgggccctcgtgtggctggcctgcctactctttgccgctgcgctttccctcatcctccttctcaaaaaggatcacgcgaaagggtggctgaggctcttgaaacaggacgtccgctcggggggtgagtgggagcaagcgctgggcggagggccgcccccggggagccaggcctgtgccagctcacctcttccctccccatctgttttctccggcagcggccgccaggggccgcgcggctctgctcctctactcagccgatgactcgggtttcgagcgcctggtgggcgccctggcgtcggccctgtgccagctgccgctgcgcgtggccgtagacctgtggagccgtcgtgaactgagcgcgcaggggcccgtggcttggtttcacgcgcagcggcgccagaccctgcaggagggcggcgtggtggtcttgctcttctctcccggtgcggtggcgctgtgcagcgagtggctacaggatggggtgtccgggcccggggcgcacggcccgcacgacgccttccgcgcctcgctcagctgcgtgctgcccgacttcttgcagggccgggcgcccggcagctacgtgggggcctgcttcgacaggctgctccacccggacgccgtacccgcccttttccgcaccgtgcccgtcttcacactgccctcccaactgccagacttcctgggggccctgcagcagcctcgcgccccgcgttccgggcggcttcaagagagagcggagcaagtgtcccgggcccttcagccagccctggatagctacttccatcccccggggactcccgcgccgggacgtggggtgggaccaggggcgggacctggggcgggggacgggacttaaataaaggcagacgctgtttttctacccatgtggccc

SEQ ID NO: 406965 - DNA, 2514 bp, Homo sapiens
actccgtgctggaagtaggaggagagtcaggactcccaggacagagagtgcacaaactacccagcacagccccctccgccccctctggaggctgaagagggattccagcccctgccacccacagacacgggctgactggggtgtctgccccccttgggggggggcagcacagggcctcaggcctgggtgccacctggcacctagaagatgcctgtgccctggttcttgctgtccttggcactgggccgaagcccagtggtcctttctctggagaggcttgtggggcctcaggacgctacccactgctctccgggcctctcctgccgcctctggggtgccaccaaattctgggcttggaacagcttcagctcccacccgctcctccacacacagacagtgacatactctgcctgcctggggacatcgtgcctgctccgggccccgtgctggcgcctacgcacctgcagacagagctggtgctgaggtgccagaaggagaccgactgtgacctctgtctgcgtgtggctgtccacttggccgtgcatgggcactgggaagagcctgaagatgaggaaaagtttggaggagcagctgactcaggggtggaggagcctaggaatgcctctctccaggcccaagtcgtgctctccttccaggcctaccctactgcccgctgcgtcctgctggaggtgcaagtgcctgctgcccttgtgcagtttggtcagtctgtgggctctgtggtatatgactgcttcgaggctgccctagggagtgaggtacgaatctggtcctatactcagcccaggtacgagaaggaactcaaccacacacagcagctgcctgccctgccctggctcaacgtgtcagcagatggtgacaacgtgcatctggttctgaatgtctctgaggagcagcacttcggcctctccctgtactggaatcaggtccagggccccccaaaaccccggtggcacaaaaacctgactggaccgcagatcattaccttgaaccacacagacctggttccctgcctctgtattcaggtgtggcctctggaacctgactccgttaggacgaacatctgccccttcagggaggacccccgcgcacaccagaacctctggcaagccgcccgactgcgactgctgaccctgcagagctggctgctggacgcaccgtgctcgctgcccgcagaagcggcactgtgctggcgggctccgggtggggacccctgccagccactggtcccaccgctttcctgggagaacgtcactgtggacaaggttctcgagttcccattgctgaaaggccaccctaacctctgtgttcaggtgaacagctcggagaagctgcagctgcaggagtgcttgtgggctgactccctggggcctctcaaagacgatgtgctactgttggagacacgaggcccccaggacaacagatccctctgtgccttggaacccagtggctgtacttcactacccagcaaagcctccacgagggcagctcgccttggagagtacttactacaagacctgcagtcaggccagtgtctgcagctatgggacgatgacttgggagcgctatgggcctgccccatggacaaatacatccacaagcgctgggccctcgtgtggctggcctgcctactctttgccgctgcgctttccctcatcctccttctcaaaaaggatcacgcgaaagggtggctgaggctcttgaaacaggacgtccgctcggggggtgagtgggagcaagcgctgggcggagggccgcccccggggagccaggcctgtgccagctcacctcttccctccccatctgttttctccggcagcggccgccaggggccgcgcggctctgctcctctactcagccgatgactcgggtttcgagcgcctggtgggcgccctggcgtcggccctgtgccagctgccgctgcgcgtggccgtagacctgtggagccgtcgtgaactgagcgcgcaggggcccgtggcttggtttcacgcgcagcggcgccagaccctgcaggagggcggcgtggtggtcttgctcttctctcccggtgcggtggcgctgtgcagcgagtggctacaggatggggtgtccgggcccggggcgcacggcccgcacgacgccttccgcgcctcgctcagctgcgtgctgcccgacttcttgcagggccgggcgcccggcagctacgtgggggcctgcttcgacaggctgctccacccggacgccgtacccgcccttttccgcaccgtgcccgtcttcacactgccctcccaactgccagacttcctgggggccctgcagcagcctcgcgccccgcgttccgggcggcttcaagagagagcggagcaagtgtcccgggcccttcagccagccctggatagctacttccatcccccggggactcccgcgccgggacgtggggtgggaccaggggcgggacctggggcgggggacgggacttaaataaaggcagacgctgtttttctacccatgtggccc

SEQ ID NO: 406966 - DNA, 302 bp, Homo sapiens
catgacttgtgaataggcggtgagtgtgtcctttaatcagtcacacagaacttgctttataaagctgttattgtcatgaacagatattgcagtcttgtcaggcccagtgattattaaagtgttccttcttcaaaagccaggccgaaagtcctgctgtgcttcatttcacaattgaagtccattagtaaataaaatcccaagccgcacgatttgctgttcctcaagttataggcttacatatatttcattaataatcttgggcccttttgtagacataagtaggtatatttttggtatatata

SEQ ID NO: 406967 - DNA, 260 bp, Homo sapiens
gagattattttgaagaaaacagaaaaattaagattataattgtgaacattctatactatatatagtatggaaatgttggttttcttttttcgcttgctggagtggagaggagagggcagagactaaagatagatctcttgatttgtagttttcctaaaatcacatgtagaagtttcattaaagaatagtgcttggaatgtagtaggcaaaatattatggatggatggatggatggagtgggtagatggatagatggatga

SEQ ID NO: 406968 - DNA, 387 bp, Homo sapiens
aaagaaaaaaaaaaaaagactatgaaaagggtcacagaaattaatttcgcattgatgactaaaatgagagtggtagagggggagggaacagacactgaagactgaggagtgaaggtaagtttaaaaaacactgaaaacaaaaagtatgggaaatacgggtgataaagggaagaactaaaaactgggcagcagctatagggagaggcaacgttgagggaaagttttttagaaatgaaaatgacaagtatatttacagaaagacagaaaggagccaatgaagaaaaaagtctgaaaatacataaaaaagaaacaattttttctggaacaaagcccacaaaattgctagaagatatgggattgaaaaagcacaggtgggccgggcgcggt

SEQ ID NO: 406969 - DNA, 442 bp, Homo sapiens
taggctttaggccctatatttgtaaaggatagttgctacctgtatttagggattgggcatcgactgcaagaaccctggggaaaaaaattggaacctaagagtgtggcagggggcatcctagaaacctcttcaaaatgggggtcacgtgtcctcagaatggctctcaggaaggctccttggcattcatatttgtgaaaaggttgcaggaccaccatataagcgggcaaagatggctttattgcggaagcaggaagattactattctgtagctgagaaaatcagagagtagagggttttgctcctgctgcatttgaatggaattggcagtgagctggaatatagcctgcctgtgggtggagttagtgcacagcatcagtgggcaggcaagggaaaataaaatatacctactttgactttgcagccagaaagagggagaataagc

SEQ ID NO: 406970 - DNA, 447 bp, Homo sapiens
aaaaaaaaaaaaaaagaaaaaaaaacccgtctttactaaaaatacaaaaagttagctgggcgtggtggcacgcccctgtagtccctgctactcaggaggctgaggcaggagaatcgcttgaacccttggagtggaagttgcagtgagctgaggtggcaccactgcactccagtgtgggcgacagagcgagactacatctcaaaaaaaaaaaaaaaaaaaaaaggcctgggccccaccccagacctccagaatcagaatctctgggagcctggtgtggaatttgcatatttagaaacacaccaagcaagtctgataagcactaaaattcaagaactcctgggttgaagcagctgtagttaagtatacatacccctgagggtacttgaagattttccaaggcatatgtaggcatagatagttttaaagtaatcaatttccagatcattc

SEQ ID NO: 406971 - DNA, 635 bp, Homo sapiens
gggagggagataggcctggggagaagttatctcccttcagtcagttatccagatattgccaaatatctcaacacagtatctggcagaacaaatacatagaaaaatattttatatacattatgccccatcacaatggatagcaaaggattaactgtgcccatgatcatgaaagagctaccacttccacactttgggcagagagggagatgaagtcctaggctaattaaatgatggataggctcctcaagtgtatgtttttctaagggttatcatcaatatgtgcacactcatggaaatgccacctttcaagccactttaaaaacacaggtaataagaaaacaaactgattagtaaaaaacatttgatttcatagactctgttgcatgcaacccaactatttcataaggtaaaaacagtgctatatttttgataatgtcccattatcttgctttaatactatcaacaactgcttgtacaaaagaaacagccatgattgaattctgattttttttttcttgctttctgccagagtttgccaagaactgctttagcccccagcccacagcactgtggggctgcaaggaatgctctatagggtccaggattttaagagtcaaggcaagaatgagagtaag

SEQ ID NO: 406972 - DNA, 546 bp, Homo sapiens
gcgtagctccctgggcgcttcgaagatccagcggcttgctgtgagtccgggaggcaaaattgtacccatttcaaagatgtgatgactaaagtctcgagagggccaaggctcgcccaaggttgctctgtggtgacagctttacctccttgctatgtattctcagatattgcaaacggacgagagaaaagtggagaatgaatcctggagaaaacaaggtcgttcgacgatttcgacacgtcgcatccctgagagtctctcgtgtcctgatcaactcgagaactggaggcggtgacattttagatgctgcagtgaaagccacagagccacggaaggccgagactccaccatgtttgtgatcttcacattcagcaaactcactcgcactctgcctcatcttatctctagaatgtattttaccacactgtgtcccttctttagtgggaatgtctttggccaaaaataatgaatagttctgacctgacttgctaatacccagtgataaaaggatggaatttgttgggaataaaagaaaactaagcttaaaaa

SEQ ID NO: 406973 - DNA, 599 bp, Homo sapiens
gcgtagctccctgggcgcttcgaagatccagcggcttgctgtgagtccgggaggcaaaattgtacccatttcaaagatgtgatgactaaagtctcgagagggccaaggctcgcccaaggttgctctgtggtgacagctttacctccttgctatgtattctcagatattgcaaacggacgagagaaaagtggagaatgaatcctggagaaaacaaggtcgttcgacgatttcgacacgtcgcatccctgagagtctctcgtgtcctgatcaactcgagaactggaggcggtgacattttagatgctgcagtgaaagccacagagccacggaaggccgagactccaccatgtttgtgatcttcacattcagcaaactcactcgcactctgcctcatcttatctctagaatgtattttaccacactgtgtcccttctttagtgggaatgtctttggccaaaaataatgaatagttctgacctgacttgctaatacccagtgataaaaggatggaatttgttgggaataaaagaaaactaagcttaaaaacgagggccctgatgctccgttccgagcttggtcatctaatttccagccaaaaa

SEQ ID NO: 406974 - DNA, 809 bp, Homo sapiens
gcgtagctccctgggcgcttcgaagatccagcggcttgctgtgagtccgggaggcaaaattgtacccatttcaaagatgtgatgactaaagtctcgagagggccaaggctcgcccaaggttgctctgtggtgacagctttacctccttgctatgtattctcagatattgcaaacggacgagagaaaagtggagaatgaatcctggagaaaacaaggtcgttcgacgatttcgacacgtcgcatccctgagagtctctcgtgtcctgatcaactcgagaactggaggcggtgacattttagatgctgcagtgaaagccacagagccacggaaggccgagactccaccatgtttgtgatcttcacattcagcaaactcactcgcactctgcctcatcttatctctagaatgtattttaccacactgtgtcccttctttagtgggaatgtctttggccaaaaataatgaatagttctgacctgacttgctaatacccagtgataaaaggatggaatttgttgggaataaaagaaaactaagcttaaaaaaaaaaaaaaaaaaaaaaaaacttgtggggggtatgggcctgaaaaagcttttttaaaaccatctgttgtgcgccgcgggccccatgtgtatagtaccagggtgccaagcggtgtcccaagagaacacccgcggcacagacaaagggcgggaatcccacccaatataaaagcgcgcggggaacacaccgccgcgtttgaaacaactcgaagggatctcaggagcaaacgggagacttaaacagggctccacggagcccatcaaa

SEQ ID NO: 406975 - DNA, 264 bp, Homo sapiens
ttctgatcatttccacaaattcaagatattagtgatggaaaatcaactggccaaaatttcatcctgaaatattcaagcttcatttaaacgtttaaagaataagatggaaatgttacattcttttttgaaaaaggcaagaaatagaaaaatggatagattaacagactgatcagttgatttactgatcagttaatagataaacacattacacccttaagtaggttggttctttttcttccatacattgtctattttcatttttta

SEQ ID NO: 406976 - DNA, 787 bp, Homo sapiens
aaaactatattttggaagtaaattattgaaacataactatgttatatttgaatattaacaaaaggacagtggttcaataaatacagaaatgtttataacttagtgcctttatctgtgaagcttaaggataacttcctcatggtgttatgaggattaaataagattaagtaattaaagtgctaagcttagtgccaggcacataagctctttatatacgttaattgtattcctctgtataaatatataaaaggggtatgaacttgtcaacatatgcattacaaataatttcttaatcttgttagatgtttcttcatataaacattttattgtttgctgtcaactaagacacataagttagtgtatattaactttagattttatcagggaacccactaaaatactttcttggctatggattgtaccattccaaattgctactggtaattattagtaataattagagggaataaaaattttaatttattgatgttttagttttgtttgtttctttaattctgaatttgtcttaaagtttgtgatgattgttaagtccatcatgttagagatccttttaaaagtatcagttaccatcagcctgggcaacatggtgaaaccccgtccctaataaaaatacaaaaatagccaggtatggcggcacacttgtgtaatcccagctactcaggagcctgagtcaggagaatcgcttgagcccaggagctggaggttgcagtgagccgagatcgtgccactgcactccagcctgggcaacagagcgagactctctcaa

SEQ ID NO: 406977 - DNA, 467 bp, Homo sapiens
aaatcacaaaggtgtgtatttttctagagattccagacaagataattttgagggctcttatactatgattataaaaacctaataactatgttttaatgtagtgcattgtgtttttaccacttaagatggcagtgatttcatcagacagctttcttttggggagacttccaaaccaatctttgggggagaatctaatctcttttttgccaagctggtgaggttttcttcccccacattgaatgtttatatggaaagatatgaaccataaacatttttatataaaaacttattctttttgctttttattggctgcattgtaaggagtcatttggcctagagggaaaggagggtaacattccctatggcaaactacaacgaatcttccttctcctttcccaactccagcagtaatgatggaaaatcagtgcagcatcctagtgcattcgcagtgtggtttgacaaagacc

SEQ ID NO: 406978 - DNA, 339 bp, Homo sapiens
gatatattgcttgtcaaaatagctaattatagtctgtaacaagtcactagagcaaaatttaatactagtggaaaagtctgctaaaaagtttatgttttaatagtgtgtttgatggttatattattaaaagcaaagcattttaatgctttttcttcctattaactatcggcaacattttagggatatatcattaatcattgcttagtcctctcaatttctaaatgaaagatttttaaaattcagtatttaaaaactacttagtttgactcaaggtatttattctctaagtccatatggattttgtgactgcactgccctcccccaaaacagcacaacaac

SEQ ID NO: 406979 - DNA, 547 bp, Homo sapiens
atattcctacaggtaggaattttctggtgaccccctacctatggctgctctaactcatattaggagagtgaattcatttgtcctgaaagatgacttttgtattcttcttgccatgttctcccctaccccctgcctttttaaaaacaccagttcttgaaattgtgttattgtttttctttttatttctaggatgtacctacctagtatgtgttttgcaaacgctattgatgacttacacaattataaccagtgtttatcttgtcaaaaagttttacatattcagtgattctcaaattttgctcctgtggagcatagactcattgaatcgacctgaaatttccatactaaatttaaataatgatagacttttcccagtttatggaagaaactatgcatagagtttttctgttccaacattgcccctttctgggccaggcatggtggctcatgcttgtaaacccagcactttgggaggccaagatggaaggatcacttgaggccaggagtttgagactagcttgagcaacatagtgagactgtctctaca

SEQ ID NO: 406980 - DNA, 397 bp, Homo sapiens
ctactcaggaggctgaggcaggagaatcgcttgaaactgggaggcggagcttgcagtgatccgagatcacgccactgcaccccagcctgggagacagagcaagactctgtctcaaaaaaaaaaaaaagtatgcaggccaggtgcagtggctcacacctgtaatcccaacactttgggaggccaaggggggcagatcacctgagcccaggagttcgagaccagcctggccatcatggccatccctgtctttactaaaaatacaaaaattagccaggcatggtggtgggtgcctgtaatcccagctactcaggaggctgaggcagaattgtttgaacccgggaggcggaggttgcagtgaaccaagatcgtgccatcgcactccagccagagagcaaga

SEQ ID NO: 406981 - DNA, 457 bp, Homo sapiens
tgacaatacgatccaccacttcctgggtacctccctgcccccaagccagatggcatcagaccacacattggggccaagcacttcttggtgggactatgttgggagggaaacaaggctggtaccctccagccagggacaggcaccagcagcacttgcagagcctatggtgtgattagcactaggaggtggctctcactggggagtgggggcaggggagaccccggcggggatgaggcaggtcttgtggagtgaacttcacagtggagggggggcagtatggcagagtagaagacagcatggtgtcaaaatctattcaaatccttccttgtgctgtgtgatcctgagtgagtgtcctaaactctctgagcctcagtttcctccagcatagaatagagaacctgccctgtgaagatgaaataaaacacagcccacagccaaagccagcaacccctgggat

SEQ ID NO: 406982 - DNA, 460 bp, Homo sapiens
gcctaattcttcttgagtgtttagatttaatttttcaatgcagttttttcatgtatttgatgtttatactttcctgttttatagaaaaatatataattgaggataaaactgtgttaatctagccttttagtaaaccacttctttggatttctagttatactgttagaacataaccagtgtggtagttttcttaatattatctttcaagaccctaggaaaaagtaagcagccaaagtcaaacctcagaatgatggcaaattttattctaaaaaatatgagaagatcttattaaaccaaggggtaaattgagttggtggttgtagtaaatactattatgaaaaatagaaggctggacatggtggctcacacctgtaatcccagcactttgggaggctgaggtgggaggatcgcttgagctcaggagtttaagactagcctgggcaacataaggagaccctgt

SEQ ID NO: 406983 - DNA, 488 bp, Homo sapiens
agtccttagcattgatcagaattaatctttggccaggtgcagtggctcacgcctataatcccagcactttgggaggctaaggtgggaggatcatttgagcccaatttgagactagcccaggcaacatagtgagatctcatttctactggaaatgaaaaaattagccaggcatggtggcatctgcctataatcctggctactcaggaggctgaagtgggaggattgtttgagtttgggaggtcgaggctgcagtgagctaggatggcaccactgcactccagcctgggcaacagagtgagaccctgtctcaaaaaaaaaaaagaattctcaatcttctccccgaccacagccttcctcaagtaagctaaaaacaaacatcctctacattgtttgagtcaaatattggctttatccttgacacctcactttctttcctatcccatagtcaattggtctagaaataaaaataaaagtttccccagaattaa

SEQ ID NO: 406984 - DNA, 115 bp, Homo sapiens
taacagcagtttctttggtgattaacctgagctattaataattgctctttttacatcattgatattaaaatcaaactgtgaatgattactatatgagtgtctctataaagccaac

SEQ ID NO: 406985 - DNA, 209 bp, Homo sapiens
aagggcatccgaattggtaaaaaggaagtcaaactgtgactgtttgccagtgatatgactgtttacctagaaaaccctaaatactccttcagaaaactcctagaactgataaagaattcagcaaaattttgggatacaaaattaatgtacacaaatcagtaactcttctacacaccaacagcaacaaagctgagaaacaaatcaagaac

SEQ ID NO: 406986 - DNA, 350 bp, Homo sapiens
tggagacagtgtcttgccctgtcaccaaggctggagtacaatggtgcaaccacagcccactgcaacctcaacctcccgggctcaagcgattctcccacctcagcctcccaagtagctaggactacaggtatatgccatgaccccagctaatttttttttttttgtagagatggggtctcactctacaggttggtcttgaactcctgggctcaagctacatatgctttaagtaactcatgtccacctgcctcagcctcccaaagtgctgagattataggcatgagccactatgcccagccttggctttttcttagatggaaagcttagctcccaaagaagggagggactaa

SEQ ID NO: 406987 - DNA, 2237 bp, Homo sapiens
gggaaggttgcttgacaagtcaggattgtgcctccagtcagaaggaccatgaagagagagaagagggcagagccgtgcatggggctgctccccaggacctgagcaggaacctggagttttcagagctgcctgatcattgctacagaatgaactctagcccagctgggaccccaagtccacagccctccagggccaatgggaacatcaacctggggccttcagccaacccaaatgcccagcccacggacttcgacttcctcaaagtcatcggcaaagggaactacgggaaggtcctactggccaagcgcaagtctgatggggcgttctatgcagtgaaggtactacagaaaaagtccatcttaaagaagaaagagcagagccacatcatggcagagcgcagtgtgcttctgaagaacgtgcggcaccccttcctcgtgggcctgcgctactccttccagacacctgagaagctctacttcgtgctcgactatgtcaacgggggagagctcttcttccacctgcagcgggagcgccggttcctggagccccgggccaggttctacgctgctgaggtggccagcgccattggctacctgcactccctcaacatcatttacagggatctgaaaccagagaacattctcttggactgccagggacacgtggtgctgacggattttggcctctgcaaggaaggtgtagagcctgaagacaccacatccacattctgtggtacccctgagtacttggcacctgaagtgcttcggaaagagccttatgatcgagcagtggactggtggtgcttgggggcagtcctctacgagatgctccatggcctgccgcccttctacagccaagatgtatcccagatgtatgagaacattctgcaccagccgctacagatccccggaggccggacagtggccgcctgtgacctcctgcaaagccttctccacaaggaccagaggcagcggctgggctccaaagcagactttcttgagattaagaaccatgtattcttcagccccataaactgggatgacctgtaccacaagaggctaactccacccttcaacccaaatgtgacaggacctgctgacttgaagcattttgacccagagttcacccaggaagctgtgtccaagtccattggctgtacccctgacactgtggccagcagctctggggcctcaagtgcattcctgggattttcttatgcgccagaggatgatgacatcttggattgctagaagagaaggacctgtgaaactactgaggccagctggtattagtaaggaattaccttcagctgctaggaagagcgactcaaactaacaatggcttcaacgagaagcaggtttattttttccagcacataaaagaaaaataatgtttcggagtccaggactggcaggacaggtcatcagatactcagaggctgtatctctgccctgccaaccttgacaaatggcttccaatgttaggtttgctacaagatggttactggagctctagctgcctattttgtgtttagggaagggaaaatggaggaaaggggagaagagcaaagggcgcttttaaagagctttcccaaaagctccacccaatgacttctgcttccatctcactaaccacccacccctacctggaatggaggctgggagatgtggcttatttgctgggtacgtgactatccctaataacaaaggggttctgacactaagacattaggggagaatgttgggtaggcagccagcactcttttaccagagggcctcctggtgtttggattttgatctcaatgtgtaaaatgacagagatgtaacaagctcatagggtatcaatatctcttattgttctatgttgatgatatttgtctttgttgtgggtaatactggacatttgttattgggtctgggtgcctggtatctgaaccccttcttgtctccagagaaccccctattttatgagacttcatgggggggcaataactacctccacttaagagtacctgaaaatgctagacactgactttcccagcctccccttagctagggccaggcatggggaccagggataaacctgtgccacattttgactcagggaagggatcgggagcgctcttttgtgtggtaactgtgataacagtacccgcaaaattgagttcctggtgtagaagtgacaaggatgcaaactgtagcagttggtgctcagtggcagcaacgccatcagaccag

SEQ ID NO: 406988 - DNA, 2402 bp, Homo sapiens
gggaaggttgcttgacaagtcaggattgtgcctccagtcagaaggaccatgaagagagagaagagggcagagccgtgcatggggctgctccccaggacctgagcaggaacctggagttttcagagctgcctgatcattgctacagaatgaactctagcccagctgggaccccaagtccacagccctccagggccaatgggaacatcaacctggggccttcagccaacccaaatgcccagcccacggacttcgacttcctcaaagtcatcggcaaagggaactacgggaaggtcctactggccaagcgcaagtctgatggggcgttctatgcagtgaaggtactacagaaaaagtccatcttaaagaagaaagagcagagccacatcatggcagagcgcagtgtgcttctgaagaacgtgcggcaccccttcctcgtgggcctgcgctactccttccagacacctgagaagctctacttcgtgctcgactatgtcaacgggggagagctcttcttccacctgcagcgggagcgccggttcctggagccccgggccaggttctacgctgctgaggtggccagcgccattggctacctgcactccctcaacatcatttacagggatctgaaaccagagaacattctcttggactgccagggacacgtggtgctgacggattttggcctctgcaaggaaggtgtagagcctgaagacaccacatccacattctgtggtacccctgagtacttggcacctgaagtgcttcggaaagagccttatgatcgagcagtggactggtggtgcttgggggcagtcctctacgagatgctccatggcctgccgcccttctacagccaagatgtatcccagatgtatgagaacattctgcaccagccgctacagatccccggaggccggacagtggccgcctgtgacctcctgcaaagccttctccacaaggaccagaggcagcggctgggctccaaagcagactttcttgagattaagaaccatgtattcttcagccccataaactgggatgacctgtaccacaagaggctaactccacccttcaacccaaatgtgacaggacctgctgacttgaagcattttgacccagagttcacccaggaagctgtgtccaagtccattggctgtacccctgacactgtggccagcagctctggggcctcaagtgcattcctgggattttcttatgcgccagaggatgatgacatcttggattgctagaagagaaggacctgtgaaactactgaggccagctggtattagtaaggaattaccttcagctgctaggaagagcgactcaaactaacaatggcttcaacgagaagcaggtttattttttccagcacataaaagaaaaataatgtttcggagtccaggactggcaggacaggtcatcagatactcagaggctgtatctctgccctgccaaccttgacaaatggcttccaatgttaggtttgctacaagatggttactggagctctagctgcctattttgtgtttagggaagggaaaatggaggaaaggggagaagagcaaagggcgcttttaaagagctttcccaaaagctccacccaatgacttctgcttccatctcactaaccacccacccctacctggaatggaggctgggagatgtggcttatttgctgggtacgtgactatccctaataacaaaggggttctgacactaagacattaggggagaatgttgggtaggcagccagcactcttttaccagagggcctcctggtgtttggattttgatctcaataataaataaataaatacgaaaagtggtttgtttttttacaaatgtgtggttcatactcctgggtggccttattagcttttttggttgggagacaagggaaggaactttcttggatcagtgtgtgctggtgattttattgccttttcctcttaattcaatcccactctttcccttcctcaagtcttgttcacccagcctcctgccccaggaatcacggggaagaagtctgggagaccacagaaaaaacaccaatgacactgagctattagagatcaaaactgggtcaggaagagttcatgttaagctttcacatgtgctaagaacgctgaaagatacacactgatttccatcttaatagtgccggataattgacaaatttgggacaagatgagggagaggtcaaaatccccctaacttcccaaagcaaaaaaacaggagtataatgatcagaaacgtaatagtagtgtcagaagcacacaatcagctgtggacggtgaaacatataatggttctatctgttctgagattgtaaaagcacaattattttcatcaggataaaaaataaaaatgaaaaactatgctgttgaatggaaatgcta

SEQ ID NO: 406989 - DNA, 2490 bp, Homo sapiens
  misc_feature (348)..(348): n is a, c, g, or t
atgggttcagactttatgccctgaaaagatccttccagccctggccatcttggacttctggagctaccctggctcacaggggtcttgttgccctgggtgtccccagttcttgaaaagaatcagcctgggaggggccacaccctgaccatccccctttatcccttctgagatgtttgttaggaagtctgggtccaggggatatcatttcttgttccatccatgcaggggttgcttacctcgggtaggaaaccctcaggcggtggcaggtgcacaggtaggggaggatggagagggcagtggtgcctgaagccctggatgggcggagctgaccccccaacaccaactctntcatgcctgctcctccctgtccccccagagctgcctgatcattgctacagaatgaactctagcccagctgggaccccaagtccacagccctccagggccaatgggaacatcaacctggggccttcagccaacccaaatgcccagcccacggacttcgacttcctcaaagtcatcggcaaagggaactacgggaaggtcctactggccaagcgcaagtctgatggggcgttctatgcagtgaaggtactacagaaaaagtccatcttaaagaagaaagagcagagccacatcatggcagagcgcagtgtgcttctgaagaacgtgcggcaccccttcctcgtgggcctgcgctactccttccagacacctgagaagctctacttcgtgctcgactatgtcaacgggggagagctcttcttccacctgcagcgggagcgccggttcctggagccccgggccaggttctacgctgctgaggtggccagcgccattggctacctgcactccctcaacatcatttacagggatctgaaaccagagaacattctcttggactgccagggacacgtggtgctgacggattttggcctctgcaaggaaggtgtagagcctgaagacaccacatccacattctgtggtacccctgagtacttggcacctgaagtgcttcggaaagagccttatgatcgagcagtggactggtggtgcttgggggcagtcctctacgagatgctccatggcctgccgcccttctacagccaagatgtatcccagatgtatgagaacattctgcaccagccgctacagatccccggaggccggacagtggccgcctgtgacctcctgcaaagccttctccacaaggaccagaggcagcggctgggctccaaagcagactttcttgagattaagaaccatgtattcttcagccccataaactgggatgacctgtaccacaagaggctaactccacccttcaacccaaatgtgacaggacctgctgacttgaagcattttgacccagagttcacccaggaagctgtgtccaagtccattggctgtacccctgacactgtggccagcagctctggggcctcaagtgcattcctgggattttcttatgcgccagaggatgatgacatcttggattgctagaagagaaggacctgtgaaactactgaggccagctggtattagtaaggaattaccttcagctgctaggaagagcgactcaaactaacaatggcttcaacgagaagcaggtttattttttccagcacataaaagaaaaataatgtttcggagtccaggactggcaggacaggtcatcagatactcagaggctgtatctctgccctgccaaccttgacaaatggcttccaatgttaggtttgctacaagatggttactggagctctagctgcctattttgtgtttagggaagggaaaatggaggaaaggggagaagagcaaagggcgcttttaaagagctttcccaaaagctccacccaatgacttctgcttccatctcactaaccacccacccctacctggaatggaggctgggagatgtggcttatttgctgggtacgtgactatccctaataacaaaggggttctgacactaagacattaggggagaatgttgggtaggcagccagcactcttttaccagagggcctcctggtgtttggattttgatctcaatgtgtaaaatgacagagatgtaacaagctcatagggtatcaatatctcttattgttctatgttgatgatatttgtctttgttgtgggtaatactggacatttgttattgggtctgggtgcctggtatctgaaccccttcttgtctccagagaaccccctattttatgagacttcatgggggggcaataactacctccacttaagagtacctgaaaatgctagacactgactttcccagcctccccttagctagggccaggcatggggaccagggataaacctgtgccacattttgactcagggaagggatcgggagcgctcttttgtgtggtaactgtgataacagtacccgcaaaattgagttcctggtgtagaagtgacaaggatgcaaactgtagcagttggtgctcagtggcagcaacgccatcagaccag

SEQ ID NO: 406990 - DNA, 799 bp, Homo sapiens
acgctgaaacacatccatatgcacaccacacacactgagatacagtgacacacacagtcacagatgcacagacatatgctgatgtaaatgtacaaatgtggtcacactgacacatacatgcaatcatctacgcagactcatagaaaccgacacaaatacctgaaatacacacctgggcgacagagtgtgactgtcttattaataaataaataaatacgaaaagtggtttgtttttttacaaatgtgtggttcatactcctgggtggccttattagcttttttggttgggagacaagggaaggaactttcttggatcagtgtgtgctggtgattttattgccttttcctcttaattcaatcccactctttcccttcctcaagtcttgttcacccagcctcctgccccaggaatcacggggaagaagtctgggagaccacagaaaaaacaccaatgacactgagctattagagatcaaaactgggtcaggaagagttcatgttaagctttcacatgtgctaagaacgctgaaagatacacactgatttccatcttaatagtgccggataattgacaaatttgggacaagatgagggagaggtcaaaatccccctaacttcccaaagcaaaaaaacaggagtataatgatcagaaacgtaatagtagtgtcagaagcacacaatcagctgtggacggtgaaacatataatggttctatctgttctgagattgtaaaagcacaattattttcatcaggataaaaaataaaaatgaaaaactatgctgttgaatggaaatgcta

SEQ ID NO: 406991 - DNA, 801 bp, Homo sapiens
gggaaggttgcttgacaagtcaggattgtgcctccagtcagaaggaccatgaagagagagaagagggcagagccgtgcatggggctgctccccaggacctgagcaggaacctggagttttcaggtgagaggctcacctgtgagcaggatacctgcctgctcgcctattggtctccagattgactagttacctagctaacatctttcctagtacctgtttactttctttcctcccaaagcactgggattacaggtgtgagccaccgcgcccagctgaggctttggattttaattctaggtgtgttgagaaaccactggagtttttgagcaactaaggcacatgatctgatttacattttaagactcaccgtggcttttcatagagaaagattgtagtgggtaaatggagaagcaggggtcagtggagaagccattgcaataatccattcaagtgacaatgggggctcaggcagggcggttgcagcaatgatggtgagcagcaatggtttctggatatattttgaatggaatttcatgatggagtggaggcggagtgagggtgcaagctttctagaatgaactcaaagttgctggcttgaacttttgagtaggcggtagtgccattattgaggctgaagactgagggaggagcagactggggcagagtggaaggaatatgagtcaagacctttgttttggacatgttaacttcgagataccagccaggcgcagtgggtcacgcctgtaatcccagcaatttgggaggccgaggcaggaggattgcttaagctcatgagctcaa

SEQ ID NO: 406992 - DNA, 2178 bp, Homo sapiens
tgtccactgcctgtcttcggttccaactgctggttctcctagaggcctctcctcagactcgcagagctgcctgatcattgctacagaatgaactctagcccagctgggaccccaagtccacagccctccagggccaatgggaacatcaacctggggccttcagccaacccaaatgcccagcccacggacttcgacttcctcaaagtcatcggcaaagggaactacgggaaggtcctactggccaagcgcaagtctgatggggcgttctatgcagtgaaggtactacagaaaaagtccatcttaaagaagaaagagcagagccacatcatggcagagcgcagtgtgcttctgaagaacgtgcggcaccccttcctcgtgggcctgcgctactccttccagacacctgagaagctctacttcgtgctcgactatgtcaacgggggagagctcttcttccacctgcagcgggagcgccggttcctggagccccgggccaggttctacgctgctgaggtggccagcgccattggctacctgcactccctcaacatcatttacagggatctgaaaccagagaacattctcttggactgccagggacacgtggtgctgacggattttggcctctgcaaggaaggtgtagagcctgaagacaccacatccacattctgtggtacccctgagtacttggcacctgaagtgcttcggaaagagccttatgatcgagcagtggactggtggtgcttgggggcagtcctctacgagatgctccatggcctgccgcccttctacagccaagatgtatcccagatgtatgagaacattctgcaccagccgctacagatccccggaggccggacagtggccgcctgtgacctcctgcaaagccttctccacaaggaccagaggcagcggctgggctccaaagcagactttcttgagattaagaaccatgtattcttcagccccataaactgggatgacctgtaccacaagaggctaactccacccttcaacccaaatgtgacaggacctgctgacttgaagcattttgacccagagttcacccaggaagctgtgtccaagtccattggctgtacccctgacactgtggccagcagctctggggcctcaagtgcattcctgggattttcttatgcgccagaggatgatgacatcttggattgctagaagagaaggacctgtgaaactactgaggccagctggtattagtaaggaattaccttcagctgctaggaagagcgactcaaactaacaatggcttcaacgagaagcaggtttattttttccagcacataaaagaaaaataatgtttcggagtccaggactggcaggacaggtcatcagatactcagaggctgtatctctgccctgccaaccttgacaaatggcttccaatgttaggtttgctacaagatggttactggagctctagctgcctattttgtgtttagggaagggaaaatggaggaaaggggagaagagcaaagggcgcttttaaagagctttcccaaaagctccacccaatgacttctgcttccatctcactaaccacccacccctacctggaatggaggctgggagatgtggcttatttgctgggtacgtgactatccctaataacaaaggggttctgacactaagacattaggggagaatgttgggtaggcagccagcactcttttaccagagggcctcctggtgtttggattttgatctcaatgtgtaaaatgacagagatgtaacaagctcatagggtatcaatatctcttattgttctatgttgatgatatttgtctttgttgtgggtaatactggacatttgttattgggtctgggtgcctggtatctgaaccccttcttgtctccagagaaccccctattttatgagacttcatgggggggcaataactacctccacttaagagtacctgaaaatgctagacactgactttcccagcctccccttagctagggccaggcatggggaccagggataaacctgtgccacattttgactcagggaagggatcgggagcgctcttttgtgtggtaactgtgataacagtacccgcaaaattgagttcctggtgtagaagtgacaaggatgcaaactgtagcagttggtgctcagtggcagcaacgccatcagaccag

SEQ ID NO: 406993 - DNA, 359 bp, Homo sapiens
gagcgccggttcctggagccccgggccaggttctacgctgctgaggtggccagcgccattggctacctgcactccctcaacatcatttacaggtgaggcctgcctgtggctcagagccaggaccaagcccttcttgctccaacagctaggggttgtgtggacactaaatcctgatgaaatcctggtggacttggtcctttgttttgggtggggttggagtctcctcctccgaggtccaagtgcccagcctttctgggctctccttctgcatctctggcaacctccatgaatagttctcctgccaggaccaccccccgcccaggtctccaactctcctcactaaatggctgagacacctc

SEQ ID NO: 406994 - DNA, 427 bp, Homo sapiens
aacctctatgaaacaggaataatttatcctaggcaccagggaacccacaaatttttcttaagggcaatgaccagcaagcaaaaaatactagacacacaagaaagcaaggcaacatgaatgaaaattggtagaacaaaagagactacccaaatttcagctattcaaattagcaggcacaaattatataaatgataagtttgaaaatctctgtaagaaaccattaaatacagaaaatccctgtaagaaaccattaaataagatttctgtaagaaatcttaaatacagcagatttaagaaaaagcaacatagaaattctagaaataagccaagcatgctggttcatgctttgggaggctgagacaggaggattgtttgagatcagaagttcaagaccagcctggacaacatagcaagacccatttttaca

SEQ ID NO: 406995 - DNA, 979 bp, Homo sapiens
gtcatctggcctctacttaggtggcagttcccttgtgatgacaacctggctaaggattctcgcccaggcctctgaatttggagacaaagttgaaaatttggggttttgaatgtagacatgacagagtttttaaggaagggaaatggctagagtggagaaggttctatctcagggccgaccttatctccctgaaaggagaaagcagtgactcattagaatatgtttttgctctttcaaaagagccaggggtaggtgaacaactttcagaaagctgtattgtcccttccagaccaagccaggggctagaacagagcagatgtgtgactaggcaaacctgctaagcatggccttagcttccccatctgcacagtagagaaaataaactcttcccaaggggacagaggccagcagagctgctagtgagcggccaggactagggccatgctcatggttattattgggctcctaggaggagggcctagttttaagggtgcccctttcctgcacaggaggtgtggggtgttgcatgatgtaagagggagggtattcttggctctcggggtctggggccaccctgcagatccggacagctgacaaggctggggaatgtatccgggacatgtggctgggcttaagaggctccacagttcagctgtgatcatgattgttctttccaaggacaggccccagtcagtgaaggaagcaagggcacaggggagggagcacagatgtgctggatctggcggagaagggaaggggcccttcggggcaggtggccacttgcagaagagtggtttcccttgtcagtagtctttttttggttgggggaaggggaagtcatttcctgctcctgtcccaggagtaagctaaaatctattattgtaagttcatttcttggtggaggttgcagtgagccaagattgcgtcattgcacttcagcatggacaacacagcaagactcagtctcaaaaaaaaaaaa

SEQ ID NO: 406996 - DNA, 421 bp, Homo sapiens
tttccgaatcagatcctaatctggcaaccataaaaatttccaactcttcctttttactattttactaaaatttacttctactgtttgtgtttcaacacaacaaccaaattctaagagaaatccatcatagcctagtcttcataattctcttcacattaaaaacaaaaatggttcagctacttgagttggtcagcagtcaaccgcccctcccaatttctcattgttatcttcttacaaatgttcaatagccctaaaggttgaaagggaacacaaaaatgaacatattagcttcacacactttttagagaaagacagcacttgcaactaaccatgaacagcctgctaccttggtaaagcatcatcaatagcaagaagactgaaaggcccaaatgatgctgtgctcaagtccaattactatgaa

SEQ ID NO: 406997 - DNA, 632 bp, Homo sapiens
caacctggcactgcagctgctgtgactcatgcgcatggcatcaaggcagccatgcccaggcccagctcttacctctggggaagatagacagctgacaggtcaggacacagactttggtggcaactgcccgagcacccacatagcaagttgccgaggccaggggcatgcagagccaggaaaacctgggaagatgcataaacaggcccagcccaactttgctttctgtaggtttcaggttggcagaggaaagcaaataagtgaagaaagagtggtgggggaggagcattggacagagggaaggaggccaaagacaaactcttctcactgcctgtaagtgagcaggagtctgacccccggcttttctcccagagcctgcttctggctttacagttatcactgccacactcatgagcagtatttccaatactgcacagcaagaggggctcccaaggaaatacatgtagacccaatctcagcttaggcaaaaagatttctttgctacaggatttgtcagaaccttaaaatgtcaatgtattggaatgtctgcattcagaagggctatccgagacattatactaatgtatgatggtctccactcatgtttttggaggcctcatgggagtagtgtttat

SEQ ID NO: 406998 - DNA, 412 bp, Homo sapiens
gctgggcttccaccttctccatttgcccaacctgcagggaggatttgaagtcccctctgcctccactcagggaagacctgatagaactgaatgtccaggctgggcgaggtggctcatgcctgtaatcccagcactttagaaggctgaggtgggtggatcacctgaggccaggagttcaagacccgcctagccaacaatgtgaaaccttgtgtctactaaaaatacaaaaattagccaggtgtggtgcacgcctgtaatcccagctacttgggaggctgagggacgagaatagcttgaacccaagaggcggaggctgcagtgagctgagatcacaccactgcattccagcctgggtgacagaactgaatgtccagtatgtgggccaaagatccaagagaaagaaaaatcttaa

SEQ ID NO: 406999 - DNA, 719 bp, Homo sapiens
gctttattatatcaaaaataataaataagaaatgggataaactttattcctttttagtgacaatcattttttcccctccaaatttactaacactttcattctaaaaaaatatatacaataaaacaggctgtttagctaaacattatgaagttatgagacaaagatctccctacatactttcctcatttttgcagaaaacagatcataaaacagaataagccttgttcaaagaaatgagcagctttggttacaagtgcaaaagtcagccatgtgtactaattctcagtaatcatgaagcaaggtgagctccccagggacttaaaagtcaacacctagcaatgcttggatgaactaagatgaggaaccgctcatgtgacacaaccttacaaaaccctttgtattcccaataggacagatgaggctgtggaactcacaacaaccctctaaggtgtgtgactgactccaattatagagaagactttgccaaagcctgcaaagaaagatgctgctattacttaaaaaatgcatggctgggcggggtggccccatgcctgtaatcccagcattttgggaggccaaggcaggcggatcacgaggtcaggagattgagaccatcctggccaacatggtgaaacctagtctctactaaaaatgcaaaaaagttagctggacatggtggtgtgtgcctgtagtcccagctactcgggaggctgaggcag

SEQ ID NO: 407000 - DNA, 172 bp, Homo sapiens
tctcaccctccctctgccaacagaagtctgggcagggttttatgggctctgataaggccctggcagggccgaagttcatgagcacttcctctttgcaggcggtggtggctcttatacccagggtaagggagtgactgcaggggaggtccacaggctcctcttaaggggagcc

SEQ ID NO: 407001 - DNA, 1080 bp, Homo sapiens
ccactcgtgtgctccatccccacctgttgctcatcccaccttgtgctccatccccacctgtgctcccacctgtgggctcaacgtgggaatgtctgtttacatccaaggagtggccagcgagcacatgaagcggttcttcgtgaactttgtggttgggcaggatccgggctcagacgtcgccttccacttcaatccgcggtttgacggctgggacaaggtggtcttcaacacgttgcagggcgggaagtggggcagcgaggagaggaagaggagcatgcccttcaaaaagggtgccgcctttgagctggtcttcatagtcctggctgagcactacaaggtggtggtaaatggaaatcccttctatgagtacgggcaccggcttcccctacagatggtcacccacctgcaagtggatggggatctgcaacttcaatcaatcaacttcatcggaggccagcccctccggccccagggacccccgatgatgccaccttaccctggtcccggacattgccatcaacagctgaacagcctgcccaccatggaaggacccccaaccttcaacccgcctgtgccatatttcgggaggctgcaaggagggctcacagctcgaagaaccatcatcatcaagggctatgtgcctcccacaggcaagagctttgctatcaacttcaaggtgggctcctcaggggacatagctctgcacattaatccccgcatgggcaacggtaccgtggtccggaacagccttctgaatggctcgtggggatccgaggagaagaagatcacccacaacccatttggtcccggacagttctttgatctgtccattcgctgtggcttggatcgcttcaaggtttacgccaatggccagcacctctttgactttgcccatcgcctctcggccttccagagggtggacacattggaaatccagggtgatgtcaccttgtcctatgtccagatctaatctattcctggggccataactcatgggaaaacagaattatcccctaggactcctttctaagcccctaataaaatgtctgagggtggtcacacaaaaaataaaaaacaagg

SEQ ID NO: 407002 - DNA, 780 bp, Homo sapiens
tctcaccctccctctgccaacagaagtctgggcagggttttatgggctctgataaggccctggcagggccgaagttcatgagcacttcctctttgcaggagggcgtaggggaggggacccaggtgatttgggtcctggctggtcaccagggaagctggcaagggaagggagactagggtgcgctctaggagaagccgacagcctgagagtcccagaagaggagccctgtggaccctcccctgccagccactcccttaccctgggtataagagccaccaccgcctgccatccgccaccatctcccactcctgcagctcttctcacaggaccagccactagcgcagcctcgagcgatggcctatgtccccgcaccgggctaccagcccacctacaacccgacgctgccttactaccagcccatcccgggcgggctcaacgtgggaatgtctgtttacatccaaggagtggccagcgagcacatgaagcggttcttcgtgaactttgtggttgggcaggatccgggctcagacgtcgccttccacttcaatccgcggtttgacggctgggacaaggtggtcttcaacacgttgcagggcgggaagtggggcagcgaggagaggaagaggagcatgcccttcaaaaagggtgccgcctttgagctggtcttcatagtcctggctgagcactacaaggtggtggtaaatggaaatcccttctatgagtacgtgtccggccacgtttgacttctttctggtgtgagcagcctgttgctgaagaaat

SEQ ID NO: 407003 - DNA, 1435 bp, Homo sapiens
tctcaccctccctctgccaacagaagtctgggcagggttttatgggctctgataaggccctggcagggccgaagttcatgagcacttcctctttgcaggagggcgtaggggaggggacccaggtgatttgggtcctggctggtcaccagggaagctggcaagggaagggagactagggtgcgctctaggagaagccgacagcctgagagtcccagaagaggagccctgtggaccctcccctgccagccactcccttaccctgggtataagagccaccaccgcctgccatccgccaccatctcccactcctgcagctcttctcacaggaccagccactagcgcagcctcgagcgatggcctatgtccccgcaccgggctaccagcccacctacaacccgacgctgccttactaccagcccatcccgggcgggctcaacgtgggaatgtctgtttacatccaaggagtggccagcgagcacatgaagcggttcttcgtgaactttgtggttgggcaggatccgggctcagacgtcgccttccacttcaatccgcggtttgacggctgggacaaggtggtcttcaacacgttgcagggcgggaagtggggcagcgaggagaggaagaggagcatgcccttcaaaaagggtgccgcctttgagctggtcttcatagtcctggctgagcactacaaggtggtggtaaatggaaatcccttctatgagtacgggcaccggcttcccctacagatggtcacccacctgcaagtggatggggatctgcaacttcaatcaatcaacttcatcggaggccagcccctccggccccagggacccccgatgatgccaccttaccctggtcccggacattgccatcaacagctgaacagcctgcccaccatggaaggacccccaaccttcaacccgcctgtgccatatttcgggaggctgcaaggagggctcacagctcgaagaaccatcatcatcaagggctatgtgcctcccacaggcaagagctttgctatcaacttcaaggtgggctcctcaggggacatagctctgcacattaatccccgcatgggcaacggtaccgtggtccggaacagccttctgaatggctcgtggggatccgaggagaagaagatcacccacaacccatttggtcccggacagttctttgatctgtccattcgctgtggcttggatcgcttcaaggtttacgccaatggccagcacctctttgactttgcccatcgcctctcggccttccagagggtggacacattggaaatccagggtgatgtcaccttgtcctatgtccagatctaatctattcctggggccataactcatgggaaaacagaattatcccctaggactcctttctaagcccctaataaaatgtctgagggtggtcacacaaaaaataaaaaacaagg

SEQ ID NO: 407004 - DNA, 895 bp, Homo sapiens
gcctttgttggctgcagtaagagctcagtctcttcaccaggggctcccagtccttccatctgggaggccaaggcggcttcgcgttctgagaatagacagaacctctgttactctgtgaccggcaggcaccgggagatccgtagctcagacgccaggacatcccggaagctgggaaatgatatcttttctcatgatactcaaggcctcttaagaaagaagcttatagaagcatcattccaaaaagtgatattggatggatatgggagctgtggccctcagaatttaaacttaaggaaagagtgggaaagtgagggtctcctttacagaaaggggcttggataaggaggaaagaccatcagaagaaaagataagacactctcttctcattccagtaagagccacatgcaaggcaagaatcagagtccagctcagatgggggaactctaggaagagagaaatccattccatggacagctgccaagatagagcaggacagcatcaaggacatgagccaaaagtgcaaaaggactgcttgactttggaaaagaaaccaaaggcctctgacactgtacacatcagtgaaatgaggagacccatgatgcctgctgtgggggacccccagaggcccacaccgggcacagcgagcggccagatctcagtctctaggagaccacccactaccacttcagaaaagcctggtgacctctctgcacactccatctgaagccatttatcacaacacagcccaggtgtgggaacagtaggcctattctctgctgacctgggagcagctgtctgagctcacctggctccaggggcctctgtgctgtggtacaaacctgtgccatggccacccaggtggcctatgtctttcgcactgagggctggctcatcc

SEQ ID NO: 407005 - DNA, 958 bp, Homo sapiens
aacggcctagcggtacggcccgaatgctaggatggttgaagaagtggccagaaaaagaaaagcattttgatggcaggctggagaacatcgtgagaggaaacttcgggcctgttgactgtcatcttggcaataagtgttggatcctagccaaagtgcttggatgcaacatggagccaatcaataaatccatcccccatgcttttcctggccatgaggtaattggcagcctagttcatgtcttgatgggaagctctgccatgtggaaggatcacatctcaggtttcttgacaactggatgacttttgagaacagatctaggacagatctattcttggattgtggacaggcatcagcctactaacatcatatggaacaggtctcctttacagaaaggggcttggataaggaggaaagaccatcagaagaaaagataagacactctcttctcattccagtaagagccacatgcaaggcaagaatcagagtccagctcagatgggggaactctaggaagagagaaatccattccatggacagctgccaagatagagcaggacagcatcaaggacatgagccaaaagtgcaaaaggactgcttgactttggaaaagaaaccaaaggcctctgacactgtacacatcagtgaaatgaggagacccatgatgcctgctgtgggggacccccagaggcccacaccgggcacagcgagcggccagatctcagtctctaggagaccacccactaccacttcagaaaagcctggtgacctctctgcacactccatctgaagccatttatcacaacacagcccaggtgtgggaacagtaggcctattctctgctgacctgggagcagctgtctgagctcacctggctccaggggcctctgtgctgtggtacaaacctgtgccatggccacccaggtggcctatgtctttcgcactgagggctggctcatcc

SEQ ID NO: 407006 - DNA, 759 bp, Homo sapiens
gcctttgttggctgcagtaagagctcagtctcttcaccaggggctcccagtccttccatctgggaggccaaggcggcttcgcgttctgagaatagacagaacctctgttactctgtgaccggcaggcaccgggagatccgtagctcagacgccaggacatcccggaagctgggaaatgatatcttttctcatgatactcaaggcctcttaagaaagaagcttatagaagcatcattccaaaaagtgatattggatggatatgggagctgtggccctcagaatttaaacttaaggaaagagtgggaaagtgagggcaaaataatcctatggtgaaaaaaaatcaacaagataatctctgcatgagaaaaaggaccaaagacaagtgaattttctgagggtgatgaaagtgttgcttcgaaaaggggtgaagtttatatgggtctatttatttgtctaacatgtacagttaaggtttatgccttgcaatgtatgtacatcttcacaaaaaaaaaaaaaaaaaagaaaaaaaaaaactttgggggcgcggcgcggcgcccctgaaaaacgctttcaaacccctcccggtgtggcgcgcggggccaatgggtttaagggaccctgggcctagggggcccaagggaaacccggggcccggccccggggggggttccccccaaataaaaaagcgcgggggcaccggcggttcggacactccagtggggtccggggctccgggctctcaccggggcacgggcatag

SEQ ID NO: 407007 - DNA, 1276 bp, Homo sapiens
gcctttgttggctgcagtaagagctcagtctcttcaccaggggctcccagtccttccatctgggaggccaaggcggcttcgcgttctgagaatagacagaacctctgttactctgtgaccggcaggcaccgggagatccgtagctcagacgccaggacatcccggaagctgggaaatgggactgttgacattcagggatgtggccatagaattctctcgggaggagtgggaacacctggactcagatcagaagcttttatatggggatgtgatgttagagaactacggaaacctggtctctctgggtctcgctgtctctaagccggacctgatcacctttttggagcaaaggaaagagccctggaatgtgaagagtgcagagacagtagccatccagccagatatcttttctcatgatactcaaggcctcttaagaaagaagcttatagaagcatcattccaaaaagtgatattggatggatatgggagctgtggccctcagaatttaaacttaaggaaagagtgggaaagtgagggcaaaataatcctatggtgaaaaaaaatcaacaagataatctctgcatgagaaaaaggaccaaagacaagtgaattttctgagggtgatgaaagtgttgcttcgaaaaggggtgaagtttatatgggtctatttatttgtctaacatgtacagttaaggtttatgccttgcaatgtatgtacatcttcacaaaaaaaatcttaaaaaaattaaatgggtgggggtagggaaagggttgaagtatagatgaagcagaagtggtacatgattagtagttgaagctgggggcaggtctatatattttatttttatgtctttaatagcatttgtataaatgtacaatattcgtttacaatgttagctcaggatcttgtttacctttggacagggagggagggagaaatttattttctgggtaggagtaaagctggttctattcctcagttatgtaaattatctgttataatccaaaaagctttacatgaatgtttctgtatgtaatgtggtatatcaataaaaaattaattacatactaatatcctctctctaaatagcgtttcccaaacattatctccccctcttatctcactatgttacttatttatcttcctttatttctgttaaagttcccctcttttttttttctatatttagtcttatttctttctctatagctctttccctagtttcttttttcatttaatatattgttctctcatgtttgtgttttttcccttcct

SEQ ID NO: 407008 - DNA, 1019 bp, Homo sapiens
aatgcaaagaagtgtaatgtaaatgctaaaaaaggagataattataaaatatttatttgcacaatatttatgtatcttttagtcataatagcccaaaacaggaaacaaccaaaatgtccattaataagaaaatgaactaattgtatagcttttagaacaaaatacagctcaggaatatgaaaaaccaagcacacatcctggataaaattcataaacctgctcaatgagagaaaagttggacacaaaattgtactttatgtattttgtattttattccaggcaaaataatcctatggtgaaaaaaaatcaacaagataatctctgcatgagaaaaaggaccaaagacaagtgaattttctgagggtgatgaaagtgttgcttcgaaaaggggtgaagtttatatgggtctatttatttgtctaacatgtacagttaaggtttatgccttgcaatgtatgtacatcttcacaaaaaaaatcttaaaaaaattaaatgggtgggggtagggaaagggttgaagtatagatgaagcagaagtggtacatgattagtagttgaagctgggggcaggtctatatattttatttttatgtctttaatagcatttgtataaatgtacaatattcgtttacaatgttagctcaggatcttgtttacctttggacagggagggagggagaaatttattttctgggtaggagtaaagctggttctattcctcagttatgtaaattatctgttataatccaaaaagctttacatgaatgtttctgtatgtaatgtggtatatcaataaaaaattaattacatactaatatcctctctctaaatagcgtttcccaaacattatctccccctcttatctcactatgttacttatttatcttcctttatttctgttaaagttcccctcttttttttttctatatttagtcttatttctttctctatagctctttccctagtttcttttttcatttaatatattgttctctcatgtttgtgttttttcccttcct

SEQ ID NO: 407009 - DNA, 725 bp, Homo sapiens
ttttttttaatttgctgtggatagtcattcttttaataccatcttttaagatccagctcaaaaactatcagtactttgacacttttgcccaattgcctttcatgtactgactttatttaacacatggcatttaattaaacttaatttaattaacaaaaatttatctctactacagcccttcaggatggtttggacatgggagctcaggcatatttatctttatatatccctggccccccttttaaagtttggtacaaagtagaagcacaagaaatacacgggaactgaatgaataagaggaaaattgaattacgatcaaagaagagggaccaggggaagtagggaaagaaggaagaacatagcacaatcctaaatgcaaactgtggtttccatagccgttggtagaggagttgtagtgaaaacttccagaatgtcagtaactctaaatatcctcaatatctcctgttggtggtttgtttgaaaatacttcaggaacctagaaggtagagtgaaggagaaatgtgatttgaatttcagtggcctgctgggtgttggttgtcaggacataatgaccaaagacaacctttaacttccttctgcttcctctgggggaatcacactgtcatggccaggaaagataccatctgttggccaagaaggataccatgtgtgaaatggaaagtccagatcaagtcttggacacaagtgaaaatatcttcaccaca

SEQ ID NO: 407010 - DNA, 461 bp, Homo sapiens
cataaatgggttaagaattgcccatctttttacatgagtgtcatgaataaaaattcataacctgccattccacgttttgggtatgtctttttttcatgtattatgttgttgctcttttaaaaacattttcttagtcttttgatataggaaaagtaattttattattttattttttaagagaccaggtgtcccttgttgcccaagctggagtgcattaaggggacaattttagtttactgcagccttgaactcctgggctcaagccatcctccctcttcagcccctggagtaactaggactgctagcattccaagccagtttattttaatttttattacagatagggtcttgctgtgtttttaaagctgatctcaaaacaccagggacaaagtgatcctcacgcttcagcctcacaaagtgctgggattacaggtgtgagccactgtgcttggccccagtta

SEQ ID NO: 407011 - DNA, 1047 bp, Homo sapiens
tgagtctggaaattctgtctctagaggcagtagcattttgaggcaggtcctatctcactatggtttctgccagaactgatttcttgccatctcaaggccttagggctgtggaaataaatgatcaaccaaatgagaaaaggaaaggctattcttagcttactatagcaagggagttagccaccatcacctgggttttggcagaaagtcaaaggcgggcagatgggtggaaaagttttatagcagaaaaaagggaagccttcagatatgccctggttgaagactgttggcatagggaagccagaagcaggttgactggagtcagtgtttcacagtgggcaggtctgtgtaatcctacatcaaagtctaaggaagttgagaggccaaagaggcacccagtttcttagaaagaaacatttaatagggatttaggaacagaagccgtgactatatcttgggcagtgatgaggcaagttggtggatcccagcataattacccccaagacctgggacttttatgccatagggagaggagtggttgaaaaggaatttgtaagacaattatgataacatcaaagctgtttgacctaagggcaggatttactgtatgtatgagtttatcaaggtgtcttactctaagggcaggatttacaataagtacctgctcttaaacaaggttcaaatagataaattggaatgagggttaatcagaagctaacagggcagattagcatccaagatggagttgctttggcctctagatggggcatcctgtgcaatttgctaaggtgcttatttggctttctctggtcctaagttggaagcaggggcaaacaagttattgtttagcttcctggattgtcactaaagaaagcaatctggtttcctgcaattctgacttacagcaggctgatctcctgggttgtttattgttgatgagggtgttggtttctcgggcagcttgctgcaggttgtgggtcgaatttctaattttacatatggcatggccactgtccatttctatattcagtctcttagggcttctggtga

SEQ ID NO: 407012 - DNA, 343 bp, Homo sapiens
tcctgtgcaatttgctaaggtgcttatttggctttctctggtcctaagttggaagcaggggcaaaattaaagaaactgtcattcattcatttcctgacgattctgggccaattgttacacaagttattgtttagcttcctggattgtcactaaagaaagcaatctggtttcctgcaattctgacttacagcaggctgatctcctgggttgtttattgttgatgagggtgttggtttctcgggcagcttgctgcaggttgtgggtcgaatttctaattttacatatggcatggccactgtccatttctatattcagtctcttagggcttctggtgagcagtaag

SEQ ID NO: 407013 - DNA, 415 bp, Homo sapiens
tagattaaggaaaataatgcctggaaaatcttttgttttagtacagggctgagaaaacttgatggtaaataatagaggtttcccaggccaataagcaaaattgaagatatatgtaggcgtttacataacaaaggagaaccctctggcgagcctctccctgcttgcccccagagaaccatccggagtagttagcatgtttcatgtccagctgctgcttgccaaaaacattctcagaacaagagggactagcccaagagggaaagggctagtaggtatggtgaaaaaggggcagggtggctgggtgcagtggctcccacctgtaatcacagcactttgggaggctgaggtgggtggattgcttaagctcaggagtttgagagcagcctgggcaacatggcaaaaccctgtctttacc

SEQ ID NO: 407014 - DNA, 429 bp, Homo sapiens
acattttcactctctagtacatacttgcaatgtcagttggccacagtgcaatcacactgctatttcaaggtgtgtgtacttgacatgttaacaccccatcagatgccagacttgtggtgaagggccaagagcttctgtgctactcccttcctgtcctgtttatgttggactgcagcttcaactccaacgtgtggctttggcaatagaacttacaaagttgaacattatcccgtccttcaacctctactagttagggttcaagatctcactatattactgtttgacattagtatacaaatggtttcttaggttctgttcttgtataaaccttacctggttgattgaaaagcaaagcaaaataaaaacaaaaaggacaaagacaaggtaagcaaaaacaagttgggacaaaataactaacaaagggtcaag

SEQ ID NO: 407015 - DNA, 2292 bp, Homo sapiens
tgactgttttcggactcagcctgcctacacccaggtgattaaaagctttattgctcacacaaagcctgtttggtggtctcttcacacagatgcgcatgaaacccagtaatctacttcaagtttcctagctcttccctatgccatctccattacgtttgtgagcctatccagtattttatttcaattattgtctttttatttctaaaatttccaattagttctttatatcttctgtttctttgttgatatttttctatctttccattcataccccagggctgagggagcacatccaaggaagggccaacttggaaggggttcagcccatcagatagcaggtaagtcctctggtttgggcaggctagtctggagttgctgggtaactaataggagaacccctcaagtgcaggtagggatggccaatcagcaactggtggcatgggcatgtgatggaagtccagatggccttcagagtgtgtggaccacacaggcacttgcagaaggcatcgcaggttggcatgtgaccctcaggggcacaggcagctgtgtgcaggtaatatgcaggcttgtgaagaaagtcgaaatacaagcacaggcaggagttcttcagagcacgtgggctgcacaagggctctgtgttctggctcaagagagctgtagaaaggtgactgcaaggccaaggatgcaaagtcgcaaagggactgttctgagcccatgcttggggcagattccgatggatattctcacatgcacactgctgatccccagcccacgccaaaaaaaaggcaggaagcctcttcctactaccttgcccctccagtgccttctactgagaaagcacagcactgcgctcactttaaagggccaatatttaaaggaatgccattgtataacacagggtatatttattgagtggcgcattcaaagctgagaagcagtaagttgataactgacaccgtgggtaaccaatttggttgagttctgacctcaaattccaacctgccttctgtggggtgtgatccccatgtcaggtctgttttcagtcttcgtggtgctattcagctatgttccgtgtgcaccacccagtggcccgtctacggcgtggctgaaggtctattccagtgtccaggtctaacttctttggagtgctggttagggtcagatccacgcatgcgcagctaggggaggagcccaggaacaaacttacggagctgtttcctccaaattcctccctctctgtgatctccctggtcctttcctgatcgctgggctccctttttcgggcctctggccaaaaacttggtgttgtagttaccctgctctgccgtgcacttcctacaactgcacccacagtcgcggccaagcagcgaagatttaagaaagtaagaaagcgtgacggtttgctccactcttttgggctatagctcctccaatcagaaaaggaaggttctctgcatgtcccactttatgtgaaatctaacaaagttgaactcgtagaagtagagtgtagaaagagattggggccggggaggaagggaatggggagttactggtcaaagggtacaaagtttcagataggtaggaggaatgttttgaaatctattgcatagcagggcgactatagtcaataataaagtattgcatatttcaaaatcactgaaagggtaaatttcaaatgtctaccataaaaatgataggtaaaagaagtgcatttaatttttcttttaccacttttcttactctgttatcttcagctcaggagtatctaacctgcaaagatcttaattaaggctttggctttcgacttaaaagtctccataaaggaacgctacgcatcatcctgaaaataaagatcaaagtccacagccagtggtgaagaaacattaataagagaatcagtcagcctagtttttttgaggaaatctgtgcacagatcccaagtctacacataaaccaaaaagccaaagtaaagttaactgtatttgagcagtgtgggcagcccagccagccacagtaactgaagctggaagaattactccctacacacagggctcgtgttctctagatcaaccagacacatcacagactctgttgttgaggttctttcatttcctcaggccagttagcccttggctagtagccagagctgtacattaactgcccctacatttttaaaatcattgcttatgaatttctatgtattaacttagagaaatgtaattctagttcccatcttagaggaatggtctcttcttaatgtctttgtgttctaaatatttgatcatgtcaaca

SEQ ID NO: 407016 - DNA, 1209 bp, Homo sapiens
tgactgttttcggactcagcctgcctacacccaggtgattaaaagctttattgctcacacaaagcctgtttggtggtctcttcacacagatgcgcatgaaacccagtaatctacttcaagtttcctagctcttccctatgccatctccattacgtttgtgagcctatccagtattttatttcaattattgtctttttatttctaaaatttccaattagttctttatatcttctgtttctttgttgatatttttctatctttccattcataccccagggctgagggagcacatccaaggaagggccaacttggaaggggttcagcccatcagatagcaggtaagtcctctggtttgggcaggctagtctggagttgctgggtaactaataggagaacccctcaagtgcaggtagggatggccaatcagcaactggtggcatgggcatgtgatggaagtccagatggccttcagagtgtgtggaccacacaggcacttgcagaaggcatcgcaggttggcatgtgaccctcaggggcacaggcagctgtgtgcaggtaatatgcaggcttgtgaagaaagtcgaaatacaagcacaggcaggagttcttcagagcacgtgggctgcacaagggctctgtgttctggctcaagagagctgtagaaaggtgactgcaaggccaaggatgcaaagtcgcaaagggactgttctgagcccatgcttggggcagattccgatggatattctcacatgcacactgctgatccccagcccacgccaaaaaaaaggcaggaagcctcttcctactaccttgcccctccagtgccttctactgagaaagcacagcactgcgctcactttaaagggccaatatttaaaggaatgccattgtataacacagggtatatttattgagtggcgcattcaaagctgagaagcagtaagttgataactgacaccgtgggtaaccaatttggttgagttctgacctcaaattccaacctgccttctgtggggtgtgatccccatgtcaggtctgttttcagtcttcgtggtgctattcagctatgttccgtgtgcaccacccagtggcccgtctacggcgtggctgaaggtctattccagtgtccaggtctaacttctttggagtgctggttagggtcagatccacgcatgcgcagcttaaatgttttctcctgtctcctcgtgccg

SEQ ID NO: 407017 - DNA, 372 bp, Homo sapiens
agaggaccacagtctcacattttagggacacaggaggaggaggagccacaaaagctggcatcacagaagccagaggagaagagtttcaaggaggatggtgtggtattgcagagaagtcacaggggatatagactgggcagtgctgggattggctgtgagcatttgactatgagaggggccagtcaatgtcaggtagcagtggattgaccatgtgaggggtcaggaagcctaactctgcttctcatgaatgaaggggttccttacagcccaggacatgtgtgctaattaccaggtagtagaaatattactggaaatgcgctgaatgaacgttcttgcactccacatacagactttgttgccagcctttgtgta

SEQ ID NO: 407018 - DNA, 525 bp, Homo sapiens
cggagcagagggcacacacagtggagggcacacacagcggaggacagacacagtggagggcacacacagtggagggcacacacagcggagggcacacacagtggagggcacacacagcggaaggcacacacagtggagttacctctgatccccatgccctacggggctgccaccttcctgccagggtttggatcatcacagtcatttgcatcttcactccacagcgtgagtgcacatacacatctgttttattgcatttggcccttataggaatgagtgggatatggggaaatgaaaaggctgagactgcgataaaaaatgtagctcttaggccaggtgcggtggcacatgcctgtaatcctagcactttgggaggccgaggtggacagatcacctgagttcaggagtttgagaccagcctggcgaacatggtgaaaccccatctctactaaaaatacaaaaattagccaggcgtggtggtgggtgcctgtagtcccagctactcaggaggctgaggcaggagaa

SEQ ID NO: 407019 - DNA, 359 bp, Homo sapiens
agatttctggttctgcaaaatgtatgctttatttatagattacactcagccacattaatcaagaaaacaacatccagtctccccaaatcacgatatttgtctttggggatgctatatatttgtggttctcatgaacatggtggccctgcacgaagaccacagtgggttcctggtgggtgtacgctgaatgagcctcctgattgtgccttgcttcaatgaattgtcagttttgctcatattccctgagtatccaccagctggggtggaagacaacccgttcccagacgctatggataatccacatgtgggtgagcaagagttaagtatatgtaccaatgggcagtgggtgagtgtacaat

SEQ ID NO: 407020 - DNA, 373 bp, Homo sapiens
tttcagttaatatcaagctttgttcacactgatatattgattgggattcttcaaacgaagaatgaaacattattgacttatttctaagtgtaataactcaataactaaattgagaattttcttgttttttgtgtacaattaaattattccattttatatatacttattaagttataagcatgttaataaggagacttttgactgtccagcctaatggaggatctgattcccattaaggatgtgggaattcccgtattttcctcttcaggtttttttgtttttaagtctacagagagatagaaccttaacattgcccagtttgataaaagtgaaaatttgctcacctatacaaatgttattttacacaattatt

SEQ ID NO: 407021 - DNA, 401 bp, Homo sapiens
gaaaaaaagaaaaaagaaaaagaaaagacaaggaaggattaccacatgtcatgccacattttggtgggaaaagcctgaacctggaagccaaagaaaaaaagtatctgagcaacaaaacccttctaagggggcttactgacactgatcacttagtcttgagttccccagcctcatgtggccaaaaggacagagtcaaggcccagggccactcaagaagaggaaacttggggataacattttctatgtcaaatgaaccccaaaacactacataataaaataaattataaacagaactaaactcctcctacttcccagtagtaatggaacagggaaacacaaacaaaagagcaaaaagagagacagaaaaaaagagaagaaaagaaagggaagagagcaagaga

SEQ ID NO: 407022 - DNA, 551 bp, Homo sapiens
cttgctggactattttggtagtcagaaattctctaaagataaaggaccacattcttgaaaggcataagaagtgcctaagtggccttcctcgaatccatcttctgtactgcccattgaatctgcttttctagtgcactttgatccatcgctcacctgcttaaacatatttcacgtcttaaagtttctctccagctcccattgccttaccacataaaacagagttcttagtatggcagatgtattaggactctttccattgaaaatggtgggaaccgaacttaaactcactgaaacaagtcggaattcattggcccatgtggctgagatattgcaggtcacttgaggaagtgaaggaagtataccaggaaccatgaccgtattccctttttgggacagaattcagcattcctaggactcactctttttctgtttgtatgtcatctctgcttgctcttcttttttcatagtgggctcatttcctgcaaatgcaaagaagccttctctactgagcagataacttaatcgtaggcagcccttgcttagccacaaaa

SEQ ID NO: 407023 - DNA, 616 bp, Homo sapiens
gcctcaccagcatcatgttaaatggggtattggcagttcctgaagtaagaaaattgtctaacagagctgagtcacagagaaccagaatcagggcgtctcatgttattactgggagagtttctgtatcatactcattccagactttgatcgctgactttaaaatctttgttcattggcttgacagtaatatccatggagttgacctgcctaccagccactcacctgagcttcagtgttttttgactctttaaatgccattattttcttttccattccacttttcactctgatggatatcacttggactttattattacctgaaactacttaattcctgacatcctaaatgatggtctcacccttttgaccacaaccttatatccattcaactgtcttaagccctcaatctcactacattctgctcattgattctgcaagcaagacctttgggatcaccagcccttcttagtctcacaagttccatactaatctgcactatatggttgatttcctgaaatacccttgaacatccctacttccttatccatgtcctacaatcatgcatgtattagtttcctaatgcagctgtagcaacatactacaaactgaaaggctt

SEQ ID NO: 407024 - DNA, 504 bp, Homo sapiens
tctccttttgtatcagaagctttctggatgctgaagtggagtgtaatgccctaaaaagctgactataaactctgctggctgtagtcttcactgagggtgatggagctgggccatacagttgggaaaccacttatatcagtaccattaggtcttcccccttgggctggtcaaaccatagcgggagcaaggatatagctcaaaattcagtatgtatgtgaacttccagttaatcctactgatttctgtatggaatatttaccttcaataaatggctgctctccctagtcaagagatactttgaattactttcctcagagaatgaacatccagcctttcgttagagcacagcacaagcagttgccaggctatgtgaagtaagttgaaaatctaaaggtctaattgcttcttaaacagactttaaaccaattataagcccgtttgcatatccattttcatctctttctggtgctcccaatttttgaggctttggggagttctgtagta

SEQ ID NO: 407025 - DNA, 630 bp, Homo sapiens
ggaaacagaatttcaaaagagagcccctgttagaaaacaaaacagaacttctcgtttctttttctttgtacatgcttcttatcaagaatatatactccacaataaaaaatcatgttgctaagaaagcccagttagtttcttttgagaatctgatttgagtacactaatgtgtgaattgaatccgagagaaaaataattcttctttaatgacatatgtctgctaatttgtccagcagccatagacaggccgaacaaagataaaactgcaaattcaaaccttatgcttggtgtgaactgctgatgttgagcttttcctcctttgctgatcaatttgacctgtttcgtgacagcggaaccagaagaaatcattggaaaaattttggagattgagttttctcccagacggtagctgtcaccacttgttcagggttttatcaccttagaaactctgccaggagaggacacacccaggtctgagctgatgggctggacttgccctcttgtttgtcatgagcaaacttgatcattttagtgatcttaaatgtaagccaccttctcactcagtacttaaagtctgctggagaaaagacacaaacttgattttcttctctgtctaaccagactgatcac

SEQ ID NO: 407026 - DNA, 574 bp, Homo sapiens
tgaagcattaatggggtgctatcaaatcaagtactatttgcgtctccaaatcgattaatagttacctaaaccaagacattaagcatctttttccttctgccttctttaggcttgtgttacttgaagttttccttgtcagcttgagcaagactttcattttggtgttagcattaaaatgattttaattagccaagtctatataacatttatgaagccttattagactgtaaataattttagatgcaaacgtgattgtgtgatttaaacaaacagcccttctttacaacaaaaaatagttttgttttgtctattgtaaatccttatgcaactgggatggtgatctgcatataaagtagttcagcttttcaattccttattaaagcaagcgatggcgtctgaaagaagcacactgtttccttttcataaataggttactgcacataataatcctttatcgtcatgtggagattgaagtggatactgataacttacttttaaagctttaaaattaccaatagtatattgtctgtcactataaacaattcatgtgataggctttcaattagaaattcct

SEQ ID NO: 407027 - DNA, 358 bp, Homo sapiens
gaggacggctcgcgtgagtccacgtgtaatcggcccgggcccagcactggcgggactgacgcagttcttctacctgctttcccaagggcgacactcggctccactccagttgggccgctggacgccctaggggcccggcagttgctaggcaacgccggaagccctcaggaacgtagttccacgggcgacgtaggatggcggatccggatggggcggaccccaaagctggctcccaactccgctcaccccctcctatacagggctcttggttcaggtctcttggttcgtcctgctgcaagttgggaagaaagataataggaatgctaattccttcttgatgaaacgaccacaacacgct

SEQ ID NO: 407028 - DNA, 448 bp, Homo sapiens
gtctagtatttggagacagggtctgtaagaaggtgataaaggttaaattagctcataagggtggggctgtaattcaataggacttgtgcccttaaaagaagaggaagagacacttgagctctttctgtctctgccatgtgaagacacagagaaggcagccacttgcaagccaggaagagggccctcaccagaaaccaaatcaagcagcactttgattttgtaattctcagactccagaactgtgagaaaatgaatttctgttgtttaactcacctagtctatggtatcttattatggcagcctgagcagactaatataagaatcatacaaaggtgataccaatcactgccccaacccatattcccttttaaaataacccaccctggcccactggtccagctgccctgtgggcaacatgctcctggtgccctcagtttattgaccagag

SEQ ID NO: 407029 - DNA, 442 bp, Homo sapiens
atggttattacccggtggggccaaaattctaggtagtgatttaaggcaaagagatgatctccaccagccttccttcacatccacaaatcagcacaaataatccacaaagcagcaatagaaatgtaagccagatgccaagaagaacttcctgactgcaatgttagttgactgtctacctgatgtgaaggaaggaagctttactagacatagatttcatgtaccctggagctgagtttctagtcatatattatctaacatttgcagagggattgtgaagttttgtcacatggtcacatatatctcagcattatcacatatatctcaaactgagcatggtcacatatgtctcaaactgaggcccagagaacctttatcaattgaagttttttcagctgcagttttcagaaaacataataatcagggaaatgcattctcctacttc

SEQ ID NO: 407030 - DNA, 351 bp, Homo sapiens
taaatgcagatggctcctgttgaggtaattaaaatgtaatttcgtttgacaatgaaaccaaatttgtctacatatatcttctccatcattggatactaagtgtatagatactctcatatggagaaacatgggcatgttttaatgttaaaaagagcctcttaaactgaaaaaagctccagcttggtgtacttgttgaaattacagattatgaaacgacttttagatcttctgaatcagaatctctaaaaaagggcctggggagatatgttttattgatttatttttattttttgagaaaagcggcgctatattgctcaggctgatctcaaaatcctgactcaagcagggctg

SEQ ID NO: 407031 - DNA, 423 bp, Homo sapiens
tggagagggagtctcactctgtcgcccaggctgaagtacagtggtgcgatctcagctcactgcagcctctgcctcttgggttcaagttcttctcctgcctcagcctcccaaagtgctgggattacaggtataagctgctgtgtctggccaagactttttgtaaagcttgtttagggtgagtctatagtggcctttactctaactaagtactgtttatctctgctgctaaggcttgactcttccgaagtctccaccttaattcccaggtgtttaatataaagtctctgcttttgtggttggaggtcaaatgtctctcagcctagcgtgagctctggggattgcttagcttagagctccatggtagttctttgtacagacttatggagcctcccagtgcctcagcagtgcagtatttaagcaaaa

SEQ ID NO: 407032 - DNA, 157 bp, Homo sapiens
tactgtaaattcctaaggtatttgttttatagtcaatatatctcaataatggaattttgggtaaattttacaagaaacaattacaaaattggactgtattaatagtttctttatggtcagagtgttcacaaagtgtcttaaaaataattttatatcc

SEQ ID NO: 407033 - DNA, 419 bp, Homo sapiens
cctctcttccctttcctgacctttagtctttcacttccaattttgtggaatgatattttaggagtaacggatttttcaagaagaagaagaaagaaagactgaatttccttgcttattttgcatgtacagactggatttttttcctaacagccatttccccaaaggaatgtgtcttgcgtattactgacatttggtacgtttcattcattggaatatttcttactttctgtgtgtttcaaaagcctgtgagaaatacaggatttgataacattttgaaggcaggaaaaccccaaattgttacttctttgagagtcacaaccactttctggtgtggagaaattgccattggaaaatttgacaattttgattctcgctggtatgtttaaaaactgaataaaaagaatagaatttttcttttg

SEQ ID NO: 407034 - DNA, 437 bp, Homo sapiens
acacacagacacacacaaatctattaaatatgagaaaattagagaactcatcattatatatgttaaatactttcttcaattagatagtaagtaaaaacgtgtacaattttgttgctgccaacataatgtgttgattcatttaaaggtaaactagtattataaggaataataatgtactatttctttaaagactataacccttctttaatatggctttaatatttgtattacacactagaccaaaattatcacgagggacaaaactgtgtgttttgttcattttttggtgcattgttgtattcaaagtgcctggcatatagtaggcactcaaaagaaaagggaaagggaaaaggaaagaaagggaaaaaaacaaaggaaaggaaagaaaggggaagggaagggaaaaagagaacggaaggagggagggagagacaggg

SEQ ID NO: 407035 - DNA, 540 bp, Homo sapiens
ctccaaaagttacagagtttactgtgaaaagtcttccttcagtccctgtcctcagctgcacagttcccctctccaaagggaatcggtgttattttcttgaaacattttttggattaatatttatctaaaggcctgattttgtttggctttatttttaaggttggcattagtaaacgaatctgttctggttacttttatactttgataaacatctcatttccattctctagcctatgctattctctcattttctcctccatttcctaattgatggtactgtagagccaaatagagtgtcgcttactggctttgggaccttactgatctgatgcatgtttttctaatctgtgaaatggtgaaaacatctacctctcaggctatagtaaagatttaattagagaatatttaaagttcttttgatgtttgttacaaagcaatagatatttgatgattagttctcagtttttctaaattttaaagtaaagaagtaaaatactgcctttcatttctaaaaaattaaagttctgtatatgtgaacat

SEQ ID NO: 407036 - DNA, 388 bp, Homo sapiens
ctctcataaagaattccagaaacaaggcttctgacccattggtttattgagttcagttcataattattgggtcactgttgttaccctggacatctgaatgggtggaaatggtaatttagattaaataactacaggtaaggatcatcagttacatgtcacgatcacctgtaaaattctgtgatgaccaaagaggtgatgatagggttgggttaatggtaaagaagaaactgtcagtgggatttgaaagtgggacagcatgtcagtaagttaagtgctttcaagattgagatggtttctgtctgagtggatatatgttaatgtgttggagaacagctctgagccttttgaagatatcttagccataacagcaaattatggattcattagg

SEQ ID NO: 407037 - DNA, 245 bp, Homo sapiens
ggtgagactctactaggggccaggaaaagagtagtaaatgaaaaatggcctttgccttaagagcatgacctgtgaggagaccagaatgcaaacgggcaattgtagtgcaagatgcgaagtaccgtagaaggcctgagcacagcaacccaagggagctcacagtgagggccaacattggttctcagaggaagatatttatgaactaagacatgaaggaaacaagaaggaggtcatcaagtgaagca

SEQ ID NO: 407038 - DNA, 509 bp, Homo sapiens
cgaagcaggaggggagattccaggcagaggaaactgcttggggtaaagaaaacaaaaaacgcaacccccccagcatggtgcgtactggagatgagaaaatggaggtaccaaaaagtgggctctgaactgcagagcctggctccagagcccttgtatttgactactgggatccaccgttattctcacagccgcgtttcccacagggctgctttgtatggcctcttagaaaagtcctgcctgtctccaccatccagactatgatgtccgtgaggtcagaggaaagggagaatgtctcacatacagaaaatgcttgatcaacattgatggaatcataaatgggcctcagcggcacctgtcctgagtcagcatctcacagaggttttgccagcgccagccacatctccagcatgaaggtgattgtctgagtgtgtccagtccagttcctgccttaataaaaatcactgctgcaagggagagggctgccaaggccctgcctccctccaacccca

SEQ ID NO: 407039 - DNA, 214 bp, Homo sapiens
cgaagcaggaggggagattccaggcagaggaaactgcttggggtaaagaaaacaaaaaacgcaacccccccagcatggtgcgtactggagatgcagatgctgtggctcaaaggattaattaatttgcttaagataatgcaacatgagaaaagcagatcaggacggaattccagaacaaggattttgcttgaaataacatcactactaattgtct

SEQ ID NO: 407040 - DNA, 351 bp, Homo sapiens
caatggcacaatctcggcttactgcaacctctgcctcctgggttcaagccattctcctgcctcagcctcccaagtagctgcgattacaggcacctgccaccatacctggccaattggtgaaacccagtctctactaaaagtacaaaaattagccacgcgcctaatcccaactactcgggaggctgagacaggagaattgcttgaacctgagaggcagtgagccaggatcgcaccactgcactccagcctgggcaagagagtgagaatttgtctcaaaagaaatggggtggaatcaggtgtcagtgtccccagctttcatgaaaagcataaataaaacttccttcagctaag

SEQ ID NO: 407041 - DNA, 258 bp, Homo sapiens
gcagtagcagtttacatagtacagcattctgcaaaaattgcatgaaatgtggacacaagatgtactgtatgacttaattacctgtcattctctgacaccattactacctactagaagttcaaataatttatctttaacattgcaatatctgataaactttttaaaatgtaaataattcaaagccttgaaaatctatcatgaatctgctcaacatttcaaagtgactattttgaaatgcctataaatgctatatacctg

SEQ ID NO: 407042 - DNA, 209 bp, Homo sapiens
aaaatcaggagcaagacaaggatgctcacttttagtactcctgttccacatagtactagaagtcctagccagagcagttagttatgatgaagagatagagaaatacttattgggaagaaaaaggaaaagaagtcttggtttgcagaagtcatgatcatatagatgaaaaaaaacctaattaacacctccaggaaaaattattagaacca

SEQ ID NO: 407043 - DNA, 255 bp, Homo sapiens
gaaggccagaatttgaagctgtaggaagagtttcttcaactccagattttttttaaaagagcactcctctaaatcacctgaaatgttacaaggtagtggaacagaactgtgaatgtttttaaaaactgacaaacaggtatttttaaatcaaagaataatttagaaatgtatggatattaaataccaacattattatgcaaatgctcttagttataaccttaaaataggcagcttattaccttttttaacaaacaa

SEQ ID NO: 407044 - DNA, 422 bp, Homo sapiens
ttccaaggatgcttgcttgtaaaaccattcctaaattggcttctgtgattagagcatgtgcagaaatgccagaccacaaagaattatcaccaaagacaacttcttctcaaatatgaataagatggcatgttatagatgaagttcacatttgaagcatctgaacatggtaaaataatatgatcaaatgaggttgcgtctctgagattctcatgaaactgggctacagtcctggctacttaccctcaaacttttatcataaaacacaatttctgctatgttgaagccatttttattttgtggttgtttttacttaaagtggaaattaatctttattgatgcaattgctttttgtttcttgtcttaaaaatatgtcaaaataacataacctgatataattgaattggcaaaatgtaaaaatgtac

SEQ ID NO: 407045 - DNA, 283 bp, Homo sapiens
ttaagtctacacatctctgtagcaccccaattaaaatgagagaagaaaaatggagagataggaactacatgtagtttccagtgtggaacaagtggatggtatttattaacggtgacaaggaggatgatatttttaatattttaactccctgttgataaaagtgaaagagtctaaagtttagaaggggttgttagtgatttagtgatgacctaaacaagcaaatgtggacttttcaatgaaaacctctttgcaggggtggttgaggtcatgttagccagtaatc

SEQ ID NO: 407046 - DNA, 229 bp, Homo sapiens
gatatttcaaagcccatagataactttggctgtttcaggaaagaaaatctatcaaatttctgggaagcaacagataatgggcaagagacctttgggatctacgtgatggccaactaacaatgtgtgcattccggtttgcatgttggggttatttaccatctagtttcttggacattgttacatgcacctcataattacacagtaatagaatctagctctaagggcagga

SEQ ID NO: 407047 - DNA, 318 bp, Homo sapiens
gtaattggagagggtttggggtatggataacagcattgaaaaggcccaagtcaagaaagcatttgaaaaattgaaaaaggtctaattgtgtttggagcatagagtgttaaggacataggtgaggtggcaagcagggaacgaatatctggtgatactgaaaaccatatcaagaagtttgtacctcattctaaggccaatggcagcacgctgaaggacgttaagtacagggataacacgatctgatcctcattttggaacgttaatgcaggtgactgtcggactagaggctgtttcagcagtcctggtgacagaacgaac

SEQ ID NO: 407048 - DNA, 417 bp, Homo sapiens
gtggttttatttctacagcaaatcaacatgtctgctggcacctgatatagagagccaccaagccaatatgtgcctttttctctatacctgcctgtaaatgtcatccacagaagtttagtttggtagggccatcaatacacttttaaggtcccagctcagttctgtatctactttccagtatttttcacaatttacccagggattggtaaactatgtttcatggactaaatctcctgcaacttgtttttataaattgtctcattgaagcataaccataaccagtttttacatattacccaggagtgcttttatgctaaaatgacagtgttgagtagttaggccacagagatcatgtgatctgcaatgcctaaaatatttactgcccggctctttacagaaataactttctgacccctg

SEQ ID NO: 407049 - DNA, 325 bp, Homo sapiens
aaaaaccttggtgatgcactgcacgctttaacataataccctatttcatttattcttgatggtgattctagaatgtaagtggaattttttgccatctatggataaagaaacagaagctctacagtactggttgtatgatttgcccaaggccacatactagtacatgatggcctccatatttgaccccagatcttctggcattagctctaggaatgttgtcattacaccaacagctgtttctccaggtgttaacttgcttatgcatttttaatgcaaagtcacaatatcaggatagtaatgaatgaaataaatataaatgttactt

SEQ ID NO: 407050 - DNA, 470 bp, Homo sapiens
gggaaaatatcaacaagaagagaaatgcgactgctcttcctatagaacagccatctttttttttctttacttctctaacaaacttactttccaaaaaaaaaaaaagaagaagaagaaggaaccaaggaagggagggaggcaaatgcttgacaaaatttccccaaataaagcagtgcccgatttatggcacagtcgcgcatggccacagcagctgtgctgtactccccctgcagcatatcccctgctatgctcactccgcaactcattcaaatacctacctatcaaatacacaagacttgataacacagcctggggatggaaatataaacagaacaggtcctaacactcaaaaagctcagcctcgtaaccacacagaatcatatgataaaaatgtttttatggtatatggtgtatcatcactggatgctacaagagtaaaaaagatggagaaactggtgaagctgaggcag

SEQ ID NO: 407051 - DNA, 406 bp, Homo sapiens
acctcagtattctcagtggtcaaacaggggagttggtctagatgagaggcagccaacctaaatgcctacggaaccacagcaggccctggagacaagtgaagagatctggttgtaaaatcacagtgctgcagtgtcctcatcaaactgaagagtaggagtaagagctccttcaaatggttcatgcctgtaatcccagcactttgggaggccgagaagggcagatcacaagctcaagagattgagaccattctggccaacatggtgaaaccctgtctctactaaaaatataaaaattagctgggcttggtggcgtgcacctgtagtcccagctactcggaaggctgaggcaggagaatcgcttgaacccatgaagcagaggttgcagtgagcccagatcgcaccagcc

SEQ ID NO: 407052 - DNA, 604 bp, Homo sapiens
aaagcattgtcagatgtagagtgctcagatgtggctcttaaagactatatacatctgaatttttcatcctatagttagtaagatgcataaaatcaatccactactgaaatagtttccagtcagacatttctgagttcagacatttctcaacattcttttaacaacatttttctgaatcctcaatagaaaatcacattaatcttattttaaaatttggcctttttcaacactaacgttgagtaccggtagcttgtgatcaaaggcatatacttccttatgagatttctttactaaagcaagatttcattaaatctctatttcctaaatatcattctatacaaaagatattttttaaacggtaaggattaagacaatcactgatagctttgttgtgagcaattttgattcccatgtatcacatgaattacacttccttaaataaattacagtttatggctgtatgatttattctctaattctaacatagtctagttgtcaaaaggaaatatgtaatctttttatgattgttgaatcaataaataccaatttgtgaaacatgaatgtgtttaaactgcagtgaataaatgagatgtgctttaattta

SEQ ID NO: 407053 - DNA, 380 bp, Homo sapiens
gaagcaaatgattttgaaatttttaaaaacatgctgttctttttctgttaagattagtctacaataaagcgtatacttgcagtgctctgttaagaacatggatgaatttgtcatatcctttctattctgtatcttatagtaagtgcttaactattagttgatgtaacaactacaacttagaatcatgacccacagaagccaaacatgctaaccaactcagattactagcatatctttaaaaatgtcatatattccttcctttgtgtacttggaattgtgcaatatacaatacatggattatagatgatgcaattttatgtgtgtgagagagattaatcagtcttggaatatgatcttgaatttatcttaaaatatctgca

SEQ ID NO: 407054 - DNA, 451 bp, Homo sapiens
atactttcgggagagatatgtgtggtggatggcagtgggtgaatgacaaaagggattgggacataaggtgatcttaggcaaggaaacaaaacagataaaagcactggacaaagcatagtactttcagaaaccacaaattggtgtgctgggagctcatatgtaggtgtgagatgagataaggctggggagataatatcatggaataatactatgaaggtttctatattatcagtatagagagtatggattttatttaccaacaatgaagagccattgaaccattgagcagtttaaccaggggacaggagagagttacatttaaaaaaattctggaagcaacagaatgatgagatagatttctgaactaaagcagtggtcatggaaatgagaaggaggaatttaaaagggatttagagtttcatcatttgagaaacaataaaggtgtacaatg

SEQ ID NO: 407055 - DNA, 762 bp, Homo sapiens
gtctctcgccgcagcctgagctccaggtctccccttcgctgctctgtgtcctctgctcctagaggcccaacatctgtggccctgtgacctgcaggtattgggagacccacagctaagacaccgggaccccctgaaagcctagaaatggacgacttgaaatatggagtgtatcctctcaaggaagcaagtggatgccctggggctgagaggaatcttctagtttactcttattttgaaaaggccaggagtggtggctcacacctgtaatcccagctctgggaggccaaggccagtggattgcttgagcccaggagtttgagaccagcctggacaacgtggaaaaaccccatctctactaaaaatacaaaaacaacaaaacaaaaacaaaaaacacctcagctgggtgtggtggtgcaggcctgtaatctcagctactccagaggctgaggcatgagaatcccttgaaccacagatgcagaggttgcagtgaactgagatcatgccactgcactccatcctgggcaacagagtgagactcggtctcaagagggaaaataaggcatttttctcatttaaataataaatagtattccattatgtatatcaaccacattgtctttatttactcattagatgttgaactgtttattctgtattttggctattgtgaaacaagtgctgcaaacagaagtgcaaatgtttctttattcttattttgttttggatatatacccagtagtgcgattgctgtattacctggta

SEQ ID NO: 407056 - DNA, 723 bp, Homo sapiens
gtctctcgccgcagcctgagctccaggtctccccttcgctgctctgtgtcctctgctcctagaggcccaacatctgtggccctgtgacctgcaggtattgggagacccacagctaagacaccgggaccccctgaaagcctagaaatggacgacttgaaatatggagtgtatcctctcaaggaagcaagtggatgccctggggctgagaggaatcttctagtttactcttattttgaaaaggagacattgacatttagggatgtggccatagaattctctctggaggagtgggaatgcctgaaccctgctcagcagaatttatatatgaatgtgatgttagaaaactacaaaaacctggtcttcttgggtgttgctgtctctaagcaagacccagtcacctgtctggagcaagaaaaagagccctggaatatgaagagacatgagatggtggatgaacccccagctatgtgttcttattttaccaaagacctttggccagagcaagacataaaagattcttttcaacaagtaatactgagaagatatggcaaatgtgaacatgagaatttacagttaagaaaaggctccgcaagtgtagatgagtataaggtgcacaaagaaggttataatgagctaaaccagtgtttgacaactacccagagcaaaatatttccatgtgataaatatgtgaaagtctttcataaatttttaaatgcaaataga

SEQ ID NO: 407057 - DNA, 513 bp, Homo sapiens
gtggaagaaaaatagtgttaaaaagtgaaaaatttgtgacagataaaatagtatcccaaaagaccagaaaaaaacaaaaacaaaaacaaaaaaacctgactctagtgagatggtgtaagaacttgcaaagtaaaatgcacctggagcagtcaccgagaaatactgcagtgtctcctgtatgggtggttcatgagcacataagtgagcaggagtgggtggaagaatctcccaagtgattgaatggcctgacttgaaacatgagtcagacacacatttgttttttaatcagcactgccactccctgggtttgtcaccttgaaaatatttgtttacttattttgacctcacttttttagctgtaaattgcattatattagtagggcttgaaaggtaggaatttttttttttttttgaaacaagtttcactcttgctgcccaggctgcagaggttgtagtgagccgagaccgtgccactgcactccagcctgggtgacagagtgacactctgtctga

SEQ ID NO: 407058 - DNA, 784 bp, Homo sapiens
gagactccgtctcaaaaaaaatttatactgtacaaaaaccccacaagtgtgaaaaacatggcaaagcctttaagaagccctcaattcttaacagacataagataatttatactggagagaaactctacaaatcagaaagatgtgactacttttgacaacgcctcaaacttttctaaccataaaagtaattatactggtgagaaatcctagaaatctgaagagtgagataaagcctttaaatggttgtcacacttcattgtaggccaggagtggtggctcacacctgtaatcccagctctgggaggccaaggccagtggattgcttgagcccaggagtttgagaccagcctggacaacgtggaaaaaccccatctctactaaaaatacaaaaacaacaaaacaaaaacaaaaaacacctcagctgggtgtggtggtgcaggcctgtaatctcagctactccagaggctgaggcatgagaatcccttgaaccacagatgcagaggttgcagtgaactgagatcatgccactgcactccatcctgggcaacagagtgagactcggtctcaagagggaaaataaggcatttttctcatttaaataataaatagtattccattatgtatatcaaccacattgtctttatttactcattagatgttgaactgtttattctgtattttggctattgtgaaacaagtgctgcaaacagaagtgcaaatgtttctttattcttattttgttttggatatatacccagtagtgcgattgctgtattacctggta

SEQ ID NO: 407059 - DNA, 311 bp, Homo sapiens
  misc_feature (39)..(39): n is a, c, g, or t
gagacatgagatggtggatgaacccccaggatacatgtncaggatgtgcagctatgtgttcttattttaccaaagacctttggccagagcaagacataaaagattcttttcaacaagtaatactgagaagatatggcaaatgtgaacatgagaatttacagttaagaaaaggctccgcaagtgtagatgagtataaggtgcacaaagaaggttataatgagctaaaccagtgtttgacaactacccagagcaaaatatttccatgtgataaatatgtgaaagtctttcataaatttttaaatgcaaataga

SEQ ID NO: 407060 - DNA, 350 bp, Homo sapiens
caccatgttgtgcaataaatctcttgaacttatttcttccatttgactataattatgtattatttcacaaacatgtttccagccttccatttcttataaataacttgcatctgatggtcaccattttactctctacatcaatgggattaagttttttggaatccatgtgtaagtgaaattatgagacactaatctttctgtgccttgcttatcccaactaatacaatgtcctccaacttcatccatgtgattgagaataatagtttttgttttttttttaaggccaggagtggtggctcacacctgtaatcccagctctgggaggccaaggccagtggattgcttgagcc

SEQ ID NO: 407061 - DNA, 455 bp, Homo sapiens
cagccaccttttagtttttttctggtcgtgggtttcagtgctgtctggggatgaactaagatatccaccgtggttatgtcagctaaagtgcctagtgaatatcagcttctggtttattttcttccataggacgacttgaaatatggagtgtatcctctcaaggaagcaagtggatgccctggggctgagaggaatcttctagtttactcttattttgaaaaggtaacctcttgagacattaaaattgtctacgcccaacccagctttcatttcttggggacacattgctggtcagccagtccgatgctggcactgatgggaaaacacagaaataatgtatgccccctggattgtcttagggggcagaaagataatgaaataaatatagtggaagaaaaatagtgttaaaaagtgaaaaatttgtgacagataaaatagtatcccaaaagaccaga

SEQ ID NO: 407062 - DNA, 1964 bp, Homo sapiens
  misc_feature (16)..(16): n is a, c, g, or t
aggggcccggattganccctccccgcccgggctcccgacgcgccgaggtctcggggaggcccggacgcgccggtcgcaggcccggccggcgagcggcgggcgggcggcggggagcgggctgcgcggggcgggcggcgggcccggcgctattccggccaggaggcgggaggcggttgccggctgcgcgccgaagcctgcgcgccagtcctccggccactgctatcgcccacggccgcaccatggccctaaaggccgagggcgccgcactcgactgcttcgaggtgacgctgaaatgcgaggaaggggaggacgaggaggaggccatggtggtggccgtaattccgcggcccgagccgatgctcagagtgacccaacaggagaagaccccaccgcctagacccagcccgctagaggcaggcagtgatggctgtgaggagccgaagcagcaggtgtcttgggagcaggagttcctggtgggcagcagcccaggaggcagcgggcgggcactgtgcatggtgtgtggcgctgagatccgggcaccctcggccgacacagctcgctcgcacatcttggagcagcaccctcacaccttggacctgagcccttctgagaagagcaatatcctggaggcctggagtgaaggggtggccctcttgcaagacgtgagagctgagcagccgtccccacccaactcagactcgggccaggatgcccacccagacccagacgccaacccagacgctgccagaatgccagccgaaatcgtcgttctccttgactctgaggataacccatccctccctaaaaggagcaggcccaggggactccgccccctcgagcttcctgctgtccctgccacagagccaggaaataagaagccccgtggtcagagatggaaggaacccccaggggaagagccagtcagaaagaaaagaggcagacctatgaccaaaaacctggaccctgacccagagcccccatcgccagactcgcccacggagactttcgcagcaccagccgaggtccgacacttcactgacggcagcttccccgccggcttcgtcttgcagctcttctcccacacccagctcaggggcccagacagcaaggactcacccaaagacagggaagtggcagaaggaggccttccccgggcggagagcccctctccagctccccctccggggctccgcgggacactggatctccaggttatccgcgtgcggatggaggagcccccagcggtcagcctcctgcaagactggtccaggcacccccagggcaccaagcgtgtgggagcaggtgacacctcagactggcccacagttctgtcagaatccagcaccactgtggcagggaagccggaaaaagggaatggagtgtaaattcttgctttcctggggagggagggagggatgaggcagcgtcccccagtggcttataactcagagctgcctggctcacccacctggtggagagagtagaaacaggtgccagggcaggagggggctggggcagcatccactgttatttcggggcactggaaagtgtctgttcctggccaggcctgaggtcggcgagggtggctgaggctgttgtgcagtagggcactgggcctgtggagaacacctaccccagtccttcgctgacccccacctctgtttgtcccccatgacctcctcccaccctccccctgctccccaccattctcccttggcacagtgccttacacaagagtggtcataagggggtttgaactgagtcccactacctcgggggacacctctcctccccacttgttcaggcttctaaaccaggaggcctccattacctcttcctgtcccacccctgcagaggcctgaagctgggcctgggcaccccattcactcccgttctcatttacatctgttttcctgttgtatatatcacctttgttgacaataaattatttttttttattaaaa

SEQ ID NO: 407063 - DNA, 1896 bp, Homo sapiens
  misc_feature (16)..(16): n is a, c, g, or t
aggggcccggattganccctccccgcccgggctcccgacgcgccgaggtctcggggaggcccggacgcgccggtcgcaggcccggccggcgagcggcgggcgggcggcggggagcgggctgcgcggggcgggcggcgggcccggcgctattccggccaggaggcgggaggcggttgccggctgcgcgccgaagcctgcgcgccagtcctccggccactgctatcgcccacggccgcaccatggccctaaaggccgagggcgccgcactcgactgcttcgaggtgacgctgaaatgcgaggaaggggaggacgaggaggaggccatggtggtggccgtaattccgcggcccgagccgatgctcagagtgacccaacaggagaagaccccaccgcctagacccagcccgctagaggcaggcagtgatggctgtgaggagccgaagcagcaggtgtcttgggagcaggagttcctggtgggcagcagcccaggaggcagcgggcgggcactgtgcatggtgtgtggcgctgagatccgggcaccctcggccgacacagctcgctcgcacatcttggagcagcaccctcacaccttggacctgagcccttctgagaagagcaatatcctggaggcctggagtgaaggggtggccctcttgcaagacgtgagagctgagcagccgtccccacccaactcagactcgggccaggatgcccacccagacccagacgccaacccagacgctgccagaatgccagccgaaatcgtcgttctccttgactctgaggataacccatccctccctaaaaggagcaggcccaggggactccgccccctcgagcttcctgagcccccatcgccagactcgcccacggagactttcgcagcaccagccgaggtccgacacttcactgacggcagcttccccgccggcttcgtcttgcagctcttctcccacacccagctcaggggcccagacagcaaggactcacccaaagacagggaagtggcagaaggaggccttccccgggcggagagcccctctccagggagccctcatttcaagtcctggggtaccctgtgcgcaaactccatctatctggagtgctccccctccggggctccgcgggacactggatctccaggttatccgcgtgcggatggaggagcccccagcggtcagcctcctgcaagactggtccaggcacccccagggcaccaagcgtgtgggagcaggtgacacctcagactggcccacagttctgtcagaatccagcaccactgtggcagggaagccggaaaaagggaatggagtgtaaattcttgctttcctggggagggagggagggatgaggcagcgtcccccagtggcttataactcagagctgcctggctcacccacctggtggagagagtagaaacaggtgccagggcaggagggggctggggcagcatccactgttatttcggggcactggaaagtgtctgttcctggccaggcctgaggtcggcgagggtggctgaggctgttgtgcagtagggcactgggcctgtggagaacacctaccccagtccttcgctgacccccacctctgtttgtcccccatgacctcctcccaccctccccctgctccccaccattctcccttggcacagtgccttacacaagagtggtcataagggggtttgaactgagtcccactacctcgggggacacctctcctccccacttgttcaggcttctaaaccaggaggcctccattacctcttcctgtcccacccctgcagaggcctgaagctgggcctgggcaccccattcactcccgttctcatttacatctgttttcctgttgtatatatcacctttgttgacaataaattatttttttttattaaaa

SEQ ID NO: 407064 - DNA, 1812 bp, Homo sapiens
  misc_feature (16)..(16): n is a, c, g, or t
aggggcccggattganccctccccgcccgggctcccgacgcgccgaggtctcggggaggcccggacgcgccggtcgcaggcccggccggcgagcggcgggcgggcggcggggagcgggctgcgcggggcgggcggcgggcccggcgctattccggccaggaggcgggaggcggttgccggctgcgcgccgaagcctgcgcgccagtcctccggccactgctatcgcccacggccgcaccatggccctaaaggccgagggcgccgcactcgactgcttcgaggtgacgctgaaatgcgaggaaggggaggacgaggaggaggccatggtggtggccgtaattccgcggcccgagccgatgctcagagtgacccaacaggagaagaccccaccgcctagacccagcccgctagaggcaggcagtgatggctgtgaggagccgaagcagcaggtgtcttgggagcaggagttcctggtgggcagcagcccaggaggcagcgggcgggcactgtgcatggtgtgtggcgctgagatccgggcaccctcggccgacacagctcgctcgcacatcttggagcagcaccctcacaccttggacctgagcccttctgagaagagcaatatcctggaggcctggagtgaaggggtggccctcttgcaagacgtgagagctgagcagccgtccccacccaactcagactcgggccaggatgcccacccagacccagacgccaacccagacgctgccagaatgccagccgaaatcgtcgttctccttgactctgaggataacccatccctccctaaaaggagcaggcccaggggactccgccccctcgagcttcctgctgtccctgccacagagccaggaaataagaagccccgtggtcagagatggaaggaacccccaggggaagagccagtcagaaagaaaagaggcagacctatgaccaaaaacctggaccctgacccagagcccccatcgccagactcgcccacggagactttcgcagcaccagccgaggtccgacacttcactgacggcagcttccccgccggcttcgtcttgcagctcttctcccacacccagctcaggggcccagacagcaaggactcacccaaagacagggaagtggcagaaggaggccttccccgggcggagagcccctctccagctccccctccggggctccgcgggacactggatctccaggttatccgcgtgcggatggaggagcccccagcggtcagcctcctgcaagactggtccaggcacccccagggcaccaagcgtgtgggagcaggtgacacctcagactggcccacagttctgtcagaatccagcaccactgtggcagggaagccggaaaaagggaatggagtgtaaattcttgctttcctggggagggagggagggatgaggcagcgtcccccagtggcttataactcagagctgcctggctcacccacctggtggagagagtagaaacaggtgccagggcaggagggggctggggcagcatccactgttatttcggggcactggaaagtgtctgttcctggccaggcctgaggtcggcgagggtggctgaggctgttgtgcagtagggcactgggcctgtggagaacacctaccccagtccttcgctgacccccacctctgtttgtcccccatgacctcctccatccttatttttgttttctttctttttgtttatttttgtcctttctattatctttctacctttttgtttatactttttattctctttttcttggtatctctccttctcctcttttgctaaattatcttt

SEQ ID NO: 407065 - DNA, 1461 bp, Homo sapiens
  misc_feature (16)..(16): n is a, c, g, or t
aggggcccggattganccctccccgcccgggctcccgacgcgccgaggtctcggggaggcccggacgcgccggtcgcaggcccggccggcgagcggcgggcgggcggcggggagcgggctgcgcggggcgggcggcgggcccggcgctattccggccaggaggcgggaggcggttgccggctgcgcgccgaagcctgcgcgccagtcctccggccactgctatcgcccacggccgcaccatggccctaaaggccgagggcgccgcactcgactgcttcgaggtgacgctgaaatgcgaggaaggggaggacgaggaggaggccatggtggtggccgtaattccgcggcccgagccgatgctcagagtgacccaacaggagaagaccccaccgcctagacccagcccgctagaggcaggcagtgatggctgtgaggagccgaagcagcaggtgtcttgggagcaggagttcctggtgggcagcagcccaggaggcagcgggcgggcactgtgcatggtgtgtggcgctgagatccgggcaccctcggccgacacagctcgctcgcacatcttggagcagcaccctcacaccttggacctgagcccttctgagaagagcaatatcctggaggcctggagtgaaggggtggccctcttgcaagacgtgagagctgagcagccgtccccacccaactcagactcgggccaggatgcccacccagacccagacgccaacccagacgctgccagaatgccagccgaaatcgtcgttctccttgactctgaggataacccatccctccctaaaaggagcaggcccaggggactccgccccctcgagcttcctgctgtccctgccacagagccaggaaataagaagccccgtggtcagagatggaaggaacccccaggggaagagccagtcagaaagaaaagaggcagacctatgaccaaaaacctggaccctgacccagagcccccatcgccagactcgcccacggagactttcgcagcaccagccgaggtccgacacttcactgacggcagcttccccgccggcttcgtcttgcagctcttctcccacacccagctcaggggcccagacagcaaggactcacccaaagacagggaagtggcagaaggaggccttccccgggcggagagcccctctccagggagccctcatttcaagtcctggggtaccctgtgcgcaaactccatctatctggagtggtatataggctggaggcagtaaatctttaaaaaccaggggcccccgtggcggttctttgcggagcagaggctctggacctgtggtttcagacgatctcacgaacccaaagcttggacagatttctcagaaacctgtgaggcttcgaccaaaatgtctctactttctgtgttgttatgtacgtattgaagttctctgaagactttatttaaataaagatcctgccacttta

SEQ ID NO: 407066 - DNA, 1066 bp, Homo sapiens
  misc_feature (16)..(16): n is a, c, g, or t
aggggcccggattganccctccccgcccgggctcccgacgcgccgaggtctcggggaggcccggacgcgccggtcgcaggcccggccggcgagcggcgggcgggcggcggggagcgggctgcgcggggcgggcggcgggcccggcgctattccggccaggaggcgggaggcggttgccggctgcgcgccgaagcctgcgcgccagtcctccggccactgctatcgcccacggccgcaccatggccctaaaggccgagggcgccgcactcgactgcttcgaggtgacgctgaaatgcgaggaaggggaggacgaggaggaggccatggtggtggccgtaattccgcggcccgagccgatgctcagagtgacccaacaggagaagaccccaccgcctagacccagcccgctagaggcaggcagtgatggctgtgaggagccgaagcagcaggtgtcttgggagcaggagttcctggtgggcagcagcccaggaggcagcgggcgggcactgtgcatggtgtgtggcgctgagatccgggcaccctcggccgacacagctcgctcgcacatcttggagcagcaccctcacaccttggacctgagcccttctgagaagagcaatatcctggaggcctggagtgaaggggtggccctcttgcaagacgtgagagctgagcagccgtccccacccaactcaggggacagagacccagagagagagggggacagagacccagagagagagggggacagagacccagagagagagggggacagagacccagagagagagggggacagagacccagagagagagggggacagagacccagagagagagggggacagagacccagagagagagggacacggagacagagggagacagagacaaagagacgcagagagaacgggaccccctcagagagaagataggtggggcggaggggacaaagagaccaagacagggatgggcggagggccagggttcagggcgggcgtcccggctccactctggagccccgagcatgcagccacctggtgcccgggccccgcacacgcgcaggt

SEQ ID NO: 407067 - DNA, 2182 bp, Homo sapiens
  misc_feature (16)..(16): n is a, c, g, or t
aggggcccggattganccctccccgcccgggctcccgacgcgccgaggtctcggggaggcccggacgcgccggtcgcaggcccggccggcgagcggcgggcgggcggcggggagcgggctgcgcggggcgggcggcgggcccggcgctattccggccaggaggcgggaggcggttgccggctgcgcgccgaagcctgcgcgccagtcctccggccactgctatcgcccacggccgcaccatggccctaaaggccgagggcgccgcactcgactgcttcgaggtgacgctgaaatgcgaggaaggggaggacgaggaggaggccatggtggtggccgtaattccgcggcccgagccgatgctcagagtgacccaacaggagaagaccccaccgcctagacccagcccgctagaggcaggcagtgatggctgtgaggagccgaagcagcaggtgtcttgggagcaggagttcctggtgggcagcagcccaggaggcagcgggcgggcactgtgcatggtgtgtggcgctgagatccgggcaccctcggccgacacagctcgctcgcacatcttggagcagcaccctcacaccttggacctgagcccttctgagaagagcaatatcctggaggcctggagtgaaggggtggccctcttgcaagacgtgagagctgagcagccgtccccacccaactcagactcgggccaggatgcccacccagacccagacgccaacccagacgctgccagaatgccagccgaaatcgtcgttctccttgactctgaggataacccatccctccctaaaaggagcaggcccaggggactccgccccctcgagcttcctgctgtccctgccacagagccaggaaataagaagccccgtggtcagagatggaaggaacccccaggggaagagccagtcagaaagaaaagaggcagacctatgaccaaaaacctggaccctgacccagagcccccatcgccagactcgcccacggagactttcgcagcaccagccgaggtccgacacttcactgacggcagcttccccgccggcttcgtcttgcagctcttctcccacacccagctcaggggcccagacagcaaggactcacccaaagacagggaagtggcagaaggaggccttccccgggcggagagcccctctccagtttcagcttgagtcacattccagtcctggctccctgagaccgagtgtgctgcttggacttgagcgtgtcccgagtctcctggtcctctccggtggatccctgctctaaatggctgacctcttccactgtctaatgggtcttctgatttcattctcgaaagggagccctcatttcaagtcctggggtaccctgtgcgcaaactccatctatctggagtgctccccctccggggctccgcgggacactggatctccaggttatccgcgtgcggatggaggagcccccagcggtcagcctcctgcaagactggtccaggcacccccagggcaccaagcgtgtgggagcaggtgacacctcagactggcccacagttctgtcagaatccagcaccactgtggcagggaagccggaaaaagggaatggagtgtaaattcttgctttcctggggagggagggagggatgaggcagcgtcccccagtggcttataactcagagctgcctggctcacccacctggtggagagagtagaaacaggtgccagggcaggagggggctggggcagcatccactgttatttcggggcactggaaagtgtctgttcctggccaggcctgaggtcggcgagggtggctgaggctgttgtgcagtagggcactgggcctgtggagaacacctaccccagtccttcgctgacccccacctctgtttgtcccccatgacctcctcccaccctccccctgctccccaccattctcccttggcacagtgccttacacaagagtggtcataagggggtttgaactgagtcccactacctcgggggacacctctcctccccacttgttcaggcttctaaaccaggaggcctccattacctcttcctgtcccacccctgcagaggcctgaagctgggcctgggcaccccattcactcccgttctcatttacatctgttttcctgttgtatatatcacctttgttgacaataaattatttttttttattaaaa

SEQ ID NO: 407068 - DNA, 1949 bp, Homo sapiens
  misc_feature (16)..(16): n is a, c, g, or t
aggggcccggattganccctccccgcccgggctcccgacgcgccgaggtctcggggaggcccggacgcgccggtcgcaggcccggccggcgagcggcgggcgggcggcggggagcgggctgcgcggggcgggcggcgggcccggcgctattccggccaggaggcgggaggcggttgccggctgcgcgccgaagcctgcgcgccagtcctccggccactgctatcgcccacggccgcaccatggccctaaaggccgagggcgccgcactcgactgcttcgaggtgacgctgaaatgcgaggaaggggaggacgaggaggaggccatggtggtggccgtaattccgcggcccgagccgatgctcagagtgacccaacaggagaagaccccaccgcctagacccagcccgctagaggcaggcagtgatggctgtgaggagccgaagcagcaggtgtcttgggagcaggagttcctggtgggcagcagcccaggaggcagcgggcgggcactgtgcatggtgtgtggcgctgagatccgggcaccctcggccgacacagctcgctcgcacatcttggagcagcaccctcacaccttggacctgagcccttctgagaagagcaatatcctggaggcctggagtgaaggggtggccctcttgcaagacgtgagagctgagcagccgtccccacccaactcagactcgggccaggatgcccacccagacccagacgccaacccagacgctgccagaatgccagccgaaatcgtcgttctccttgactctgaggataacccatccctccctaaaaggagcaggcccaggggactccgccccctcgagcttcctgctgtccctgccacagagccaggaaataagaagccccgtggtcagagatggaaggaacccccaggggaagagccagtcagaaagaaaagaggcagacctatgaccaaaaacctggaccctgacccagagcccccatcgccagactcgcccacggagactttcgcagcaccagccgaggtccgacacttcactgacggcagcttccccgccggcttcgtcttgcagctcttctcccacacccagctcaggggcccagacagcaaggactcacccaaagacagggaagtggcagaaggaggccttccccgggcggagagcccctctccaggcctcaccccttcacgtagatcacagttttaactgtctcaagtttcagcttgagtcacattccagtcctggctccctgagaccgagtgtgctgcttggacttgagcgtgtcccgagtctcctggtcctctccggtggatccctgctctaaatggctgacctcttccactgtctaatgggtcttctgatttcattctcgaaagggagccctcatttcaagtcctggggtaccctgtgcgcaaactccatctatctggagtggtgagtagatgagaagagaatccctgagattctaggtttctttggggtgagtgggcaaagtctgagaggaaggggcttcagcaggctgcttgagtgatctgagggggcggaggcaattgtagggtgttgtcagcagtggcagccttcgtggaggttggagatgcctgggaaaccatagaggatacctcactggtacacaagtgttcctggagcctgtgcccgagggaggcaccctgggagatggcatgagtgagacagcctttgtcccccaaaattctgtgtccaggtatataggctggaggcagtaaatctttaaaaaccaggggcccccgtggcggttctttgcggagcagaggctctggacctgtggtttcagacgatctcacgaacccaaagcttggacagatttctcagaaacctgtgaggcttcgaccaaaatgtctctactttctgtgttgttatgtacgtattgaagttctctgaagactttatttaaataaagatcctgccacttta

SEQ ID NO: 407069 - DNA, 1075 bp, Homo sapiens
  misc_feature (16)..(16): n is a, c, g, or t
aggggcccggattganccctccccgcccgggctcccgacgcgccgaggtctcggggaggcccggacgcgccggtcgcaggcccggccggcgagcggcgggcgggcggcggggagcgggctgcgcggggcgggcggcgggcccggcgctattccggccaggaggcgggaggcggttgccggctgcgcgccgaagcctgcgcgccagtcctccggccactgctatcgcccacggccgcaccatggccctaaaggccgagggcgccgcactcgactgcttcgaggtgacgctgaaatgcgaggaaggggaggacgaggaggaggccatggtggtggccgtaattccgcggcccgagccgatgctcagagtgacccaacaggagaagaccccaccgcctagacccagcccgctagaggcaggcagtgatggctgtgaggagccgaagcagcaggtgtcttgggagcaggagttcctggtgggcagcagcccaggaggcagcgggcgggcactgtgcatggtgtgtggcgctgagatccgggcaccctcggccgacacagctcgctcgcacatcttggagcagcaccctcacaccttggacctgagcccttctgagaagagcaatatcctggaggcctggagtgaaggggtggccctcttgcaagacgtgagagctgagcagccgtccccacccaactcagactcgggccaggatgcccacccagacccagacgccaacccagacgctgccagaatgccagccgaaatcgtcgttctccttgactctgaggataacccatccctccctaaaaggagcaggcccaggggactccgccccctcgagcttcctgagcccccatcgccagactcgcccacggagactttcgcagcaccagccgaggtccgacacttcactgacggcagcttccccgccggcttcgtcttgcagctcttctcccacaccctgcagaggcctgaagctgggcctgggcaccccattcactcccgttctcatttacatctgttttcctgttgtatatatcacctttgttgacaataaattatttttttttattaaaa

SEQ ID NO: 407070 - DNA, 202 bp, Homo sapiens
ttgacatattcttagaaagcattagttttgtgttttgcagaaatttattctatgcagaattttcatgaatttgttcctatgttttcctttggtgctccttagcataatatggtagcagacagccttgggagttaaagttatattttacttttgtaatgtgcaagtgtcactaatatttgaataaagtagatgtgatgcttta

SEQ ID NO: 407071 - DNA, 894 bp, Homo sapiens
gtgaagacctagccgtgcctggagtaaattaagccagcagcaaataatcccaaaggaggtaaacatctaaaagaaaggaatgaaaacaggttttatttataaatgcctcactgttggaacctgcatgaatgaaagctgaatctcaaagatcagacacgttggacttggaataatgtccatgttatgattccaatctgtgcctaaatctgaaccactcagttcttcatgcttgttggaatcctcctaaaattggaatttcctgggagatatccagtactttttgggctgtaaacagcaaaacaaacagcctttcttgtaatatgctacgtctagtgctaactgaattcaagaagtttatgagtgtggggaaagtaacttgatgtctttgcaaacttacaaatttgcttcagtttaaattttgaccaaaaattcatctcaggaatatgttttggaataattctttgctattagttataaatgtgacaaatatcgtttaaacaataaaatgttattttatacaacaaattatggcaacaaattccttgtagtgatagattttttaaaatctttaaatcatagatagggatttattatgctccatgtcaattatatgcatgtttgtgtgtatatgtgtgtatatgtgtgtgtatatatatttcacttaatctctgagaacagtctgaatttttatgtttctctattggatataattgaaaaacataagacaaagaaatcacttattagtacgttgatagaataaacgtgcttgatgccaaatatagacacacaaaatacacttaattcttctgtaagaactcttaaccatctatgagaacatcttatcaaattgatttccccctttctccttagtaaaaaaatcctgacgtttttagg

SEQ ID NO: 407072 - DNA, 914 bp, Homo sapiens
atcttcacatcaccagtatgatggaattgaagcccaagattggtaatgttatgccagcagcaaataatcccaaaggaggtaaacatctaaaagaaaggaatgaaaacaggttttatttataaatgcctcactgttggaacctgcatgaatgaaagctgaatctcaaagatcagacacgttggacttggaataatgtccatgttatgattccaatctgtgcctaaatctgaaccactcagttcttcatgcttgttggaatcctcctaaaattggaatttcctgggagatatccagtactttttgggctgtaaacagcaaaacaaacagcctttcttgtaatatgctacgtctagtgctaactgaattcaagaagtttatgagtgtggggaaagtaacttgatgtctttgcaaacttacaaatttgcttcagtttaaattttgaccaaaaattcatctcaggaatatgttttggaataattctttgctattagttataaatgtgacaaatatcgtttaaacaataaaatgttattttatacaacaaattatggcaacaaattccttgtagtgatagattttttaaaatctttaaatcatagatagggatttattatgctccatgtcaattatatgcatgtttgtgtgtatatgtgtgtatatgtgtgtgtatatatatttcacttaatctctgagaacagtctgaatttttatgtttctctattggatataattgaaaaacataagacaaagaaatcacttattagtacgttgatagaataaacgtgcttgatgccaaatatagacacacaaaatacacttaattcttctgtaagaactcttaaccatctatgagaacatcttatcaaattgatttccccctttctccttagtaaaaaaatcctgacgtttttagg

SEQ ID NO: 407073 - DNA, 914 bp, Homo sapiens
aggatttgcagaaagagccaacaactcctacagatgatgacagttctcattctccagcagcaaataatcccaaaggaggtaaacatctaaaagaaaggaatgaaaacaggttttatttataaatgcctcactgttggaacctgcatgaatgaaagctgaatctcaaagatcagacacgttggacttggaataatgtccatgttatgattccaatctgtgcctaaatctgaaccactcagttcttcatgcttgttggaatcctcctaaaattggaatttcctgggagatatccagtactttttgggctgtaaacagcaaaacaaacagcctttcttgtaatatgctacgtctagtgctaactgaattcaagaagtttatgagtgtggggaaagtaacttgatgtctttgcaaacttacaaatttgcttcagtttaaattttgaccaaaaattcatctcaggaatatgttttggaataattctttgctattagttataaatgtgacaaatatcgtttaaacaataaaatgttattttatacaacaaattatggcaacaaattccttgtagtgatagattttttaaaatctttaaatcatagatagggatttattatgctccatgtcaattatatgcatgtttgtgtgtatatgtgtgtatatgtgtgtgtatatatatttcacttaatctctgagaacagtctgaatttttatgtttctctattggatataattgaaaaacataagacaaagaaatcacttattagtacgttgatagaataaacgtgcttgatgccaaatatagacacacaaaatacacttaattcttctgtaagaactcttaaccatctatgagaacatcttatcaaattgatttccccctttctccttagtaaaaaaatcctgacgtttttagg

SEQ ID NO: 407074 - DNA, 897 bp, Homo sapiens
  misc_feature (37)..(37): n is a, c, g, or t
  misc_feature (41)..(41): n is a, c, g, or t
cgttgaacaatgagataataagataagaaattgctcnacgnaacgcaaatatcccttggaggtaaacatctaaaagaaaggaatgaaaacaggttttatttataaatgcctcactgttggaacctgcatgaatgaaagctgaatctcaaagatcagacacgttggacttggaataatgtccatgttatgattccaatctgtgcctaaatctgaaccactcagttcttcatgcttgttggaatcctcctaaaattggaatttcctgggagatatccagtactttttgggctgtaaacagcaaaacaaacagcctttcttgtaatatgctacgtctagtgctaactgaattcaagaagtttatgagtgtggggaaagtaacttgatgtctttgcaaacttacaaatttgcttcagtttaaattttgaccaaaaattcatctcaggaatatgttttggaataattctttgctattagttataaatgtgacaaatatcgtttaaacaataaaatgttattttatacaacaaattatggcaacaaattccttgtagtgatagattttttaaaatctttaaatcatagatagggatttattatgctccatgtcaattatatgcatgtttgtgtgtatatgtgtgtatatgtgtgtgtatatatatttcacttaatctctgagaacagtctgaatttttatgtttctctattggatataattgaaaaacataagacaaagaaatcacttattagtacgttgatagaataaacgtgcttgatgccaaatatagacacacaaaatacacttaattcttctgtaagaactcttaaccatctatgagaacatcttatcaaattgatttccccctttctccttagtaaaaaaatcctgacgtttttagg

SEQ ID NO: 407075 - DNA, 1217 bp, Homo sapiens
gctattaacactactcaaattttaaactctggatacaaatgactttgataaaagtccttaaaactattttgacattaaattatttggtattccacaaactacagtagctcatacctatgcaaatatttagaagaaggagaagtaccctttttctttgttttcatgatctccaaaatctagtttttagtctataaacatccatccctactccacattttcatgtaaagattatgtagaagttgggcaacagtgtagtcacaggatgtcatataagtgtgaataagctgagattattgcatttgtatttagcatattatacaattaaaatgtattttattaaacctgaagcaagttttctttcatgtctagacatcagtgtgttacagagtttaattcattaagctctgtatttgaatataacaccttgtaaaaatgtttgaaacttatcctcttgtatgttaaatatttaaatatttgtatatggccctattcagcctgtgctttataaatcacaaaagagctgggttttatatgtttgttttttatttctaagctctctgcgaaaaagttacaaattgtctccttaagatattttttctttgtaatttttttatatcatgttgtgatttccataaatatgtgcagttactcttgataatacttgtcttattcatttcaggttgctataacaaagtaccatagactgggtggcttataaacgacagaaatttatttcttacagctctggagctggaagtctgagatcagattaccagcatggttgggttctggtgagagccgtcttggttgcagactgccatcttcttgtatcctcacatggccaaaagaggacaagagaactctctggagtctgtttgataagagcatgaatcccattacatcttcacatggctcctcccaaagaccccacctcctaatatcatcacatgtcatcacatagggggttagaatttcaacatagaaattttgggagaacacaaacattcagtcagttgcaatacttaaggcaaattcatcttgcttataactctggtgcatgtgcattaaaatactattgcattgtaactgagtttgtacctattttctgctttctgattatttcctttgttcatgaaaataaatgactggtattacaaggtcacctaaataaataggtttgtgtacgtctgcgactagagagaaatactacagtgatt

SEQ ID NO: 407076 - DNA, 1074 bp, Homo sapiens
tcaatgtatagttcctcggcgcgcctctgaccttttcccggagctcttcaatcccagaagctatagcacaacggctgaatcgccaggacccccggggaggcgtggcttcaggaccggaagaagctcctgttgccaagggaacggtgcctgccaaggcgcctgctcagcgactgatgcacagactgctgcagaggctgccggttttcccaacttctagagacggctttgctcattaccaggcatccttcccatgtaggcatcgagaagaaggctgagggaccctcgcaccagatttccatcccggagaccgatacgagtgcgtccattcctgttgccagctcctgcgccctccggactaacctcaaaaaccagctggtttgtaaatatttgaatcacattatgggattgctagacagactttcagtcttgcttggcctgaagaagaaggaggttcatgttttgtgccttgggctagataatagtggcaaaacgacgatcattaacaaacttaaaccttcaaatgctcaatctcaaaatatccttccaacaataggattcagcatagagaaattcaaatcatccagtttgtcatttacagtgtttgacatgtcaggtcaaggaagatacagaaatctctgggaacactattataaagaaggccaagctattatttttgtcattgatagtagtgatagattaagaatggttgtggccaaagaagaactcgatactcttctgaatcatccagatattaaacaccgtcgaattccaatcttattctttgcaaataaaatggatcttagagatgcagtgacatctgtaaaagtgtctcagttgctgtgtttagagaacatcaaagataaaccctggcatatttgtgctagtgatgccataaaaggagaaggcttgcaagaaggtgtagactggcttcaagatcagatccagactgtgaagacatgaaaagataatagttggaaacctcagcaattttcaattcaaggaatctatctaagacaaatagaatacattttgtaaaagatgtttatgcatcaaaaaatataattttctgcttgc

SEQ ID NO: 407077 - DNA, 1133 bp, Homo sapiens
tcaatgtatagttcctcggcgcgcctctgaccttttcccggagctcttcaatcccagaagctatagcacaacggctgaatcgccaggacccccggggaggcgtggcttcaggaccggaagaagctcctgttgccaagggaacggtgcctgccaaggcgcctgctcagcgactgatgcacagactgctgcagaggctgccggttttcccaacttctagagacggctttgctcattaccaggcatccttcccatgtaggcatcgagaagaaggctgagggaccctcgcaccagatttccatcccggagaccgatacgagtgcgtccattcctgttgccagctcctgcgccctccggactaacctcaaaaaccagatacagttgtcttggaagcctgttattgataaagttgctgcagcctcacatccttcaagctggtttgtaaatatttgaatcacattatgggattgctagacagactttcagtcttgcttggcctgaagaagaaggaggttcatgttttgtgccttgggctagataatagtggcaaaacgacgatcattaacaaacttaaaccttcaaatgctcaatctcaaaatatccttccaacaataggattcagcatagagaaattcaaatcatccagtttgtcatttacagtgtttgacatgtcaggtcaaggaagatacagaaatctctgggaacactattataaagaaggccaagctattatttttgtcattgatagtagtgatagattaagaatggttgtggccaaagaagaactcgatactcttctgaatcatccagatattaaacaccgtcgaattccaatcttattctttgcaaataaaatggatcttagagatgcagtgacatctgtaaaagtgtctcagttgctgtgtttagagaacatcaaagataaaccctggcatatttgtgctagtgatgccataaaaggagaaggcttgcaagaaggtgtagactggcttcaagatcagatccagactgtgaagacatgaaaagataatagttggaaacctcagcaattttcaattcaaggaatctatctaagacaaatagaatacattttgtaaaagatgtttatgcatcaaaaaatataattttctgcttgc

SEQ ID NO: 407078 - DNA, 1452 bp, Homo sapiens
tcaatgtatagttcctcggcgcgcctctgaccttttcccggagctcttcaatcccagaagctatagcacaacggctgaatcgccaggacccccggggaggcgtggcttcaggaccggaagaagctcctgttgccaagggaacggtgcctgccaaggcgcctgctcagcgactgatgcacagactgctgcagaggctgccggttttcccaacttctagagacggctttgctcattaccaggcatccttcccatgtaggcatcgagaagaaggctgagggaccctcgcaccagatttccatcccggagaccgatacgagtgcgtccattcctgttgccagctcctgcgccctccggactaacctcaaaaaccagctggtttgtaaatatttgaatcacattatgggattgctagacagactttcagtcttgcttggcctgaagaagaaggaggttcatgttttgtgccttgggctagataatagtggcaaaacgacgatcattaacaaacttaaaccttcaaatgctcaatctcaaaatatccttccaacaataggattcagcatagagaaattcaaatcatccagtttgtcatttacagtgtttgacatgtcaggtcaaggaagatacagaaatctctgggaacactattataaagaaggccaagctattatttttgtcattgatagtagtgatagattaagaatggttgtggccaaagaagaactcgatactcttctgaatcatccagatattaaacaccgtcgaattccaatcttattctttgcaaataaaatggatcttagagatgcagtgacatctgtaaaagtgtctcagttgctgtgtttagagaacatcaaagataaaccctggcatatttgtgctagtgatgccataaaaggagaaggcttgcaagaaggtgtagactggcttcaagatcagatccagactgtgaagacatgaaaagataatagttggaaacctcagcaattttcaattcaaggaatctatctaagacaaatagaatacattttgtaaaagatgtttatgcatcaaaaaatataattttctgcttgcatttatggactctgacctttttaagaacataggacttcaggtatgctaatttggccattaattatttaaaaactaaatattccctcaaaagggctccctagaattatcaacttcttagtgaaggtctacatttgattgtacgtagaatgtttaaaagtcagttataagccatctcatcccatcataatttatgatatgtttaatatattttattttttaattgtctttttaaaaaatttagtttatgactttgcagtatgaattgtgcttgtgaaaaagaactttaaatatttataagggaccatgggtaattaatatatattcaatttttactatgtgtcactgtcaataaaatgtaaaatataatgtgccaactag

SEQ ID NO: 407079 - DNA, 1173 bp, Homo sapiens
tcaatgtatagttcctcggcgcgcctctgaccttttcccggagctcttcaatcccagaagctatagcacaacggctgaatcgccaggacccccggggaggcgtggcttcaggaccggaagaagctcctgttgccaagggaacggtgcctgccaaggcgcctgctcagcgactgatgcacagactgctgcagaggctgccggttttcccaacttctagagacggctttgctcattaccaggcatccttcccatgtaggcatcgagaagaaggctgagggaccctcgcaccagatttccatcccggagaccgatacgagtgcgtccattcctgttgccagctcctgcgccctccggactaacctcaaaaaccagaaaaactgcctgctcttctaaattgtgtgtcccaaaatatttcattaacaagtatcaagtgataatccatggaaaagtgatggaaagtcacaatacaagctggtttgtaaatatttgaatcacattatgggattgctagacagactttcagtcttgcttggcctgaagaagaaggaggttcatgttttgtgccttgggctagataatagtggcaaaacgacgatcattaacaaacttaaaccttcaaatgctcaatctcaaaatatccttccaacaataggattcagcatagagaaattcaaatcatccagtttgtcatttacagtgtttgacatgtcaggtcaaggaagatacagaaatctctgggaacactattataaagaaggccaagctattatttttgtcattgatagtagtgatagattaagaatggttgtggccaaagaagaactcgatactcttctgaatcatccagatattaaacaccgtcgaattccaatcttattctttgcaaataaaatggatcttagagatgcagtgacatctgtaaaagtgtctcagttgctgtgtttagagaacatcaaagataaaccctggcatatttgtgctagtgatgccataaaaggagaaggcttgcaagaaggtgtagactggcttcaagatcagatccagactgtgaagacatgaaaagataatagttggaaacctcagcaattttcaattcaaggaatctatctaagacaaatagaatacattttgtaaaagatgtttatgcatcaaaaaatataattttctgcttgc

SEQ ID NO: 407080 - DNA, 1589 bp, Homo sapiens
tcaatgtatagttcctcggcgcgcctctgaccttttcccggagctcttcaatcccagaagctatagcacaacggctgaatcgccaggacccccggggaggcgtggcttcaggaccggaagaagctcctgttgccaagggaacggtgcctgccaaggcgcctgctcagcgactgatgcacagactgctgcagaggctgccggttttcccaacttctagagacggctttgctcattaccaggcatccttcccatgtaggcatcgagaagaaggctgagggaccctcgcaccagatttccatcccggagaccgatacgagtgcgtccattcctgttgccagctcctgcgccctccggactaacctcaaaaaccagctggtttgtaaatatttgaatcacattatgggattgctagacagactttcagtcttgcttggcctgaagaagaaggaggttcatgttttgtgccttgggctagataatagtggcaaaacgacgatcattaacaaacttaaaccttcaaatgctcaatctcaaaatatccttccaacaataggattcagcatagagaaattcaaatcatccagtttgtcatttacagtgtttgacatgtcaggtcaaggaagatacagaaatctctgggaacactattataaagaaggccaagctattatttttgtcattgatagtagtgatagattaagaatggttgtggccaaagaagaactcgatactcttctgaatcatccagatattaaacaccgtcgaattccaatcttattctttgcaaataaaatggatcttagagatgcagtgacatctgtaaaagtgtctcagttgctgtgtttagagaacatcaaagataaaccctggcatatttgtgctagtgatgccataaaaggagaaggcttgcaagaaggtgtagactggcttcaagatcagatccagactgtgaagacatgaaaagataatagttggaaacctcagcaattttcaattcaaggaatctatctaagacaaatagaatacattttgtaaaagatgtttatgcatcaaaaaatataattttctgcttgcatttatggactctgacctttttaagaacataggacttcagctctggagctggaagtctgagatcagattaccagcatggttgggttctggtgagagccgtcttggttgcagactgccatcttcttgtatcctcacatggccaaaagaggacaagagaactctctggagtctgtttgataagagcatgaatcccattacatcttcacatggctcctcccaaagaccccacctcctaatatcatcacatgtcatcacatagggggttagaatttcaacatagaaattttgggagaacacaaacattcagtcagttgcaatacttaaggcaaattcatcttgcttataactctggtgcatgtgcattaaaatactattgcattgtaactgagtttgtacctattttctgctttctgattatttcctttgttcatgaaaataaatgactggtattacaaggtcacctaaataaataggtttgtgtacgtctgcgactagagagaaatactacagtgatt

SEQ ID NO: 407081 - DNA, 565 bp, Homo sapiens
tcacgacgctgcacttactactcatataaataaaaaatatgtcgtacatcagatccagactgtgaagacatgaaaagataatagttggaaacctcagcaattttcaattcaaggaatctatctaagacaaatagaatacattttgtaaaagatgtttatgcatcaaaaaatataattttctgcttgcatttatggactctgacctttttaagaacataggacttcaggtatgctaatttggccattaattatttaaaaactaaatattccctcaaaagggctccctagaattatcaacttcttagtgaaggtctacatttgattgtacgtagaatgtttaaaagtcagttataagccatctcatcccatcataatttatgatatgtttaatatattttattttttaattgtctttttaaaaaatttagtttatgactttgcagtatgaattgtgcttgtgaaaaagaactttaaatatttataagggaccatgggtaattaatatatattcaatttttactatgtgtcactgtcaataaaatgtaaaatataatgtgccaactag

SEQ ID NO: 407082 - DNA, 233 bp, Homo sapiens
acaacaccaaaaattctaatgatatatggacataggacataaggagataatacttaggttaggaaatgcccatggataataaacatggaaaaatttataagtaaagctttaatttttctttttctttacattacacagagaaggccaagctattatttttgtcattgatagtagtgatagattaagaatggttgtggccaaagaagaactcgatactcttctgaatcatccag

SEQ ID NO: 407083 - DNA, 744 bp, Homo sapiens
caaggcctatttgaatttttgttgttgttgtttaaatgaagaggaaacaatacttaacctgaaaattttacatgatacagttcaatttctgaaaatgctaagtgcatgactatattggaaagttgtttatactgataaaaattctgcttaccagactttccagtgccagagatgaacaacctgaatcgctgatcaatacgtagtttacattctgtattggcttctttccttcctctatgtgattcatttaagaaaaagtttattgtttacacaagctgtgtgtgtttggcctgagagatgctgtacgggattgaacacatagctcatccattgggtctcttgttgtcctcggcgggatctgatgtgtccttgttgaggctgctcattggtgtctcctgtcccactggctccagccttcctgacttactaaagaactcgccacagtttggaaatgtttgttttacatgtgacctgtgtaacatctctccagctggggagtttcagtacttgcctttaataatccatagataggcgcttgtaaagccagctacttgggagagtgaggaaggagaatcacttgaacctgggaggtggagcttgcggtgagctgagatcgtgccactgcattccagtctgggtgacagagagagactccgtttcaggaaaaaaaaaaaaatccacacataatgtttcttgctcactttcacaagaggtggctgggcgaggagctgtccccattcctcc

SEQ ID NO: 407084 - DNA, 468 bp, Homo sapiens
cgagccaggcggtctgccctgcagcagctgcacgggggcgggaaccggccctcagccccatccccggtggctgcagagggcccctggctagaggtctcgagctctggcagaggaggagccgggagggggcagggtctggcgggctctcaggccaggggcacccgcgatccagaggccgcccaggccatgctccaccacctgggcgcccagctacaggcgccgggcaactcccaagctggctggcgcgcccagcctcgcagaaccggggctagatgtcgccgtggctgcggccaagccaggcggtctgcccggcggcggctgcaccggggcaggaaccgaccctcagccccatccccgcggacggtccctggagcggccccgatctctcttcggagaagaggggcgggagtcacggccaggcgggaagggatgcgcgcctgagattccggaacgtcccgcgccagccca

SEQ ID NO: 407085 - DNA, 412 bp, Homo sapiens
cgaccttcccccacaaggtgagcacaggcgggagccgcagctcggcccccagagctcctgtgtcagtgtttcagtaactgtcggaaacgtgctagggcgtcataaggacaagtcgactgtaaataatgaaacccgagtatgttacggttccttttgttccaaatgttttttagcaagagagaaagtccatgagcgtgccccttccagaggcaggcctttctctatctggtgctgtgctctcactggttctcacctcccccagctgcttttgcccctggcctgtggcccacacagagaaggcccctttctttctagttctgcctatcctcagggcaggggacttctggacaagtcctgcaagccaggctgtgggcctagcagaggcagtgtggagtgggggtggccaggtcag

SEQ ID NO: 407086 - DNA, 199 bp, Homo sapiens
cctactgaagcctcggtttccttatccgaaacctggggtgtggtggggtcacctccattcatgcttgtgaaagtcctttgtaaatgaaatgtacaggacaagcttaaggggggcccaaggaggggaacgcatcttacaccttgcaaaggccaccaataccaagcccaagtgcccaggctttatttttcagatggggtga

SEQ ID NO: 407087 - DNA, 227 bp, Homo sapiens
tgtcatctcaactccttcccaggggctcaggctaacccgaatactgtgggcttcactgcgttttgtgccacctgggctgtactgtatttatggcccacgtgttcacattcatcaggcgtctctctcattacttggctgacctgcccaccagtcagtctcctgggcttgttggtgacgtattccggtggggcacagacactgtggcctgttccctctgtgatatgtta

SEQ ID NO: 407088 - DNA, 263 bp, Homo sapiens
ccaggtgtggtgatgcatgccggtagtgccagcctactcagaggctgaggcaggaggattgcttgagcccaggagttggaggctgcagtgagctatgatcgtgccactgcactccagcctgggcaacagagcaagaccctgttttaaaaaattaaacaaaaaaaacccctcagctcctcaagccacatttcaagtgctcaagaaccacaggtgctagaacctagagtactacacagtatggagtccttctagaagctcctcta

SEQ ID NO: 407089 - DNA, 176 bp, Homo sapiens
cagcagagtgaaaccctgtctgtctacatacacacacatgcacgcatgtacaattagccgggtgtggtgggggcatgcctgtagtcccagctacttgggaggctgaggcaggaggattgcttgcaactaagagttcgaggctacagtgagctataatcatgccactgcattccagc

SEQ ID NO: 407090 - DNA, 93 bp, Homo sapiens
ggggctgatgggacagcaggaggggcaggaaggaagggactcaaggtctaggcagagggggcagcctgcagagatgggaggtggcacccaaga

SEQ ID NO: 407091 - DNA, 216 bp, Homo sapiens
gggcggaggggggactgtgttgcttaagaaaaaaatctcagtatcagtagactagtgggacaaaagccaggctgccctgggttgaacagtgactggaaggtgaagaaatggaggcagtgactgcagactccctactcaagaaacctgggtaacaggggaagaagaaacatagtgtctaggtcagtaggggctctttgaactattgtgtgtggctgg

SEQ ID NO: 407092 - DNA, 269 bp, Homo sapiens
ggataaactcctgaacctaagttcctgtctgagtgtcttttctggggggacctgaactaagaagccattaaaggtaaagaaaacagcattccatgggaatcagcctggaaaagtgtacagagtggagtgatgggaaacgggctggtgtcaaggaaaccaactcaagtactttggcaaaagcccccccccagggtaagggtccgagggcctgaactgcagctgtgatgagagaatgcagaagggcagacgtgggacgtgagaaggccagc

SEQ ID NO: 407093 - DNA, 179 bp, Homo sapiens
ggttgcagtaagctgagatcgcaccactgcactccagcctgggcaacagagcaagagaccatctcaaaaaaataaaaacacgagtgaaatagatgagaaaacatccaggtatattccatgtgagagggtaagcattagatcatgaaactgattttggttgtatcttatgcatgcacatg

SEQ ID NO: 407094 - DNA, 262 bp, Homo sapiens
ggagcagcagggctggggccaagtccctgggtctagaaagccactatgaatgaacgctgcttgcacccattataggtctaagcaccaatccaggctcaaccgctcactccaggaggatgggaagcctttgttttggttcctgtgccaactctggcttctctggctgccccattcaatctgacagaacatgttgacggagataaggttattactggctcccgcaaggccctaccatgtgaggtggtttccagtggcctttccc

SEQ ID NO: 407095 - DNA, 298 bp, Homo sapiens
actagctgtgtgactctgggtgagtcactttaatccaccaagcttctgtgtcctgcgggttaatagtgtctgtggggggccagcctggcattggacaggcattcgagaagtgctaattattgtttttgaagcagctttattgacatagaagtcacatatcatacaattccccctttcaaaatgcacatttcaatggcttttaggatactcacagaggtgtgcaaccatcatcacggtcaattttagaacattttcatcactacaaagagaaactacaaacaagagctgggtgtagtgc

SEQ ID NO: 407096 - DNA, 276 bp, Homo sapiens
ggggccacagttcatggggcttttcttcccagaggaaaatcagggggagggtgagtgcccagctttgttctgctaaccagctgcagctttttcatctgtttctcctgggttttcaatgggtctctcctgttatttacatttcatttctcctgtccttagcaactagaagctgccctttcaagttttacttagaaaaaggcccttaattggttctgcaattggaagggcgatcctgaacaggagttattttgccttaagatagaaaataaggtcggg

SEQ ID NO: 407097 - DNA, 303 bp, Homo sapiens
ccgactggtctcgcactcctgagctcaagtgatccttctgccttggcctcccaaagtgctcggattataggagtgagtcactgcgcccagcccacaccacttcttaattcaagctacaggtccccctttgcctttggattacatctgctgtgtttcttgtcttatcaagcttaaccctcctgtccttgcttcttgaagtcatccccctattgccgggcagttggccattccccagtccaagcacagcacccccttgcaggccatccttagcctcccaagtacccgggattacaggtgcacacc

SEQ ID NO: 407098 - DNA, 282 bp, Homo sapiens
attgcagtcacctggaatcagaaggctcttgctataatattgcttaagagagataccaggtgttagtgttatcactcttgttaggaagacactattatccaaatggacagtcctagccatgttcctcctcaggtggagctaacgtgatgggctccttggcccttatgctcacctgtgcatgcccgggaaggatgggcatgaagagggatcctggctgtcctgaatcacaagtgttttaacctgccccaatctggacaggctgccctcccgtcctgggataca

SEQ ID NO: 407099 - DNA, 295 bp, Homo sapiens
ttaactgatgtggtggagggtgcctgtaatcccagctactcaggaggctgaggcaggagaattgcttgaacccaggaggtggaagttgcagtgagcttagattgcgccactgcactccagcctggaccgcagaacaagactctgtctcaaaaacaaaacaaaacaaatgcaaagggccttctggtcaacccacagtgggatggggaggaggaggagacacggggagggagaaggtggaaggtgccctggtgggccttggcccagcctcttcacagactgaaagagtcagccctgc

SEQ ID NO: 407100 - DNA, 230 bp, Homo sapiens
gatctcctgacctcatgatccacccgcctcagcctcccaaagtgctgggattacagttgcgagccaccgcgcccgacctatttattcttattaagcggttaataccacttttggaaatgtatcgcagagaagtaacccaaaagaagatagtccttacaaaattatttatagctgcagtgcacaacagtgaaaagaggggaagcaacccaaatgcacagtggtagagagtc

SEQ ID NO: 407101 - DNA, 198 bp, Homo sapiens
ctccagcaggaaggcaggtggcaaaagtgctaagtaaatagcatagaaggtaggttagaaggtgacaggtcctgttggaaaaagaaaaggctggctggctgcagtggcccatgcctgcattctcagcactttgggaggccgaggcgagcggatcaggaggtcaggagatcaagacaatcctggctaacacggtgaaac

SEQ ID NO: 407102 - DNA, 287 bp, Homo sapiens
ctctgcttcatcctggtgcaatgcccatttcccaatactggattcataaatgtctctcaccctttgtgctcactctcctgggcttcctttggatctggcaagtgagtgccgtaattctctggtggcttctgaaccatagagttacctggcgacagatgggctattcagttttctcagcttttcttcttcattcttgccagttactcaactcccataaaacatttcagcctgcagaccctgccaatttttacatccccctctgctctccaacttagttaaggcacttc

SEQ ID NO: 407103 - DNA, 260 bp, Homo sapiens
ccagacgtgagccaccgtgcccggccagcagagtcgtttattgccattgtcatgtattatgtactaatcgtatgtgctagacttccatgggactggcagtgcagtgggtttgtttacaccagcatcaccacactcacgaggcacgcgttgcccttggactgttacagtgacgggagttttcagctatgttgtgatcttatggaccgccatcatatgtggtctgttgttgaccgtatgtatgaggtacatgactgtacttt

SEQ ID NO: 407104 - DNA, 294 bp, Homo sapiens
ggaccattcgcatccatttgcagagctggtaaaagtgctaactatagccaatgccgattgaggcttcgttccaggcaacaaacacctcagcaggttcacctggtgattaaacccacctatgctgggggcaagaacctgatgccctacttacactggggacaggtgattgcttgaattgaggaagagaatagtcaagattcacctcaaagtcgatggcatttgccagggttctgagtttcagcaacaaacagcactcatgtttgtcagaatgagcctctgagccacctccccatg

SEQ ID NO: 407105 - DNA, 206 bp, Homo sapiens
cagggtctcccttcaaaaatgaaagattacaaaaaaagatcatcatgtgtttatttcttttgttgtgagacagaagtttcactattgttgtccaggctggagtcaatggcgtgatctcggctcactgcaacctccgcctcccaggctcaagagattctcctgcctcagcctcccaagcagctgggactacagacgcatgccacttt

SEQ ID NO: 407106 - DNA, 292 bp, Homo sapiens
ggcaccagcagattcagtgtctggtgtgggcccttttcagggttcatagagggtgccttcttgccatgtatgctcatggcagaagaggtaagggatctctctggggtcccttttataaaggcactaatctcatttatagacactccaccctcgcgacctaatcatctccccaaaggcctccatttccagctaccatcaccttgggggtcaggtttcaacacaggaatctgggggagacacaaacatcaagaccatagcaagggggactagaaaggcttcaggagacaaaaag

SEQ ID NO: 407107 - DNA, 275 bp, Homo sapiens
aatttttagctgataatttatcgtatatgatttgtctcacatagagatatatttatagcacatttggtaaataaatatcttttctattaaaaaggccaaagcacatccagtgataacttcttaacttaagcacatccagtgatacttcttaactaaaggttgcctgtggaaaatattggttcttctggggactaaaaagggaagtagatagaaattctgatatcttaggtcattggaaatagggaagtgggagtgagtaaatgtagggatttcag

SEQ ID NO: 407108 - DNA, 301 bp, Homo sapiens
ggaactctccaaagtctcagaaaaagtctttgatttataaagtacatttaaattcacttccattgaaacgtacacacacccagggtctgccagagaggacaagggaggacactgacatttccaaatcaacctgacaccaccaggatataggagacccccaaggacctccacgggacctggggatttggggcgtgggtgagaagtgggcattaggaaggattcaactctttgcacttcttctgacagcaaggagggaggtgcagggaatgtttctatctcctgcttgcatccttaggaatgg

SEQ ID NO: 407109 - DNA, 313 bp, Homo sapiens
attagcttgtccaactgcctagctaagtccatcaatttcctgagctcagggagtacaactacttctactgtcaattcctcatcaattcctcatctgcttttggccccacacattttttagaccaaagctccggctgctggagcattatcttgaagtgactgtagacccaataccaggattctgccctgtctgtgtactgccagatccaacccatgtgtcttggggtggctaaatctgacaaaggccctgagtgtctggggacacctgtgatctcctgcaaggctgaggctaatgccacgcttttgcagctctt

SEQ ID NO: 407110 - DNA, 330 bp, Homo sapiens
gggaattagacagcagaaagaagaaaagggagctcagggcaggagggataggctgagcaaaagcacggaggtgtgagcaaggctgggaggtgtaggcagggacagggtgagagctaaggcacttggatggtatcttgcaggagatggggagctagtgcatgtatttagatggggagtggagctgtcaggtttatattttagagcactggcctgagcagcagtgcgcatggattagaggggaccagacctttgtaagaagagcagtcaagatgtgtatcagttagaaagccttagactgtaagtagcagcaaatccaacccaaaaaggctt

SEQ ID NO: 407111 - DNA, 1079 bp, Homo sapiens
atattagggaggaagcctgaagtagggagatgtaaggagccatcaaaggcagaatgaaacttaggcagatttcaagtgattttcattaggagcttatttctcacactgaccaaagcttttgaagtaagtactctttacaccactatataaataaaccttacaaaggattctgctttgaggcatgagagagttaagtcatttgcccaaagtcacagagttagaaagtaatagagctaagatttgaacctaggcagtttggctccagagtctgtgctcttacgctatattaccaccaagaggtcaaataaataccaaagaatgtattttcgaatttaacaatgaggaacttaatcatacaggcagaagtaattccagagcactggagacagaagccagattgccatatgggttaaagagtgtgtaaaccactaggaagtaaagacatagaactactctcacaagtgcttttctggttattgtgacgctgaacttcatggcttgttttaattaagacatcttacaagtgtcaaaatttggaaatatttggacactgtacactctggttatttaaatatctaacaatggttcttgagcattttgagaaacctttgaaaatctgatgaaaggtatgtgccattactctagaaaaatgttcctgtgtacatgcacatcaagtatcacatactgtttcaggctgttcaaagactacaaagtctgttcatgacctaatggtccatgttccctcagttaagagctccagagataaaggatgtggaactcaaaggtaagtacccagagccttgaaaactccatttgtgacttggaagaattctacaatttgaattaactttgtggagagagatatatttttgaaaaattgtgtgtaccaaaaaaatttcatatcaaataatattttcctgtagtgcattcaaggatctggttccacagcaaaaaattgttttggtctcagttcctcaaaatcacatttaaggagcttgagatttatattttctacttaataagtcttacaaaagcaagttaagaaggaaaatggacaatcatttctgcacatgtagggt

SEQ ID NO: 407112 - DNA, 3226 bp, Homo sapiens
cgcgcatgcgcctctgtgcgtttgtcccatgctggttccgtgagtctggccttaggtgtctcgtgtctggggttgatccgagctgtcgccgccgccgccgcaatgggcaaaacggccaactctccgggttcgggagcccgacccgacccggtgcggagcttcaatcgctggaagaaaaaacacagccataggcagaacaaaaagaagcagttgaggaagcaactgaagaaacccgaatggcaggtcgagcgcgagagtatcagccgcctcatgcagaactatgaaaagataaatgtaaatgaaatcacaagattttcagattttcccttgtccaaaaaaacattgaaaggtttgcaagaagctcagtaccgtttggtgactgagatacagaagcagaccattggattggctttgcaaggtaaagatgtacttggagcggccaaaactggatctggcaagactctggcttttcttgttccagtgctggaagccttatatcgtctgcaatggacttcaacagatgggctgggggttctcataatatcacctacgagagaactggcctatcagacctttgaggttctccgaaaagtaggaaagaatcatgacttctcagctggtctcatcattggtggaaaggatctaaaacacgaagctgagaggatcaacaacataaatatactcgtgtgcacaccaggtcggcttcttcaacacatggatgaaacagtatcttttcatgctaccgacctccaaatgttagttcttgatgaagcagatagaatcttggatatgggctttgctgataccatgaatgctgttattgaaaatctccccaagaaacgtcagactttacttttctcagcaacacaaactaaatctgtaaaggaccttgcacgcttgagtttgaaaaaccctgagtatgtctgggttcatgaaaaagcaaaatatagcacccctgccactttggaacagaactacatagtctgtgagctgcagcaaaaaataagtgtgctgtattcctttttgagaagccatctgaagaagaagagcattgtatttttttccagttgcaaagaggtccagtatctgtaccgagtgttttgccggctacgtcctggtgtttctatccttgcactccatggtcgacagcagcaaatgagaagaatggaagtctataatgagtttgtccgtaagagagctgcagtactctttgctactgatattgcagccaggggtctggatttcccggccgtgaattgggttcttcagtttgattgtcctgaggatgccaacacatatattcacagagcaggtagaactgccaggtacaaagaggatggtgaagctttgctaattttgctaccctcagaaaaagctatggtgcagcagcttcttcagaagaaagtacctgtgaaggaaatcaaaatcaatccagaaaaacttatagatgtccagaaaaaattggaatctattttagctcaagatcaagatttaaaagaaagagctcaaaggtgtttcgtctcctatgtacgatctgtatatctgatgaaggataaagaagtatttgatgtgagcaagttacctatacctgaatatgccctgtctcttggtcttgctgtggcaccacgcgtaagatttcttcagaaaatgcagaaacaacccaccaaagaattggtaaggagccaagccgataaagtaattgagccaagggctccctccctcaccaatgacgaagtggaagaatttagagcctacttcaatgagaaaatgtccatccttcaaaaaggtggaaaaagactcgaagggacagagcacagacaggataatgatactggtaatgaagaacaggaagaagaagaagacgatgaagaagaaatggaagagaaactggcaaaagcaaaaggatctcaagccccatctcttcctaacaccagtgaggcacagaagatcaaggaagttcctacacagttcttggacagagatgaggaggaagaagatgctgatttcttgaaggtgaagcggcataatgtgtttggattggaccttaaagacgagaaaacattacagaagaaagaaccttctaaatccagcatcaagaaaaaaatgaccaaagttgcagaagcaaaaaaagtaatgaagagaaattttaaagtgaataagaagataacatttactgatgaaggggagttggttcagcagtggccacaaatgcagaaatctgccatcaaggatgctgaggaagatgatgacacaggtggtatcaacttacataaagcaaaggaaagacttcaggaagaggacaaatttgacaaagaagaatataggaaaaaaattaaggcaaagcatcgggagaaaagactgaaagaaagggaagccagaagagaagccaacaagagacaagcaaaggccaaagatgaagaggaagcctttctggattggagtgatgatgatgatgatgatgatgatggatttgatccaagcacactcccagatccagataaatacagaagctctgaagattcagatagtgaagatatggaaaataaaataagtgataccaagaagaagcaggggatgaagaagaggagcaacagtgaagtggaagacgtgggaccaacaagtcataacagaaagaaggccaggtgggacactttagagcctttggataccggcctgtctttagcagaggatgaagagctggtgttacatctgctaagaagtcaaagctaaatacttcctgcgcctgccttctccttgaaaccttggttatgactgcgtaggcaagaagttgaaaaacagttgatttgggggcacttaggtaccatatgccccattcccaaagggcacatttctggatagaagcgatcgtatctccaagtccctctcacaggacatgctttgtgccatcactgagcatactcagatcgagggtggatgataccatttcctgaccccgttttccagcatgtgttctgttagatttttatccatgggttcctacgccttgtcattggaaacactgcctttgtcttactggcaagttctggagctcttgtgtcattgttagaaatccctgtcttgcttactgtacagaagtttctgttgctgttaaaattgctcatgatttcgacgtatttaatattttcaaagagactatgatggaccagccctgagaaagaatgagtatttttgaattgagatgatcaataataaacatatttcctat

SEQ ID NO: 407113 - DNA, 3267 bp, Homo sapiens
cgcgcatgcgcctctgtgcgtttgtcccatgctggttccgtgagtctggccttaggtgtctcgtgtctggggttgatccgagctgtcgccgccgccgccgcaatgggcaaaacggccaactctccgggttcgggagcccgacccgacccggtgcggagcttcaatcgctggaagaaaaaacacagccataggcagaacaaaaagaagcagttgaggaagcaactgaagaaacccgaatggcaggtcgagcgcgagagtatcagccgcctcatgcagaactatgaaaagataaatgtaaatgaaatcacaagattttcagattttcccttgtccaaaaaaacattgaaaggtttgcaagaagctcagtaccgtttggtgactgagatacagaagcagaccattggattggctttgcaaggtaaagatgtacttggagcggccaaaactggatctggcaagactctggcttttcttgttccagtgctggaagccttatatcgtctgcaatggacttcaacagatgggctgggggttctcataatatcacctacgagagaactggcctatcagacctttgaggttctccgaaaagtaggaaagaatcatgacttctcagctggtctcatcattggtggaaaggatctaaaacacgaagctgagaggatcaacaacataaatatactcgtgtgcacaccaggtcggcttcttcaacacatggatgaaacagtatcttttcatgctaccgacctccaaatgttagttcttgatgaagcagatagaatcttggatatgggctttgctgataccatgaatgctgttattgaaaatctccccaagaaacgtcagactttacttttctcagcaacacaaactaaatctgtaaaggaccttgcacgcttgagtttgaaaaaccctgagtatgtctgggttcatgaaaaagcaaaatatagcacccctgccactttggaacagaactacatagtctgtgagctgcagcaaaaaataagtgtgctgtattcctttttgagaagccatctgaagaagaagagcattgtatttttttccagttgcaaagaggtccagtatctgtaccgagtgttttgccggctacgtcctggtgtttctatccttgcactccatggtcgacagcagcaaatgagaagaatggaagtctataatgagtttgtccgtaagagagctgcagtactctttgctactgatattgcagccaggggtctggatttcccggccgtgaattgggttcttcagtttgattgtcctgaggatgccaacacatatattcacagagcaggtagaactgccaggtacaaagaggatggtgaagctttgctaattttgctaccctcagaaaaagctatggtgcagcagcttcttcagaagaaagtacctgtgaaggaaatcaaaatcaatccagaaaaacttatagatgtccagaaaaaattggaatctattttagctcaagatcaagatttaaaagaaagagctcaaaggtgtttcgtctcctatgtacgatctgtatatctgatgaaggataaagaagtatttgatgtgagcaagttacctatacctgaatatgccctgtctcttggtcttgctgtggcaccacgcgtaagatttcttcagaaaatgcagaaacaacccaccaaagaattggtaaggagccaagccgataaagtaattgagccaagggctccctccctcaccaatgacgaagtggaagaatttagagcctacttcaatgagaaaatgtccatccttcaaaaaggtggaaaaagactcgaagggacagagcacagacaggataatgatactggtaatgaagaacaggaagaagaagaagacgatgaagaagaaatggaagagaaactggcaaaagcaaaaggatctcaagccccatctcttcctaacaccagtgaggcacagaagatcaaggaagttcctacacagttcttggacagagatgaggaggaagaagatgctgatttcttgaaggtgaagcggcataatgtgtttggattggaccttaaagacgagaaaacattacagaagaaagaaccttctaaatccagcatcaagaaaaaaatgaccaaagttgcagaagcaaaaaaagtaatgaagagaaattttaaagtgaataagaagataacatttactgatgaaggggagttggttcagcagtggccacaaatgcagaaatctgccatcaaggatgctgaggaagatgatgacacaggtggtatcaacttacataaagcaaaggaaagacttcaggaagaggacaaatttgacaaagaagaatataggaaaaaaattaaggcaaagcatcgggagaaaagactgaaagaaagggaagccagaagagaagccaacaagagacaagcaaaggccaaagatgaagaggaagcctttctggattggagtgatgatgatgatgatgatgatgatggatttgatccaagcacactcccagatccagataaatacagaagctctgaagattcagatagtgaagatatggaaaataaaataagtgataccaagaagaagcaggggatgaagaagaggagcaacagtgaagtggaagacgtgggaccaacaagtcataacagaaagaaggccaggtgggacactttagagcctttggataccggcctgtctttagcagaggatgaagagctggtgttacatctgctaagaagtcaaagctaaatacttcctgcgcctgccttctccttgaaaccttggttatgactgcgtaggcaagaagttgaaaaacagttgatttgggggcacttaggtaccatatgccccattcccaaagggcacatttctggatagaagcgatcgtatctccaagtccctctcacaggacatgctttgtgccatcactgagcatactcagatcgagggtggatgataccatttcctgaccccgttttccagcatgtgttctgttagatttttatccatgggttcctacgccttgtcattggaaacactgcctttgtcttactggcaagttctggagctcttgtgtcattgttagaaatccctgtcttgcttactgtacagaagtttctgttgctgttaaaattgctcatgatttcgacgtatttaatattttcaaagagactatgatggaccagccctgagaaagaatgagtatttttgaattgagatgatcaataataaacatatttcctataaaagaaagtaaaaaaaaaaatcggcctccttgggctcagg

SEQ ID NO: 407114 - DNA, 1723 bp, Homo sapiens
ctcaacgctttatattcctgttcttcattacaagttacctatacctgaatatgccctgtctcttggtcttgctgtggcaccacgcgtaagatttcttcagaaaatgcagaaacaacccaccaaagaattggtaaggagccaagccgataaagtaattgagccaagggctccctccctcaccaatgacgaagtggaagaatttagagcctacttcaatgagaaaatgtccatccttcaaaaaggtggaaaaagactcgaagggacagagcacagacaggataatgatactggtaatgaagaacaggaagaagaagaagacgatgaagaagaaatggaagagaaactggcaaaagcaaaaggatctcaagccccatctcttcctaacaccagtgaggcacagaagatcaaggaagttcctacacagttcttggacagagatgaggaggaagaagatgctgatttcttgaaggtgaagcggcataatgtgtttggattggaccttaaagacgagaaaacattacagaagaaagaaccttctaaatccagcatcaagaaaaaaatgaccaaagttgcagaagcaaaaaaagtaatgaagagaaattttaaagtgaataagaagataacatttactgatgaaggggagttggttcagcagtggccacaaatgcagaaatctgccatcaaggatgctgaggaagatgatgacacaggtggtatcaacttacataaagcaaaggaaagacttcaggaagaggacaaatttgacaaagaagaatataggaaaaaaattaaggcaaagcatcgggagaaaagactgaaagaaagggaagccagaagagaagccaacaagagacaagcaaaggccaaagatgaagaggaagcctttctggattggagtgatgatgatgatgatgatgatgatggatttgatccaagcacactcccagatccagataaatacagaagctctgaagattcagatagtgaagatatggaaaataaaataagtgataccaagaagaagcaggggatgaagaagaggagcaacagtgaagtggaagacgtgggaccaacaagtcataacagaaagaaggccaggtgggacactttagagcctttggataccggcctgtctttagcagaggatgaagagctggtgttacatctgctaagaagtcaaagctaaatacttcctgcgcctgccttctccttgaaaccttggttatgactgcgtaggcaagaagttgaaaaacagttgatttgggggcacttaggtaccatatgccccattcccaaagggcacatttctggatagaagcgatcgtatctccaagtccctctcacaggacatgctttgtgccatcactgagcatactcagatcgagggtggatgataccatttcctgaccccgttttccagcatgtgttctgttagatttttatccatgggttcctacgccttgtcattggaaacactgcctttgtcttactggcaagttctggagctcttgtgtcattgttagaaatccctgtcttgcttactgtacagaagtttctgttgctgttaaaattgctcatgatttcgacgtatttaatattttcaaagagactatgatggaccagccctgagaaagaatgagtatttttgaattgagatgatcaataataaacatatttcctataaaagaaagtaaaaaaaaaaatcggcctccttgggctcagg

SEQ ID NO: 407115 - DNA, 1291 bp, Homo sapiens
cagttttgagaagtatattgccagagttggattgttaatataaagcaaccattttcctaatcatctgtgttttttgtatgttctcacacagaagaaagaaccttctaaatccagcatcaagaaaaaaatgaccaaagttgcagaagcaaaaaaagtaatgaagagaaattttaaagtgaataagaagataacatttactgatgaaggggagttggttcagcagtggccacaaatgcagaaatctgccatcaaggatgctgaggaagatgatgacacaggtggtatcaacttacataaagcaaaggaaagacttcaggaagaggacaaatttgacaaagaagaatataggaaaaaaattaaggcaaagcatcgggagaaaagactgaaagaaagggaagccagaagagaagccaacaagagacaagcaaaggccaaagatgaagaggaagcctttctggattggagtgatgatgatgatgatgatgatgatggatttgatccaagcacactcccagatccagataaatacagaagctctgaagattcagatagtgaagatatggaaaataaaataagtgataccaagaagaagcaggggatgaagaagaggagcaacagtgaagtggaagacgtgggaccaacaagtcataacagaaagaaggccaggtgggacactttagagcctttggataccggcctgtctttagcagaggatgaagagctggtgttacatctgctaagaagtcaaagctaaatacttcctgcgcctgccttctccttgaaaccttggttatgactgcgtaggcaagaagttgaaaaacagttgatttgggggcacttaggtaccatatgccccattcccaaagggcacatttctggatagaagcgatcgtatctccaagtccctctcacaggacatgctttgtgccatcactgagcatactcagatcgagggtggatgataccatttcctgaccccgttttccagcatgtgttctgttagatttttatccatgggttcctacgccttgtcattggaaacactgcctttgtcttactggcaagttctggagctcttgtgtcattgttagaaatccctgtcttgcttactgtacagaagtttctgttgctgttaaaattgctcatgatttcgacgtatttaatattttcaaagagactatgatggaccagccctgagaaagaatgagtatttttgaattgagatgatcaataataaacatatttcctataaaagaaagtaaaaaaaaaaatcggcctccttgggctcagg

SEQ ID NO: 407116 - DNA, 1007 bp, Homo sapiens
cgcgcatgcgcctctgtgcgtttgtcccatgctggttccgtgagtctggccttaggtgtctcgtgtctggggttgatccgagctgtcgccgccgccgccgcaatgggcaaaacggccaactctccgggttcgggagcccgacccgacccggtgcggagcttcaatcgctggaagaaaaaacacagccataggcagaacaaaaagaagcagttgaggaagcaactgaagaaacccgaatggcaggtcgagcgcgagagtatcagccgcctcatgcagaactatgaaaagataaatgtaaatgaaatcacaagattttcagattttcccttgtccaaaaaaacattgaaaggtttgcaagaagctcagtaccgtttggtgactgagatacagaagcagaccattggattggctttgcaaggtaaagatgtacttggagcggccaaaactggatctggcaagactctggcttttcttgttccagtgctggaagccttatatcgtctgcaatggacttcaacagatgggctgggggttctcataatatcacctacgagagaactggcctatcagacctttgaggttctccgaaaagtaggaaagaatcatgacttctcagctggtctcatcattggtggaaaggatctaaaacacgaagctgagaggatcaacaacataaatatactcgtgtgcacaccaggtcggcttcttcaacacatggatgaaacagtatcttttcatgctaccgacctccaaatgttagttcttgatgaagcagatagaatcttggatatgggctttgctgataccatgaatgctgttattgaaaatctccccaagaaacgtcagactttacttttctcagcaacacaaactaaatctgtaaaggaccttgcacgcttgagtttgaaaaaccctgagtatgtctgggttcatgaaaaagcaaaatataggaagagcattaagaagttggttttgaagaaccttaataatagcaatctcttttctcc

SEQ ID NO: 407117 - DNA, 313 bp, Homo sapiens
acatattaaatggagaaatccagaaataaacggtttataagttttaaattgcatgctgttctgtgtattgtgataaagtcttgccctatcccacctcaccctgcccagggtgtgaatcagccctttgcctagtgtgtccatgctgcacagttacgtatgtataggaaaaaatgtatactaggattcagtactgtctgtggtttcaggcatccactgggggccttgaaatgcatctccctcaggtaaggagggaagtactgtaatatgttgtgctgatcaaaagttgaaaactcaaccagtatggtgacagccc

SEQ ID NO: 407118 - DNA, 366 bp, Homo sapiens
agaaacaaaaagcaaaccccaaacctgatgtccttctttagcccactgtgatagtatcaccaccacaaaattgccactgcttattggcacaacaaataatggctagtattaatccattcatacacagagctggatatagataaagtataaataagaaaaaatgtgacaactatgtgtcagctagacattttctttaattaccatccatttcatttcacaaccctagatgtatacaagaagatcaatagcttcaaaagaaaaagcattttggaaggggattattttggttattcctgtgccccaaagggtggtctgttaaacatttatattttgtgaaataaatctcttatgaaaccccattagata

SEQ ID NO: 407119 - DNA, 433 bp, Homo sapiens
attcacttttttcgaaggagacagttggcatgttaaaaggtgtctacttagaaaacccagggtttaacttgtttagtacaaaagtgtttgtatgtgtattttttatttcccatgaaggagggaaggaagtaaatctaaccttgttcctctcagagaagaacactgaaactatattaacatgaagtagaaacatgataattgatatgttatatttttcagccactttcttttaaaaagacagaacaagtatttgttttccgagttaacagatcagaataggcagtttgtctttttatgaacaggaaaaacgaggcttgtctaccgctaggcagaaaacagaaaagaaggagtagtccttgctgtcttggttcctatcaggcaagtagaccaggttgcttttcaccctcgagtaaatagaatcacgtatctgtgg

SEQ ID NO: 407120 - DNA, 441 bp, Homo sapiens
tcattgggttgagtcagaacttctagattatcatgctccagagtcaaagctgcatagaaggggcatccaagaggcagaagtgaaggggttccttttgagctctgccatttccacatggaatttcttttcatttttccgagtacttgctgcttcccaaatctgggaaggatgtatccttctgtggccctgctttgcatcgtttcccacttcttcgtggtggattttggccctgggattggcccatcccttccttaccatctctttctcttaaagaactatgcaagagtttcctgttctgggtgagggttggaaaggagccctctttccctgccagctcagagaccctgtgagaggctgcaggagaaggattcctgtgtggtctcttctgtgtattcatctaaacagatttgcctttcccaccccatcacctcttgctcttct

SEQ ID NO: 407121 - DNA, 239 bp, Homo sapiens
aagatttttcaccatgacttacttgtggaaatcataaaggatgctgtttgttaccttttataatatattttctgtggacctcagctggtctgtttggaaaagaatttatacacatgcatatacatatatgacatatatgttctatacatgtatatatataagaggaaatagttatggctagtcttgaggttttggagaatgagttcatatttctatttgttgaaaacatattcaaggac

SEQ ID NO: 407122 - DNA, 399 bp, Homo sapiens
ttatattaactattgacagtttatacccttttggtaaagatcagatgtgagaataatctgccttggcaggttaaaacaaaacacttttattttgacacttaactttccagtttatttttatgggtagttctggggtggaaaataatatttacaaaataataaaagccatgatttggagacctgacccaagaagcttcaacatccttaggttgcttgcctgtgccactgtgccgtgacacattccctactgaacataggctagtgtgggattgctccacccagaggcccttccccagagcagggaggacatggagtgtttgtgaaggtttttctctccttaacaagtaggttagttttcaacagtttaagtactggagtaggtgctgactgttaatatac

SEQ ID NO: 407123 - DNA, 426 bp, Homo sapiens
aaaaaagtgtaaaatatatttgccaaattgtaagaataattttaatgcaaacacttgtgtggctgccacctattcaagaaacagaatcatgccaatctacatgtgcctcctctgtccagtttaggtcccaacggagtctaaactagaaatattttctagaagctcaagtggaatattgactttctctgctctttcaaatcatactcccactaaaagtttttactgagctagagatcttgtataaaagggtcatcattgactaaaaataacaacaatgtattcttccctgaatggcaagagttcaaagacttattgaaaattaatccctttagaagtagtctttggggagcaaatcattgagagaccatgggaaaaatctgggtaaagtacatgtatagaagtattttaaaggaattcatacagcca

SEQ ID NO: 407124 - DNA, 787 bp, Homo sapiens
gagggctattgctttatttctgaggtggctcacgtttggatagaagtagcaactctccgcttacacctgcacgtttaaaacgcatatcagattgtgttatttctgtcctcagaatcttcctggccttcccgttgctttcaggataatacacatttcttagcctaacttcaagggcctacagggtcttgattctgctgagtttttcagtctttgctactttcatggaaaacacacctgcaggtacactcatattatgctcccaccatgccagtctacggtaatttaataactttagatatggcaaagttttatatggtttactcaagttttaatttttgttctagcatttagccaaaatcgattgaattcataatattgctaggcactgttttaaaaacgggataaaatgaaaacaaaacaaaacacaaaacaaaagtcttcagtcctttaaaaaaataaaacagcttcctgacacatagttcacctaccgtagagttcaccatttaaaacgtagcggtgcctcacgcctgtaatcccagcactttgggaggccgaggcgggtggatcacgaggtcaggagatcaagaccgtcctggctaacacggtgaaaccccgtctccactaaaaatacaaaaaattagccgggcgtggtggcgggagcctgtagtcccagctacttgggaggctgaggcaggaggatggtgtgaacccgggaggtggagcttgcagtgagccgagattgcgccactgcactccagcctgggcgagagagctagactccatctca

SEQ ID NO: 407125 - DNA, 376 bp, Homo sapiens
tttggaaagatctggattgaacaaggcctcatcgatagtaagggccaagatttggtccccaaggaattaattatgcaagtattagaaaatcttcagctgccggaagagattgcggttgtccatgtcccacaacaccaacaccaaaagaactcatcttttgaaagctggggaaataacctcgcagatcaagtagctaagcaagctgcctcttcccaagtgtcacccattttccatctaacttcttctcttccccctccagctgcaatccccatcttctcccacgcagaccaagagaaactaaagaaaacaggagctaaggagagcccaaagggcaagtgggtactaacagatggaagggaaatgctgtctaaacccc

SEQ ID NO: 407126 - DNA, 408 bp, Homo sapiens
aaggctaactgaaaccattatttgagatccactgggaggcttaagagagttttgaagatagagtgagttaacagaacaaataatgtgtctgtcaagccaaggagcacaggcggctggccacctcccaggactgggggaagcctagctctagacactcctccctgccactgtccccatccattgaaccaggctcttgatgcaacaagggtcacaaatgaggctaaatcagagaactagagatggtatgactggccagctgaaaagcccatcaaaaatagctactgaagccgggtgcggtggctcatgcctgtaatcccaacactttgagaggcagaggtgggcggatcacttgaggtcaggagtttgaaaccagcctggccaacatggtgaaacctcatctctaataaa

SEQ ID NO: 407127 - DNA, 614 bp, Homo sapiens
tttgtttgtttgcttgcttatttatttctcatgctcctagaacataagctctatgaaagtagagactttgtttggctttttcagtgctgtgatttgaacctaaaaatgtgctgtgtcctgcacatagtattaataaatgagttaaatgagtgaaagaaataaatgtcaggctggtagtggtagctcgtgcctgtagtcccagcactttgggtggccaaggcaggcagattgcttaagggcaggagtttgagactagcctgagcaaaatggtgaaacactgcctctacaaaaaatacaaaaattagccggccatggtggtgtgcatctgtagtcccagctacttgggaggctgaggtgggaggatcacatgagcttgggaggtcgaagctgcagtgagctgagattgtaccactgcactccaccctgggtgacacagtgagaccctgtctcagaaaaaaacaaaaagtaaaaaaaaaaaaaaaaaaaagtctacaatttctactttaaaaatacctgaagccagtgttcatgttggagctcattgattcctcatgaattgtatcattgttcagtgtttagaacagtgcctggcacatgctaagtagcatgtagat

SEQ ID NO: 407128 - DNA, 190 bp, Homo sapiens
tttttattgtatgtactttctaaagtaaactatatagctcctgtaattaaaaaaaaaagttaaataaaattagtggggcacagtggcacacatctgtagtcccagttacttgggaggctgaagtgggaggattacttgaattcaggagtttgaggccagcctagacaacatagcaagaccctgtctccaa

SEQ ID NO: 407129 - DNA, 727 bp, Homo sapiens
gcaaatattccaaaatccaaaaaaattcaaaatccgagatatttctggtcccaaacattttggataagagatactcaatctataccatttttccttaaaggaaaccagagctctttggagaagtggttaattctaaggctggggcagggaaaatacaggctgagcctggaggatgttgtggtcagcctgaaagagctcccagtggccaaagctggaacaatttcatcaataaaataactacgtataatattgaattataatctgatttataaataaaatgtatacacatgagtccaaattgatatacataaatgactgaataagtaaataaatggggggagaagaactctttcttgtagaagactttaataaatgtaaaaggaatgagggaaatagaaaattgttgtcacaaagccacagcagtaattgctgcatgcaacttccactaatactaaaattagtgaggtgggccaggcatggtggctcacgcctgtaatcccagaactttgggatgctgaggtgggcggatcatttgaggtcaggagttcgagaccagactggccaacatggtgaaaccccatctctactaaaaatataaaaattagctgggtgtgatggcggatgcccataatcccagctacttgggaggctgaggcatgagaatcagttgaacccaagaggtggaggttgcagtgagctgagatcgcaccactgtactacagcctga

SEQ ID NO: 407130 - DNA, 1010 bp, Homo sapiens
ggtttgttcctaaatctaatcgagctcccaaggaactagtatcttatagaacacacatagaaaatagtgctctacagtagtcactttcacatttttttcttggatccaacttcatgataagaaatacattttaactcataatctattcacatgtatatgaataactgaaacagaagtttcacaaaattatgattatgtttgccacaaatggtgtgctctaatattttccttctgtttcatcagaagaaaaatactggttactatccagctaagctgattttgtgacccattaatgagtttcagttctcactttgaaaacactgttctagaattacagaaaggtctagggatgagaactaacaccactgtgcatcacagtgtgtcagtctgtgccaggcagcttataaatattttttgcctctaatttttatacatttatgaggtaagtatcattttctaggtaaggatgctaatctgtctccaagccaaataacacacagtaaatcatggcaccaggatttgaatctgggtctttatacatcatagcccatgctgttctcactgtattttgctttttccaagtataaccccgttttcacacgaatggccccttcacatatttgaagactaccgtcgtgtccgtgctgaccctttctccctgccacacatggctggagtgcaatggcgcgatctcggctcactgcaacctctgtctcccaggttcaggaaaatggctttgtaaagaagcttgagcctaaatctggctggatgacttttctagaagttacaggaaagatctgtgaaatgctcttctgtcctgaagcaatactgttgaccagaaaggacactccatattgtgaaaccggcctaatttttctgactcttacgaaaacgattgccaacacatacttctacttttaaataaacaactttgatgatgtaacttgaccttccagagttacagaaattttgtccctatttaatgaataaattgtatgtatttttctcta

SEQ ID NO: 407131 - DNA, 631 bp, Homo sapiens
  misc_feature (3)..(4): n is a, c, g, or t
  misc_feature (8)..(9): n is a, c, g, or t
  misc_feature (11)..(12): n is a, c, g, or t
  misc_feature (16)..(18): n is a, c, g, or t
ggnnattnncnntgcnnncccgaatcccggacctgcgctgaggaggcggttcatctgtggccagcggtgcttcgggacccgcgctgggggaaccctggcgacggggcctggccctgctatatgcgggggcctcggctggagtgagcggcgtggacgcctctttcctccggctcttcccttgttgctgcgagagcgagagggccgcgggcggcggaggcagcggggccgggatggaggacgttaactctaacgtgaacgcggaccaggagagagtttcattctgtcgcccaggctggagtgcaatggcgcgatctcggctcactgcaacctctgtctcccaggttcaggaaaatggctttgtaaagaagcttgagcctaaatctggctggatgacttttctagaagttacaggaaagatctgtgaaatgctcttctgtcctgaagcaatactgttgaccagaaaggacactccatattgtgaaaccggcctaatttttctgactcttacgaaaacgattgccaacacatacttctacttttaaataaacaactttgatgatgtaacttgaccttccagagttacagaaattttgtccctatttaatgaataaattgtatgtatttttctcta

SEQ ID NO: 407132 - DNA, 609 bp, Homo sapiens
  misc_feature (3)..(4): n is a, c, g, or t
  misc_feature (8)..(9): n is a, c, g, or t
  misc_feature (11)..(12): n is a, c, g, or t
  misc_feature (16)..(18): n is a, c, g, or t
ggnnattnncnntgcnnncccgaatcccggacctgcgctgaggaggcggttcatctgtggccagcggtgcttcgggacccgcgctgggggaaccctggcgacggggcctggccctgctatatgcgggggcctcggctggagtgagcggcgtggacgcctctttcctccggctcttcccttgttgctgcgagagcgagagggccgcgggcggcggaggcagcggggccgggatggaggacgttaactctaacgtgaacgcggaccaggaggctggagtgcaatggcgcgatctcggctcactgcaacctctgtctcccaggttcaggaaaatggctttgtaaagaagcttgagcctaaatctggctggatgacttttctagaagttacaggaaagatctgtgaaatgctcttctgtcctgaagcaatactgttgaccagaaaggacactccatattgtgaaaccggcctaatttttctgactcttacgaaaacgattgccaacacatacttctacttttaaataaacaactttgatgatgtaacttgaccttccagagttacagaaattttgtccctatttaatgaataaattgtatgtatttttctcta

SEQ ID NO: 407133 - DNA, 1032 bp, Homo sapiens
ggtttgttcctaaatctaatcgagctcccaaggaactagtatcttatagaacacacatagaaaatagtgctctacagtagtcactttcacatttttttcttggatccaacttcatgataagaaatacattttaactcataatctattcacatgtatatgaataactgaaacagaagtttcacaaaattatgattatgtttgccacaaatggtgtgctctaatattttccttctgtttcatcagaagaaaaatactggttactatccagctaagctgattttgtgacccattaatgagtttcagttctcactttgaaaacactgttctagaattacagaaaggtctagggatgagaactaacaccactgtgcatcacagtgtgtcagtctgtgccaggcagcttataaatattttttgcctctaatttttatacatttatgaggtaagtatcattttctaggtaaggatgctaatctgtctccaagccaaataacacacagtaaatcatggcaccaggatttgaatctgggtctttatacatcatagcccatgctgttctcactgtattttgctttttccaagtataaccccgttttcacacgaatggccccttcacatatttgaagactaccgtcgtgtccgtgctgaccctttctccctgccacacatgagagtttcattctgtcgcccaggctggagtgcaatggcgcgatctcggctcactgcaacctctgtctcccaggttcaggaaaatggctttgtaaagaagcttgagcctaaatctggctggatgacttttctagaagttacaggaaagatctgtgaaatgctcttctgtcctgaagcaatactgttgaccagaaaggacactccatattgtgaaaccggcctaatttttctgactcttacgaaaacgattgccaacacatacttctacttttaaataaacaactttgatgatgtaacttgaccttccagagttacagaaattttgtccctatttaatgaataaattgtatgtatttttctcta

SEQ ID NO: 407134 - DNA, 442 bp, Homo sapiens
atgaacctgtaaaagaatgtaggttttaaggctttggtaatataagttatttctttcttatttatttatttatttttaagagagtttcattctgtcgcccaggctggagtgcaatggcgcgatctcggctcactgcaacctctgtctcccaggttcaggaaaatggctttgtaaagaagcttgagcctaaatctggctggatgacttttctagaagttacaggaaagatctgtgaaatgctcttctgtcctgaagcaatactgttgaccagaaaggacactccatattgtgaaaccggcctaatttttctgactcttacgaaaacgattgccaacacatacttctacttttaaataaacaactttgatgatgtaacttgaccttccagagttacagaaattttgtccctatttaatgaataaattgtatgtatttttctcta

SEQ ID NO: 407135 - DNA, 983 bp, Homo sapiens
ggtttgttcctaaatctaatcgagctcccaaggaactagtatcttatagaacacacatagaaaatagtgctctacagtagtcactttcacatttttttcttggatccaacttcatgataagaaatacattttaactcataatctattcacatgtatatgaataactgaaacagaagtttcacaaaattatgattatgtttgccacaaatggtgtgctctaatattttccttctgtttcatcagaagaaaaatactggttactatccagctaagctgattttgtgacccattaatgagtttcagttctcactttgaaaacactgttctagaattacagaaaggtctagggatgagaactaacaccactgtgcatcacagtgtgtcagtctgtgccaggcagcttataaatattttttgcctctaatttttatacatttatgaggtaagtatcattttctaggtaaggatgctaatctgtctccaagccaaataacacacagtaaatcatggcaccaggatttgaatctgggtctttatacatcatagcccatgctgttctcactgtattttgctttttccaagtataaccccgttttcacacgaatggccccttcacatatttgaagactaccgtcgtgtccgtgctgaccctttctccctgccacacatggctggagtgcaatggcgcgatctcggctcactgcaacctctgtctcccaggttcaggaaaatggctttgtaaagaagcttgagcctaaatctggctggatgacttttctagaagttacaggaaagatctgtgaaatgctcttctgtcctgaagcaatactgttgaccagaaaggacactccatattgtgaaaccggcctaatttttctgactcttacgaaaacgattgccaacacatacttctacttttaaataaacagatgcggccgaagttttttctatcttttactctcggtggaaataaataatctaat

SEQ ID NO: 407136 - DNA, 520 bp, Homo sapiens
ggtcccctcggggcttccccttgggtctcagcgcaaagtcgggcggcggggccggatggacccgaggcggacgaataacgaggagctgcgagacgccaccttcttgctggcggcgggggagggcggcttgctagacgacctggagcgtctgtcaggctaggaggagggggaggagagctggctggagtgcaatggcgcgatctcggctcactgcaacctctgtctcccaggttcaggaaaatggctttgtaaagaagcttgagcctaaatctggctggatgacttttctagaagttacaggaaagatctgtgaaatgctcttctgtcctgaagcaatactgttgaccagaaaggacactccatattgtgaaaccggcctaatttttctgactcttacgaaaacgattgccaacacatacttctacttttaaataaacaactttgatgatgtaacttgaccttccagagttacagaaattttgtccctatttaatgaataaattgtatgtatttttctcta

SEQ ID NO: 407137 - DNA, 957 bp, Homo sapiens
  misc_feature (946)..(946): n is a, c, g, or t
ggtttgttcctaaatctaatcgagctcccaaggaactagtatcttatagaacacacatagaaaatagtgctctacagtagtcactttcacatttttttcttggatccaacttcatgataagaaatacattttaactcataatctattcacatgtatatgaataactgaaacagaagtttcacaaaattatgattatgtttgccacaaatggtgtgctctaatattttccttctgtttcatcagaagaaaaatactggttactatccagctaagctgattttgtgacccattaatgagtttcagttctcactttgaaaacactgttctagaattacagaaaggtctagggatgagaactaacaccactgtgcatcacagtgtgtcagtctgtgccaggcagcttataaatattttttgcctctaatttttatacatttatgaggtaagtatcattttctaggtaaggatgctaatctgtctccaagccaaataacacacagtaaatcatggcaccaggatttgaatctgggtctttatacatcatagcccatgctgttctcactgtattttgctttttccaagtataaccccgttttcacacgaatggccccttcacatatttgaagactaccgtcgtgtccgtgctgaccctttctccctgccacacatggctggagtgcaatggcgcgatctcggctcactgcaacctctgtctcccaggttcaggaaaatggctttgtaaagaagcttgagcctaaatctggctggatgacttttctagaagttacaggaaagatctgtgaaatgctcttctgtcctgaagcaatactgttgaccagaaaggacactccatattgtgaaaccggcctaatttttctgactcttacgaaaacgattgccaacacatacttctacttttaaataaacagaggtgtcgcccgaagcnccttttttttt

SEQ ID NO: 407138 - DNA, 335 bp, Homo sapiens
gcatacttaatctccaatgatttttaaaatgttaaatttattctctcataggaaaatggctttgtaaagaagcttgagcctaaatctggctggatgacttttctagaagttacaggaaagatctgtgaaatgctcttctgtcctgaagcaatactgttgaccagaaaggacactccatattgtgaaaccggcctaatttttctgactcttacgaaaacgattgccaacacatacttctacttttaaataaacaactttgatgatgtaacttgaccttccagagttacagaaattttgtccctatttaatgaataaattgtatgtatttttctcta

SEQ ID NO: 407139 - DNA, 415 bp, Homo sapiens
ccattccttcggcccccaaggggtctcacccaccccatgtcctatcactttaacccaggttaatcaccttaaccttcgagttgcccttcccacaaacacctaaggaattggacatctggctaatagtaagcttatccttccttagtgctgtcaccactctctaaatttcagtcccccatattgataaaccattcaacatcctacctagctcactggcctttcccaaacttgcactccattaccactaggaacttgtcattacctgaaacatctccacatcagaaaagtcaaacatatcaaatgtaatgattataatgtatcaaatacaagttatgcagatctaatgcatggcatggtgactgatacaactgaaatttactaatagagtagaacttaaatgtcctgatcacagaca

SEQ ID NO: 407140 - DNA, 854 bp, Homo sapiens
tttttttgtgattttttgaggtattagtattacattttctatgacctctgcagttagtcttcatttcttttaggaaggattccatttttatgaaaaaacaatttcattgaaaccaaacagtagtgaaaagagtgatatttaaatatgagttggtaagtcgtttttgaatacacatatggtttaaaaatctaaaatctcttgacacttgattaaatagagagagggaggagaaggatggtcatagaaaatgaatcttgcccttgatgtgatagtatggaatatttaagccaaaatctgtagtctcaaaggatttattgatgttttattgccagccagtcttcttccctgtttagaatgctatgtttttctgccaaacactgaggatacctaatagtttcctaagtgtttcttctgaataattaagtggattattttcagagatagactcttcttttaagtattctggggcttgtgtttttttcccttgttttctagcattttgacataggtgcatattatgtttttctttttcttttttagcaaatggggaaatgaaggcactgagaagataaataaacaagtttttgtgtgcgtgatttaaagagatagtctgaccattcatgtaaagtgttcagaacagtatctggccataataaatgttcaatcaacattagctataacaattattatcaaataagataaaatatgtgtagagtttgctatgcagtagaaatacaaagtgaggctgagtgtggtggctcacactggtgaaccactttgggaggccaaggtgggaggatagcttgagctcaggagttcaaggtcagcctgggcaacatagtgacacctcgtct

SEQ ID NO: 407141 - DNA, 410 bp, Homo sapiens
tgcttaagaacagtttcttcttcactccctctctcctaccacttctgctgccctatatagtagctttacactccctttgtgttattcttgaattgttaacgctgcttctcaatttttctctctaccctaccacttattcccagtctggaaaagtaaatagtgattgaggaggtgaggaggagcccaggaggaaggccgtgtatttcagaacacccctctctctcttccacccagatagcagtcccctgagttcatgtgctttcccactccacttctctctctgccccacccttagaagttccaaaaatcaggctcctctgcccgttggtgctccttatgtggtaacattggcgtggcgataccttacctgtgcatcatagaggggccccaccttgcagccctgtttgtgt

SEQ ID NO: 407142 - DNA, 335 bp, Homo sapiens
gcctcacttttcactccacttaccagagtaacttttgcagccacttcctttggttccgggggattttgcagcataaatcaaattgtttcctggctttccctttgtcaacttaaaattctcatgacttgagtcaacttggttttcatctgattttcagattctgtattttattgctgttgtctgcccccagtgttctccattcttttggggttttgcccttgaaaaatcctttactgttatagtgagattcttagggagagaaagtagagtttatatgtgcaaatctgccatttttacccagaactccaaaacagtaatcttagtgcaaaaaaaaa

SEQ ID NO: 407143 - DNA, 428 bp, Homo sapiens
tgataagctctgctttcctcttgctcaggagctgatactaatgcaggcaatgtgttatgtttcccacgacacccttgaataaaatgccatttcctcaggaacagctagaaataccgatgctaatttttcctatgctcaggaaaagcaagagctctcctgctgcagtgggctggaaggagctctccagaaatattatgtcatcctaatttgcactgccaagggatgagctcatcggggcggggtctcatgaggctgcagctgtgccagttcctcacttgtatgatgtgcgtcctccaagctcgcctctccctcgttacccgctccatccaccccctgcctgcctgcgccaaacaagagccactgcatgatgaattatttaaaacccgaaggcgaactcttgcaaaatataaccaggcatcagaaggcac

SEQ ID NO: 407144 - DNA, 1927 bp, Homo sapiens
acgaacaaggctgtaaaccacatttcctagaagaccagggagcagaaggacggggatctccctttgccgctaagagactccaactcccaggatgccttgggagcgctggaccacagctcccggcattcccggggaggcgcggggctagcgtagcctccgccccgcgcctcgcgttaccactcgtcccgcccctcctcgtcgcctccgagccaatgggaaggctccatactgcagggtgcgaaggggccggcgccgctgccgagttacgagtcggcgaaagcggcgggaagttcgtactgggcagaacgcgacgggtctgcggcttaggtgaaaatgcctcgtgtaaaagcagctcaagctggaagacagagctctgcaaagagacatcttgcagaacaatttgcagttggagagataataactgacatggcaaaaaaggaatggaaagtaggattacccattggccaaggaggctttggctgtatatatcttgctgatatgaattcttcagagtcagttggcagtgatgcaccttgtgttgtaaaagtggaacccagtgacaatggacctctttttactgaattaaagttctaccaacgagctgcaaaaccagagcaaattcagaaatggattcgtacccgtaagctgaagtacctgggtgttcctaagtattgggggtctggtctacatgacaaaaatggaaaaagttacaggtttatgataatggatcgctttgggagtgaccttcagaaaatatatgaagcaaatgccaaaaggttttctcggaaaactgtcttgcagctaagcttaagaattctggatattctggaatatattcacgagcatgagtatgtgcatggagatatcaaggcctcaaatcttcttctgaactacaagaatcctgaccaggtgtacttggtagattatggccttgcttatcggtactgcccagaaggagttcataaagaatacaaagaagaccccaaaagatgtcacgatggcactattgaattcacgagcatcgatgcacacaatggtgtggccccatcaagacgtggtgatttggaaatacttggttattgcatgatccaatggcttactggccatcttccttgggaggataatttgaaagatcctaaatatgttagagattccaaaattagatacagagaaaatattgcaagtttgatggacaaatgttttcctgagaaaaacaaaccaggtgaaattgccaaatacatggaaacagtgaaattactagactacactgaaaaacctctttatgaaaatttacgtgacattcttttgcaaggactaaaagctataggaagtaaggatgatggcaaattggacctcagtgttgtggagaatggaggtttgaaagcaaaaacaataacaaagaagcgaaagaaagaaattgaagaaagcaaggaacctggtgttgaagatacggaatggtcaaacacacagacagaggaggccatacagacccgttcaagaaccagaaagagagtccagaagtaattcagatgctgtgaaccagatttccttttctttgttttcttttgacttttttctccttttctatttgaactgttttattttcctgtgagtcttgcgaggtggaagtaatgattaaatactcatgtgttcagaaaacataaactttttttataaaaatattttgtacaattcattaaaggctaatttatgaaatttgaaaatcttcaggttatactccttaagttatcccaaagccgtgtgtttgtgatgttttggagtacatatatatgaaaattattatgacacgcacttttctaatcattgtacatttctcagagtggataaaaatgtttgacaaagtcctcacttttaaggaaatgcaaagcttaaaataaaactctcttttgtttgatgcaaacacaca

SEQ ID NO: 407145 - DNA, 1469 bp, Homo sapiens
  misc_feature (16)..(17): n is a, c, g, or t
agcaggctgtaccccnncgagttatgggatatcgtcgacccacggcctcgcagaacgcgacgggtctgcggcttaggtgaaaatgcctcgtgtaaaagcagctcaagctggaagacagagctctgcaaagagacatcttgcagaacaatttgcagttggagagataataactgacatggcaaaaaaggaatggaaagtaggattacccattggccaaggaggctttggctgtatatatcttgctgatatgaattcttcagagtcagttggcagtgatgcaccttgtgttgtaaaagtggaacccagtgacaatggacctctttttactgaattaaagttctaccaacgagctgcaaaaccagagcaaattcagaaatggattcgtacccgtaagctgaagtacctgggtgttcctaagtattgggggtctggtctacatgacaaaaatggaaaaagttacaggtttatgataatggatcgctttgggagtgaccttcagaaaatatatgaagcaaatgccaaaaggttttctcggaaaactgtcttgcagctaagcttaagaattctggatattctggaatatattcacgagcatgagtatgtgcatggagatatcaaggcctcaaatcttcttctgaactacaagaatcctgaccaggtgtacttggtagattatggccttgcttatcggtactgcccagaaggagttcataaagaatacaaagaagaccccaaaagatgtcacgatggcactattgaattcacgagcatcgatgcacacaatggtgtggccccatcaagacgtggtgatttggaaatacttggttattgcatgatccaatggcttactggccatcttccttgggaggataatttgaaagatcctaaatatgttagagattccaaaattagatacagagaaaatattgcaagtttgatggacaaatgttttcctgagaaaaacaaaccaggtgaaattgccaaatacatggaaacagtgaaattactagactacactgaaaaacctctttatgaaaatttacgtgacattcttttgcaaggactaaaagctataggaagtaaggatgatggcaaattggacctcagtgttgtggagaatggaggtttgaaagcaaaaacaataacaaagaagcgaaagaaagaaattgaagaaagcaaggaacctggtgttgaagatacggaatggtcaaacacacagacagaggaggccatacagacccgttcaagaaccagaaagagagtccagaagtaattcagatgctgtgaaccagatttccttttctttgttttcttttgacttttttctccttttctatttgaactgttttattttcctgtgagtcttgcgaggtggaagtaatgattaaatactcatgtgttcagaaaacataaactttttttataaaaatattttgtacaattcattaaaggctaatttatgaaatttg

SEQ ID NO: 407146 - DNA, 1029 bp, Homo sapiens
acgaacaaggctgtaaaccacatttcctagaagaccagggagcagaaggacggggatctccctttgccgctaagagactccaactcccaggatgccttgggagcgctggaccacagctcccggcattcccggggaggcgcggggctagcgtagcctccgccccgcgcctcgcgttaccactcgtcccgcccctcctcgtcgcctccgagccaatgggaaggctccatactgcagggtgcgaaggggccggcgccgctgccgagttacgagtcggcgaaagcggcgggaagttcgtactgggcagaacgcgacgggtctgcggcttaggtgaaaatgcctcgtgtaaaagcagctcaagctggaagacagagctctgcaaagagacatcttgcagaacaatttgcagttggagagataataactgacatggcaaaaaaggaatggaaagtaggattacccattggccaaggaggctttggctgtatatatcttgctgatatgaattcttcagagtcagttggcagtgatgcaccttgtgttgtaaaagtggaacccagtgacaatggacctctttttactgaattaaagttctaccaacgagctgcaaaaccagagcaaattcagaaatggattcgtacccgtaagctgaagtacctggatattctggaatatattcacgagcatgagtatgtgcatggagatatcaaggcctcaaatcttcttctgaactacaagaatcctgaccaggtgtacttggtagattatggccttgcttatcggtactgcccagaaggagttcataaagaatacaaagaagaccccaaaagatgtcacgatggcactattgaattcacgagcatcgatgcacacaatggtgtggccccatcaagacgtggtgatttggaaatacttggttattgcatgatccaatggcttactggccatcttccttgggaggataatttgaaagatcctaaatatgttagagattccaaaattaggtaaaggaaaacttaagttatttctagc

SEQ ID NO: 407147 - DNA, 287 bp, Homo sapiens
aacacctcaccacacctcccccccactcctcatagctacaagttttttttatcctttaggttcaagaaccagaaagagagtccagaagtaattcagatgctgtgaaccagatttccttttctttgttttcttttgacttttttctccttttctatttgaactgttttattttcctgtgagtcttgcgaggtggaagtaatgattaaatactcatgtgttcagaaaacataaactttttttataaaaatattttgtacaattcattaaaggctaatttatgaaatttg

SEQ ID NO: 407148 - DNA, 2362 bp, Homo sapiens
acgaacaaggctgtaaaccacatttcctagaagaccagggagcagaaggacggggatctccctttgccgctaagagactccaactcccaggatgccttgggagcgctggaccacagctcccggcattcccggggaggcgcggggctagcgtagcctccgccccgcgcctcgcgttaccactcgtcccgcccctcctcgtcgcctccgagccaatgggaaggctccatactgcagggtgcgaaggggccggcgccgctgccgagttacgagtcggcgaaagcggcgggaagttcgtactgggcagaacgcgacgggtctgcggcttaggtgaaaatgcctcgtgtaaaagcagctcaagctggaagacagagctctgcaaagagacatcttgcagaacaatttgcagttggagagataataactgacatggcaaaaaaggaatggaaagtaggattacccattggccaaggaggctttggctgtatatatcttgctgatatgaattcttcagagtcagttggcagtgatgcaccttgtgttgtaaaagtggaacccagtgacaatggacctctttttactgaattaaagttctaccaacgagctgcaaaaccagagcaaattcagaaatggattcgtacccgtaagctgaagtacctgggtgttcctaagtattgggggtctggtctacatgacaaaaatggaaaaagttacaggtttatgataatggatcgctttgggagtgaccttcagaaaatatatgaagcaaatgccaaaaggttttctcggaaaactgtcttgcagctaagcttaagaattctggatattctggaatatattcacgagcatgagtatgtgcatggagatatcaaggcctcaaatcttcttctgaactacaagaatcctgaccaggtgtacttggtagattatggccttgcttatcggtactgcccagaaggagttcataaagaatacaaagaagaccccaaaagatgtcacgatggcactattgaattcacgagcatcgatgcacacaatggtgtggccccatcaagacgtggtgatttggaaatacttggttattgcatgatccaatggcttactggccatcttccttgggaggataatttgaaagatcctaaatatgttagagattccaaaattagatacagagaaaatattgcaagtttgatggacaaatgttttcctgagaaaaacaaaccaggtgaaattgccaaatacatggaaacagtgaaattactagactacactgaaaaacctctttatgaaaatttacgtgacattcttttgcaaggactaaaagctataggaagtaaggatgatggcaaattggacctcagtgttgtggagaatggaggtttgaaagcaaaaacaataacaaagaagcgaaagaaagaaattgaagaaagcaaggaacctggtgttgaagatacggaatggtcaaacacacagacagaggaggccatacagacccgttcaagaaccagaaagagagtccagaagtaattcagatgctgtgaaccagatttccttttctttgttttcttttgacttttttctccttttctatttgaactgttttattttcctgtgagtcttgcgaggtggaagtaatgattaaatactcatgtgttcagaaaacataaactttttttataaaaatattttgtacaattcattaaaggctaatttatgaaatttgaaaatcttcaggttatactccttaagttatcccaaagccgtgtgtttgtgatgttttggagtacatatatatgaaaattattatgacacgcacttttctaatcattgtacatttctcagagtggataaaaatgtttgacaaagtcctcacttttaaggaaatgcaaagcttaaaataaaactctcttttgtttgatgcaaacacacaaaaaaaaaaaaaaaaaaaaaaaaaaatcaatataaaaaagggggggcgcagccaaaaagtttccccggggggggccaaagtatacgggtacccaggttttgtgtgacaagggggccccatatggggagcgagatttatataaggtatgcgcatgtggcactaattatacaacacctcagaccagcgggcaaaccccgtcacgacggagaaaatccggggacgaagaaacacccttactcgcaggcggggaccacattattgtgcaaccaacattccccttaaaggattttacaaggccctccaagggaacaaatatatacaaccttgtcaaagggggccaaacgcgtgtaaacacaccgcgtcacataagcctgcgtgttagaaaaaatttggtgcaactaggaaatgtcatatctcgagcaaatttctattcac

SEQ ID NO: 407149 - DNA, 1958 bp, Homo sapiens
acgaacaaggctgtaaaccacatttcctagaagaccagggagcagaaggacggggatctccctttgccgctaagagactccaactcccaggatgccttgggagcgctggaccacagctcccggcattcccggggaggcgcggggctagcgtagcctccgccccgcgcctcgcgttaccactcgtcccgcccctcctcgtcgcctccgagccaatgggaaggctccatactgcagggtgcgaaggggccggcgccgctgccgagttacgagtcggcgaaagcggcgggaagttcgtactgggcagaacgcgacgggtctgcggcttaggtgaaaatgcctcgtgtaaaagcagctcaagctggaagacagagctctgcaaagagacatcttgcagaacaatttgcagttggagagataataactgacatggcaaaaaaggaatggaaagtaggattacccattggccaaggaggctttggctgtatatatcttgctgatatgaattcttcagagtcagttggcagtgatgcaccttgtgttgtaaaagtggaacccagtgacaatggacctctttttactgaattaaagttctaccaacgagctgcaaaaccagagcaaattcagaaatggattcgtacccgtaagctgaagtacctgggtgttcctaagtattgggggtctggtctacatgacaaaaatggaaaaagttacaggtttatgataatggatcgctttgggagtgaccttcagaaaatatatgaagcaaatgccaaaaggttttctcggaaaactgtcttgcagctaagcttaagaattctggatattctggaatatattcacgagcatgagtatgtgcatggagatatcaaggcctcaaatcttcttctgaactacaagaatcctgaccaggtgtacttggtagattatggccttgcttatcggtactgcccagaaggagttcataaagaatacaaagaagaccccaaaagatgtcacgatggcactattgaattcacgagcatcgatgcacacaatggtgtggccccatcaagacgtggtgatttggaaatacttggttattgcatgatccaatggcttactggccatcttccttgggaggataatttgaaagatcctaaatatgttagagattccaaaattagatacagagaaaatattgcaagtttgatggacaaatgttttcctgagaaaaacaaaccaggtgaaattgccaaatacatggaaacagtgaaattactagactacactgaaaaacctctttatgaaaatttacgtgacattcttttgcaaggactaaaagctataggaagtaaggatgatggcaaattggacctcagtgttgtggagaatggaggtttgaaagcaaaaacaataacaaagaagcgaaagaaagaaattgaagaaagcaaggaacctggtgttgaagatacggaatggtcaaacacacagacagaggaggccatacagacccgttcaagaaccagaaagagagtccagaagtaattcagatgctgtgaaccagatttccttttctttgttttcttttgacttttttctccttttctatttgaactgttttattttcctgtgagtcttgcgaggtggaagtaatgattaaatactcatgtgttcagaaaacataaactttttttataaaaatattttgtacaattcattaaaggctaatttatgaaatttgaaaatcttcaggttatactccttaagttatcccaaagccgtgtgtttgtgatgttttggagtacatatatatgaaaattattatgacacgcacttttctaatcattgtacatttctcagagtggataaaaatgtttgacaaagtcctcacttttaaggaaatgcaaagcttaaaataaaactctcttttgtttgatgcaaacacacaaaacaaaaaaataatggcctccttggcctca

SEQ ID NO: 407150 - DNA, 1720 bp, Homo sapiens
acgaacaaggctgtaaaccacatttcctagaagaccagggagcagaaggacggggatctccctttgccgctaagagactccaactcccaggatgccttgggagcgctggaccacagctcccggcattcccggggaggcgcggggctagcgtagcctccgccccgcgcctcgcgttaccactcgtcccgcccctcctcgtcgcctccgagccaatgggaaggctccatactgcagggtgcgaaggggccggcgccgctgccgagttacgagtcggcgaaagcggcgggaagttcgtactgggcagaacgcgacgggtctgcggcttaggtgaaaatgcctcgtgtaaaagcagctcaagctggaagacagagctctgcaaagagacatcttgcagaacaatttgcagttggagagataataactgacatggcaaaaaaggaatggaaagtaggattacccattggccaaggaggctttggctgtatatatcttgctgatatgaattcttcagagtcagttggcagtgatgcaccttgtgttgtaaaagtggaacccagtgacaatggacctctttttactgaattaaagttctaccaacgagctgcaaaaccagagcaaattcagaaatggattcgtacccgtaagctgaagtacctgggtgttcctaagtattgggggtctggtctacatgacaaaaatggaaaaagttacaggtttatgataatggatcgctttgggagtgaccttcagaaaatatatgaagcaaatgccaaaaggttttctcggaaaactgtcttgcagctaagcttaagaattctggatattctggaatatattcacgagcatgagtatgtgcatggagatatcaaggcctcaaatcttcttctgaactacaagaatcctgaccaggtgtacttggtagattatggccttgcttatcggtactgcccagaaggagttcataaagaatacaaagaagaccccaaaagatgtcacgatggcactattgaattcacgagcatcgatgcacacaatggtgtggccccatcaagacgtggtgatttggaaatacttggttattgcatgatccaatggcttactggccatcttccttgggaggataatttgaaagatcctaaatatgttagagattccaaaattagatacagagaaaatattgcaagtttgatggacaaatgttttcctgagaaaaacaaaccaggtgaaattgccaaatacatggaaacagtgaaattactagactacactgaaaaacctctttatgaaaatttacgtgacattcttttgcaaggactaaaagctataggaagtaaggatgatggcaaattggacctcagtgttgtggagaatggaggtttgaaagcaaaaacaataacaaagaagcgaaagaaagaaattgaagaaagcaaggaacctggtgttgaagatacggaatggtcaaacacacagacagaggaggccatacagacccgttcaagaaccagaaagagagtccagaagtaattcagatgctgtgaaccagatttccttttctttgttttcttttgacttttttctccttttctatttgaactgttttattttcctgtgagtcttgcgaggtggaagtaatgattaaatactcatgtgttcagaaaacataaactttttttataaaaatattttgtacaattcattaaaggctaatttatgaaatttg

SEQ ID NO: 407151 - DNA, 1999 bp, Homo sapiens
acgaacaaggctgtaaaccacatttcctagaagaccagggagcagaaggacggggatctccctttgccgctaagagactccaactcccaggatgccttgggagcgctggaccacagctcccggcattcccggggaggcgcggggctagcgtagcctccgccccgcgcctcgcgttaccactcgtcccgcccctcctcgtcgcctccgagccaatgggaaggctccatactgcagggtgcgaaggggccggcgccgctgccgagttacgagtcggcgaaagcggcgggaagttcgtactgggcagaacgcgacgggtctgcggcttaggtgaaaatgcctcgtgtaaaagcagctcaagctggaagacagagctctgcaaagagacatcttgcagaacaatttgcagttggagagataataactgacatggcaaaaaaggaatggaaagtaggattacccattggccaaggaggctttggctgtatatatcttgctgatatgaattcttcagagtcagttggcagtgatgcaccttgtgttgtaaaagtggaacccagtgacaatggacctctttttactgaattaaagttctaccaacgagctgcaaaaccagagcaaattcagaaatggattcgtacccgtaagctgaagtacctgggtgttcctaagtattgggggtctggtctacatgacaaaaatggaaaaagttacaggtttatgataatggatcgctttgggagtgaccttcagaaaatatatgaagcaaatgccaaaaggttttctcggaaaactgtcttgcagctaagcttaagaattctggatattctggaatatattcacgagcatgagtatgtgcatggagatatcaaggcctcaaatcttcttctgaactacaagaatcctgaccaggtgtacttggtagattatggccttgcttatcggtactgcccagaaggagttcataaagaatacaaagaagaccccaaaagatgtcacgatggcactattgaattcacgagcatcgatgcacacaatggtgtggccccatcaagacgtggtgatttggaaatacttggttattgcatgatccaatggcttactggccatcttccttgggaggataatttgaaagatcctaaatatgttagagattccaaaattagatacagagaaaatattgcaagtttgatggacaaatgttttcctgagaaaaacaaaccaggtgaaattgccaaatacatggaaacagtgaaattactagactacactgaaaaacctctttatgaaaatttacgtgacattcttttgcaaggactaaaagctataggaagtaaggatgatggcaaattggacctcagtgttgtggagaatggaggtttgaaagcaaaaacaataacaaagaagcgaaagaaagaaattgaagaaagcaaggaacctggtgttgaagatacggaatggtcaaacacacagacagaggaggccatacagacccgaagtgaggagtcccaaggagcaatacatcgaagcatgtctcagccagaggctagcagcagcagctatgacagttcaagaaccagaaagagagtccagaagtaattcagatgctgtgaaccagatttccttttctttgttttcttttgacttttttctccttttctatttgaactgttttattttcctgtgagtcttgcgaggtggaagtaatgattaaatactcatgtgttcagaaaacataaactttttttataaaaatattttgtacaattcattaaaggctaatttatgaaatttgaaaatcttcaggttatactccttaagttatcccaaagccgtgtgtttgtgatgttttggagtacatatatatgaaaattattatgacacgcacttttctaatcattgtacatttctcagagtggataaaaatgtttgacaaagtcctcacttttaaggaaatgcaaagcttaaaataaaactctcttttgtttgatgcaaacacaca

SEQ ID NO: 407152 - DNA, 2059 bp, Homo sapiens
acgaacaaggctgtaaaccacatttcctagaagaccagggagcagaaggacggggatctccctttgccgctaagagactccaactcccaggatgccttgggagcgctggaccacagctcccggcattcccggggaggcgcggggctagcgtagcctccgccccgcgcctcgcgttaccactcgtcccgcccctcctcgtcgcctccgagccaatgggaaggctccatactgcagggtgcgaaggggccggcgccgctgccgagttacgagtcggcgaaagcggcgggaagttcgtactgggcagaacgcgacgggtctgcggcttaggtgaaaatgcctcgtgtaaaagcagctcaagctggaagacagagctctgcaaagagacatcttgcagaacaatttgcagttggagagataataactgacatggcaaaaaaggaatggaaagtaggattacccattggccaaggaggctttggctgtatatatcttgctgatatgaattcttcagagtcagttggcagtgatgcaccttgtgttgtaaaagtggaacccagtgacaatggacctctttttactgaattaaagttctaccaacgagctgcaaaaccagagcaaattcagaaatggattcgtacccgtaagctgaagtacctgggtgttcctaagtattgggggtctggtctacatgacaaaaatggaaaaagttacaggtttatgataatggatcgctttgggagtgaccttcagaaaatatatgaagcaaatgccaaaaggttttctcggaaaactgtcttgcagctaagcttaagaattctggatattctggaatatattcacgagcatgagtatgtgcatggagatatcaaggcctcaaatcttcttctgaactacaagaatcctgaccaggtgtacttggtagattatggccttgcttatcggtactgcccagaaggagttcataaagaatacaaagaagaccccaaaagatgtcacgatggcactattgaattcacgagcatcgatgcacacaatggtgtggccccatcaagacgtggtgatttggaaatacttggttattgcatgatccaatggcttactggccatcttccttgggaggataatttgaaagatcctaaatatgttagagattccaaaattagatacagagaaaatattgcaagtttgatggacaaatgttttcctgagaaaaacaaaccaggtgaaattgccaaatacatggaaacagtgaaattactagactacactgaaaaacctctttatgaaaatttacgtgacattcttttgcaaggactaaaagctataggaagtaaggatgatggcaaattggacctcagtgttgtggagaatggaggtttgaaagcaaaaacaataacaaagaagcgaaagaaagaaattgaagaaagcaaggttcaagaaccagaaagagagtccagaagtaattcagatgctgtgaaccagatttccttttctttgttttcttttgacttttttctccttttctatttgaactgttttattttcctgtgagtcttgcgaggtggaagtaatgattaaatactcatgtgttcagaaaacataaactttttttataaaaatattttgtacaattcattaaaggctaatttatgaaatttgaaaatcttcaggttatactccttaagttatcccaaagccgtgtgtttgtgatgttttggagtacatatatatgaaaattattatgacacgcacttttctaatcattgtacatttctcagagtggataaaaatgtttgacaaagtcctcacttttaaggaaatgcaaagcttaaaataaaactctcttttgtttgatgcaaacacacaaaaaaaaacagacacaaaccctaaaaaaaaagggggaacaacatttgtgcgcgcgcttggggcccctgagaaacttttttaaaacacatctttatgggagagggcccacatatgtatagtagaacgtgggacacagggtctcccaagagaaactcgggggaagaagaggggtgtggttctcccataaaaaagg

SEQ ID NO: 407153 - DNA, 1785 bp, Homo sapiens
acgaacaaggctgtaaaccacatttcctagaagaccagggagcagaaggacggggatctccctttgccgctaagagactccaactcccaggatgccttgggagcgctggaccacagctcccggcattcccggggaggcgcggggctagcgtagcctccgccccgcgcctcgcgttaccactcgtcccgcccctcctcgtcgcctccgagccaatgggaaggctccatactgcagggtgcgaaggggccggcgccgctgccgagttacgagtcggcgaaagcggcgggaagttcgtactgggcagaacgcgacgggtctgcggcttaggtgaaaatgcctcgtgtaaaagcagctcaagctggaagacagagctctgcaaagagacatcttgcagaacaatttgcagttggagagataataactgacatggcaaaaaaggaatggaaagtaggattacccattggccaaggaggctttggctgtatatatcttgctgatatgaattcttcagagtcagttggcagtgatgcaccttgtgttgtaaaagtggaacccagtgacaatggacctctttttactgaattaaagttctaccaacgagctgcaaaaccagagcaaattcagaaatggattcgtacccgtaagctgaagtacctgggtgttcctaagtattgggggtctggtctacatgacaaaaatggaaaaagttacaggtttatgataatggatcgctttgggagtgaccttcagaaaatatatgaagcaaatgccaaaaggttttctcggaaaactgtcttgcagctaagcttaagaattctggatattctggaatatattcacgagcatgagtatgtgcatggagatatcaaggcctcaaatcttcttctgaactacaagaatcctgaccaggtgtacttggtagattatggccttgcttatcggtactgcccagaaggagttcataaagaatacaaagaagaccccaaaagatgtcacgatggcactattgaattcacgagcatcgatgcacacaatggtgtggccccatcaagacgtggtgatttggaaatacttggttattgcatgatccaatggcttactggccatcttccttgggaggataatttgaaagatcctaaatatgttagagattccaaaattagatacagagaaaatattgcaagtttgatggacaaatgttttcctgagaaaaacaaaccaggtgaaattgccaaatacatggaaacagtgaaattactagactacactgaaaaacctctttatgaaaatttacgtgacattcttttgcaaggactaaaagctataggaagtaaggatgatggcaaattggacctcagtgttgtggagaatggaggtttgaaagcaaaaacaataacaaaggtgggcctcatgagagatgtggagtcctcatcacggggttgcctggtgattatggaataagcagcggacttacagacactcagcgtccaggcgcaccaggccaccacatcccagacatgagtacctgtgcaaaatgcattcattcctccatcttggacgagtttactgagcacctgtgatgtgccaggcactaggggtgctgcagcggaagagctaagcattgagggtttgtttgtttgttttttgttttttgagacagagtttcgctcttgttgcccaggctggagtgcaatggcgcgatctcggctcactgcaaccgctgcctcccaggtacaagcgattctcctgtctcagcctcctaagcagctcgaattaacaggcatg

SEQ ID NO: 407154 - DNA, 1691 bp, Homo sapiens
acgaacaaggctgtaaaccacatttcctagaagaccagggagcagaaggacggggatctccctttgccgctaagagactccaactcccaggatgccttgggagcgctggaccacagctcccggcattcccggggaggcgcggggctagcgtagcctccgccccgcgcctcgcgttaccactcgtcccgcccctcctcgtcgcctccgagccaatgggaaggctccatactgcagggtgcgaaggggccggcgccgctgccgagttacgagtcggcgaaagcggcgggaagttcgtactgggcagaacgcgacgggtctgcggcttaggtgaaaatgcctcgtgtaaaagcagctcaagctggaagacagagctctgcaaagagacatcttgcagaacaatttgcagttggagagataataactgacatggcaaaaaaggaatggaaagtaggattacccattggccaaggaggctttggctgtatatatcttgctgatatgaattcttcagagtcagttggcagtgatgcaccttgtgttgtaaaagtggaacccagtgacaatggacctctttttactgaattaaagttctaccaacgagctgcaaaaccagagcaaattcagaaatggattcgtacccgtaagctgaagtacctgggtgttcctaagtattgggggtctggtctacatgacaaaaatggaaaaagttacaggtttatgataatggatcgctttgggagtgaccttcagaaaatatatgaagcaaatgccaaaaggttttctcggaaaactgtcttgcagctaagcttaagaattctggatattctggaatatattcacgagcatgagtatgtgcatggagatatcaaggcctcaaatcttcttctgaactacaagaatcctgaccaggtgtacttggtagattatggccttgcttatcggtactgcccagaaggagttcataaagaatacaaagaagaccccaaaagatgtcacgatggcactattgaattcacgagcatcgatgcacacaatggtgtggccccatcaagacgtggtgatttggaaatacttggttattgcatgatccaatggcttactggccatcttccttgggaggataatttgaaagatcctaaatatgttagagattccaaaattagatacagagaaaatattgcaagtttgatggacaaatgttttcctgagaaaaacaaaccaggtgaaattgccaaatacatggaaacagtgaaattactagactacactgaaaaacctctttatgaaaatttacgtgacattcttttgcaaggactaaaagctataggaagtaaggatgatggcaaattggacctcagtgttgtggagaatggaggtttgaaagcaaaaacaataacaaaggtgggcctcatgagagatgtggagtcctcatcacggggttgcctggtgattatggaataagcagcggacttacagacactcagcgtccaggcgcaccaggccaccacatcccagacatgagtacctgtgcaaaatgcattcattcctccatcttggacgagtttactgagcacctgtgatgtgccaggcactaggggtgctgcagcggaagagctaagcattgagggagaccagaactgccttctgaatgccattatgacttgactcagctgggaaccacgagaggacga

SEQ ID NO: 407155 - DNA, 1589 bp, Homo sapiens
acgaacaaggctgtaaaccacatttcctagaagaccagggagcagaaggacggggatctccctttgccgctaagagactccaactcccaggatgccttgggagcgctggaccacagctcccggcattcccggggaggcgcggggctagcgtagcctccgccccgcgcctcgcgttaccactcgtcccgcccctcctcgtcgcctccgagccaatgggaaggctccatactgcagggtgcgaaggggccggcgccgctgccgagttacgagtcggcgaaagcggcgggaagttcgtactgggcagaacgcgacgggtctgcggcttaggtgaaaatgcctcgtgtaaaagcagctcaagctggaagacagagctctgcaaagagacatcttgcagaacaatttgcagttggagagataataactgacatggcaaaaaaggaatggaaagtaggattacccattggccaaggaggctttggctgtatatatcttgctgatatgaattcttcagagtcagttggcagtgatgcaccttgtgttgtaaaagtggaacccagtgacaatggacctctttttactgaattaaagttctaccaacgagctgcaaaaccagagcaaattcagaaatggattcgtacccgtaagctgaagtacctgggtgttcctaagtattgggggtctggtctacatgacaaaaatggaaaaagttacaggtttatgataatggatcgctttgggagtgaccttcagaaaatatatgaagcaaatgccaaaaggttttctcggaaaactgtcttgcagctaagcttaagaattctggatattctggaatatattcacgagcatgagtatgtgcatggagatatcaaggcctcaaatcttcttctgaactacaagaatcctgaccaggtgtacttggtagattatggccttgcttatcggtactgcccagaaggagttcataaagaatacaaagaagaccccaaaagatgtcacgatggcactattgaattcacgagcatcgatgcacacaatggtgtggccccatcaagacgtggtgatttggaaatacttggttattgcatgatccaatggcttactggccatcttccttgggaggataatttgaaagatcctaaatatgttagagattccaaaattagatacagagaaaatattgcaagtttgatggacaaatgttttcctgagaaaaacaaaccaggtgaaattgccaaatacatggaaacagtgaaattactagactacactgaaaaacctctttatgaaaatttacgtgacattcttttgcaaggactaaaagctataggaagtaaggatgatggcaaattggacctcagtgttgtggagaatggaggtttgaaagcaaaaacaataacaaaggtgaattttgttattaaattattctttggtcttcttgtgtttataattgcaataaatactaaaagaaagtatagcagtagttcaatgaagaacaataacagattgcatggcaattaaggcaaacattttttgtaatacagaaaatgtgtagagggttgtagaaaaataaatatttatatatttcttat

SEQ ID NO: 407156 - DNA, 1676 bp, Homo sapiens
  misc_feature (16)..(17): n is a, c, g, or t
agcaggctgtaccccnncgagttatgggatatcgtcgacccacggcctcgcagaacgcgacgggtctgcggcttaggtgaaaatgcctcgtgtaaaagcagctcaagctggaagacagagctctgcaaagagacatcttgcagaacaatttgcagttggagagataataactgacatggcaaaaaaggaatggaaagtaggattacccattggccaaggaggctttggctgtatatatcttgctgatatgaattcttcagagtcagttggcagtgatgcaccttgtgttgtaaaagtggaacccagtgacaatggacctctttttactgaattaaagttctaccaacgagctgcaaaaccagagcaaattcagaaatggattcgtacccgtaagctgaagtacctgggtgttcctaagtattgggggtctggtctacatgacaaaaatggaaaaagttacaggtttatgataatggatcgctttgggagtgaccttcagaaaatatatgaagcaaatgccaaaaggttttctcggaaaactgtcttgcagctaagcttaagaattctggatattctggaatatattcacgagcatgagtatgtgcatggagatatcaaggcctcaaatcttcttctgaactacaagaatcctgaccaggtgtacttggtagattatggccttgcttatcggtactgcccagaaggagttcataaagaatacaaagaagaccccaaaagatgtcacgatggcactattgaattcacgagcatcgatgcacacaatggtgtggccccatcaagacgtggtgatttggaaatacttggttattgcatgatccaatggcttactggccatcttccttgggaggataatttgaaagatcctaaatatgttagagattccaaaattagatacagagaaaatattgcaagtttgatggacaaatgttttcctgagaaaaacaaaccaggtgaaattgccaaatacatggaaacagtgaaattactagactacactgaaaaacctctttatgaaaatttacgtgacattcttttgcaaggactaaaagctataggaagtaaggatgatggcaaattggacctcagtgttgtggagaatggaggtttgaaagcaaaaacaataacaaagaagcgaaagaaagaaattgaagaaagcaaggaacctggtgttgaagatacggaatggtcaaacacacagacagaggaggccatacagacccgttcaagaaccagaaagagagtccagaagtaattcagatgctgtgaaccagatttccttttctttgttttcttttgacttttttctccttttctatttgaactgttttattttcctgtgagtcttgcgaggtggaagtaatgattaaatactcatgtgttcagaaaacataaactttttttataaaaatattttgtacaattcattaaaggctaatttatgaaatttgaaaatcttcaggttatactccttaagttatcccaaagccgtgtgtttgtgatgttttggagtacatatatatgaaaattattatgacacgcacttttctaatcattgtacatttctcagagtggataaaaatgtttgacaaagtcctcacttttaaggaaatgcaaagcttaaaataaaactctcttttgtttgatgcaaacacaca

SEQ ID NO: 407157 - DNA, 1837 bp, Homo sapiens
acgaacaaggctgtaaaccacatttcctagaagaccagggagcagaaggacggggatctccctttgccgctaagagactccaactcccaggatgccttgggagcgctggaccacagctcccggcattcccggggaggcgcggggctagcgtagcctccgccccgcgcctcgcgttaccactcgtcccgcccctcctcgtcgcctccgagccaatgggaaggctccatactgcagggtgcgaaggggccggcgccgctgccgagttacgagtcggcgaaagcggcgggaagttcgtactgggcagaacaatttgcagttggagagataataactgacatggcaaaaaaggaatggaaagtaggattacccattggccaaggaggctttggctgtatatatcttgctgatatgaattcttcagagtcagttggcagtgatgcaccttgtgttgtaaaagtggaacccagtgacaatggacctctttttactgaattaaagttctaccaacgagctgcaaaaccagagcaaattcagaaatggattcgtacccgtaagctgaagtacctgggtgttcctaagtattgggggtctggtctacatgacaaaaatggaaaaagttacaggtttatgataatggatcgctttgggagtgaccttcagaaaatatatgaagcaaatgccaaaaggttttctcggaaaactgtcttgcagctaagcttaagaattctggatattctggaatatattcacgagcatgagtatgtgcatggagatatcaaggcctcaaatcttcttctgaactacaagaatcctgaccaggtgtacttggtagattatggccttgcttatcggtactgcccagaaggagttcataaagaatacaaagaagaccccaaaagatgtcacgatggcactattgaattcacgagcatcgatgcacacaatggtgtggccccatcaagacgtggtgatttggaaatacttggttattgcatgatccaatggcttactggccatcttccttgggaggataatttgaaagatcctaaatatgttagagattccaaaattagatacagagaaaatattgcaagtttgatggacaaatgttttcctgagaaaaacaaaccaggtgaaattgccaaatacatggaaacagtgaaattactagactacactgaaaaacctctttatgaaaatttacgtgacattcttttgcaaggactaaaagctataggaagtaaggatgatggcaaattggacctcagtgttgtggagaatggaggtttgaaagcaaaaacaataacaaagaagcgaaagaaagaaattgaagaaagcaaggaacctggtgttgaagatacggaatggtcaaacacacagacagaggaggccatacagacccgttcaagaaccagaaagagagtccagaagtaattcagatgctgtgaaccagatttccttttctttgttttcttttgacttttttctccttttctatttgaactgttttattttcctgtgagtcttgcgaggtggaagtaatgattaaatactcatgtgttcagaaaacataaactttttttataaaaatattttgtacaattcattaaaggctaatttatgaaatttgaaaatcttcaggttatactccttaagttatcccaaagccgtgtgtttgtgatgttttggagtacatatatatgaaaattattatgacacgcacttttctaatcattgtacatttctcagagtggataaaaatgtttgacaaagtcctcacttttaaggaaatgcaaagcttaaaataaaactctcttttgtttgatgcaaacacaca

SEQ ID NO: 407158 - DNA, 1288 bp, Homo sapiens
  misc_feature (12)..(12): n is a, c, g, or t
tctagaggatcncggcatatggtatctcagtgtagtggagaatggaggtagaaagcaaaacatacaaattacaggtttatgataatggatcgctttgggagtgaccttcagaaaatatatgaagcaaatgccaaaaggttttctcggaaaactgtcttgcagctaagcttaagaattctggatattctggaatatattcacgagcatgagtatgtgcatggagatatcaaggcctcaaatcttcttctgaactacaagaatcctgaccaggtgtacttggtagattatggccttgcttatcggtactgcccagaaggagttcataaagaatacaaagaagaccccaaaagatgtcacgatggcactattgaattcacgagcatcgatgcacacaatggtgtggccccatcaagacgtggtgatttggaaatacttggttattgcatgatccaatggcttactggccatcttccttgggaggataatttgaaagatcctaaatatgttagagattccaaaattagatacagagaaaatattgcaagtttgatggacaaatgttttcctgagaaaaacaaaccaggtgaaattgccaaatacatggaaacagtgaaattactagactacactgaaaaacctctttatgaaaatttacgtgacattcttttgcaaggactaaaagctataggaagtaaggatgatggcaaattggacctcagtgttgtggagaatggaggtttgaaagcaaaaacaataacaaagaagcgaaagaaagaaattgaagaaagcaaggaacctggtgttgaagatacggaatggtcaaacacacagacagaggaggccatacagacccgttcaagaaccagaaagagagtccagaagtaattcagatgctgtgaaccagatttccttttctttgttttcttttgacttttttctccttttctatttgaactgttttattttcctgtgagtcttgcgaggtggaagtaatgattaaatactcatgtgttcagaaaacataaactttttttataaaaatattttgtacaattcattaaaggctaatttatgaaatttgaaaatcttcaggttatactccttaagttatcccaaagccgtgtgtttgtgatgttttggagtacatatatatgaaaattattatgacacgcacttttctaatcattgtacatttctcagagtggataaaaatgtttgacaaagtcctcacttttaaggaaatgcaaagcttaaaataaaactctcttttgtttgatgcaaacacaca

SEQ ID NO: 407159 - DNA, 737 bp, Homo sapiens
ttttgccctgattttattactatgttcttcattacatattatggttagaacatcctttggtttaatctgttttaacccaaagaatacttgagatacctgaagagggaatatataacttcacactgaaggcgagaggttttgaagtagtccctctctttttcccgctgctgtcttcctttcgctactgtcttttttcctcctttcccctgtcttgttcattttgttattaggaagtgaggagtcccaaggagcaatacatcgaagcatgtctcagccagaggctagcagcagcagctatgacagttcaagaaccagaaagagagtccagaagtaattcagatgctgtgaaccagatttccttttctttgttttcttttgacttttttctccttttctatttgaactgttttattttcctgtgagtcttgcgaggtggaagtaatgattaaatactcatgtgttcagaaaacataaactttttttataaaaatattttgtacaattcattaaaggctaatttatgaaatttgaaaatcttcaggttatactccttaagttatcccaaagccgtgtgtttgtgatgttttggagtacatatatatgaaaattattatgacacgcacttttctaatcattgtacatttctcagagtggataaaaatgtttgacaaagtcctcacttttaaggaaatgcaaagcttaaaataaaactctcttttgtttgatgcaaacacaca

SEQ ID NO: 407160 - DNA, 494 bp, Homo sapiens
aacacctcaccacacctcccccccactcctcatagctacaagttttttttatcctttaggttcaagaaccagaaagagagtccagaagtaattcagatgctgtgaaccagatttccttttctttgttttcttttgacttttttctccttttctatttgaactgttttattttcctgtgagtcttgcgaggtggaagtaatgattaaatactcatgtgttcagaaaacataaactttttttataaaaatattttgtacaattcattaaaggctaatttatgaaatttgaaaatcttcaggttatactccttaagttatcccaaagccgtgtgtttgtgatgttttggagtacatatatatgaaaattattatgacacgcacttttctaatcattgtacatttctcagagtggataaaaatgtttgacaaagtcctcacttttaaggaaatgcaaagcttaaaataaaactctcttttgtttgatgcaaacacaca

SEQ ID NO: 407161 - DNA, 546 bp, Homo sapiens
caaatttaaattttggagagaaatatttcagtattagtaaaaattagatacgttttatcagtcagtatttttatatggcttaagagaaggtaggttttgtcagcatattttttgacatattaaaaaatgacccaattttctaagattttcagagtattagcaatcatacctttgtatgtcagttttatctttgcaaatcacgagagtcgatttgattttaaaatgttaataactatatttagggatatttatatttctgttcttttgcttttgtaaattattgactagtgatttcagtttctttgatttttcttcaagggttcaagaaccagaaagagagtccagaagtaattcagatgctgtgaaccagatttccttttctttgttttcttttgacttttttctccttttctatttgaactgttttattttcctgtgagtcttgcgaggtggaagtaatgattaaatactcatgtgttcagaaaacataaactttttttataaaaatattttgtacaattcattaaaggctaatttatgaaattt

SEQ ID NO: 407162 - DNA, 3498 bp, Homo sapiens
tccaagaagagtccatttaggaaatctaaaatagagtgtccttccccaggagaactggatcagaaagagccccagatgtcacccagcgtagctgcatctctctcctgccctgttccctcaactccccctgaactctcacagagagctacattggacaccgtccctcctccacccccttctaaagttgggaaacggtgtagaaagacctctgatcccagaaggagcatcgtggagtgtcagcctgatgcctccgctactcctggggttggcacagctgacagcccagctgcccccacagactctagagatgaccagaagggactgagcctctctcctcagtctcctcctgaaagacggggctacccaggccctggtctcaggagtgattggcatgcatcctctcctctgctcattacaagtgacacagagcatgtcactctcctcagtgaagccgaacaccatggcattggtgacttgaaaagtaacgtcttatcagtggaagagggtgaggggctaaggacagcagatgctgagaagtcttctctgtctcaccctgggattcccccatctcctccttcctgtgggcctggctctcctctgatgccttcctgtgacgtgcactgtaccacagatgggagacagtgccaggcttcggcacaactagacaacctgccagcatcagcttggcattccacagactctgccagcccacagacctatgaggttgagctggagatgcaagcttctggccttcccaaacttcgaattaagaagatagaccccagctcttcattagaggctgagcccctcagcaaggaggagagctctctgggagaagagagcttcctccctgctctcagcatgcccagggccagcaggtccttaagcaaacctgaacccacctatgtgtcacccccctgcccccgcctctcccacagcacacctggcaagagcagggggcaaacctacatctgccaggcctgtacccccacccacggcccttctagtaccccctctccatttcaaacagatggggttccttggacaccatcccccaagcacagtgggaagacaactccagacataattaaagactggcccaggaggaagagggcggtgggctgtggcgccggctcctcttccgggaggggcgaggtcggtgcagaccttcctgggagcctgtcactgcttgagtcagagggcaaggaccacggccttgaactcagcatccacaggacgcccatcttggaggattttgagctcgagggagtgtgccagctcccagaccagtcgcctcccaggaacagcatgcctaaggccgaggaagcctcttcctggggacagtttgggttgagttccaggaagagagtcctgttggccaaggaagaagctgaccgtggagccaaaaggatctgtgacctgagagaagattcagaagttagtaagagtaaagaggggtctccaagttggagtgcatggcagctaccctccacgggagacgaagaggtgtttgtttccggctccaccccacctcccagctgtgccgtgcggagctgcctctctgccagtgccctccaggctctgacccagtctccgctgctgttccaggggaaaacaccttcctctcagagcaaagaccccagagatgaggatgtggatgttcttccctccactgtagaagactctcctttcagtcgcgctttctccaggaggcgccccatcagcagaacttatacacggaagaagctcatgggaacctggctggaggacttatagccacaaacattactgagcccaaaagatcaaggagtcagccaggaccctgtggacataaagaagttggatgcctggtcccaagcctcttttgccatgggtcagctggcggtccatctccaggcgctgccgctccagggccacctccagccagtacaccagcctctgctgctcctccagctgcatctccagttccgagaaggcaatctgctgctggtgctgctcctctcggagcgtcaccacctgtcccaagacccagccaggctcagccctcatcatgacccctcttcatccagctaatcctcaatcacagacacagtattggcacacttgccaccacggcactaagaaatcaccagggtcttccctgctgagccaagactcagcctcagacacctcagcagtgctctagttatcttccaacgatcagagctggctctcaccttatctgctatctctgccacaaaccctttcctagccacacactatggagctgggcagagcgtcaagttgtgggatttcatctagaccaacctcagcactatggacatctgggaccagataattcttggttgtgggggcctgtcctgtgtgttataggatgtttagtaacatccctggcctccacccccaccactgtgacaaccaaaagtatctccagccatggccaaatgtcacaaaagggcaaaaacttcccctactgagagctactattgtggccatggaccaccctgaggttagccaatcagagcagaagtggggggcgggtaggaaactgggtcttagtttcacaagtaaaataggctttaaggtcaggcggccctgcagatgagttggtcctgattctgtcccccagtctgggaggaaacgggatatccgctggagcagctgccatgagacacctccccacacgtgccgctgaggaggagctggggggccatgggctgctggcccaccttgtcaaaatacttgcagaggagggctctggtctctgaggatgagaggtagctgagcttggccatgaggttcatctcgcactgggacagcaacgaggctgaggcccgaagcacccgctggcggcatgtgatggcctcattcttatactcaatggcagcatccagggcctcgatggcctcatccaactggaacagcgtccgctcctcctgcagagacgggcacgcgtggaggaacagcacccactgcctgaatgctgaagtcctgggcagacatgcaacagccaacacgtagccacaactgggccttaagggtcccctcgtcccaagggccaagtcagcgcatcgagagaggtgccccctgctcactgtcacagccccaaccccagggtgagctgggggcactgctcagaggtggcctgctcaactgcaagcctctgtgaatgatctacattcaggaagttcagagcaccctaaccaaacaaaaggcatggttgggacagccacggaggcaccacggtgtctgctgggtaagcttctacagatggggatacgttctaagaaatgcatcattaggcgttttcgacgtcgtgcaaacatcagaatatactcacacaaacctagatggtatagcccaccacacacctaggctacaagcctggacagcatgtgactgtactgaatactgtaggcagttgttaaccatggtgagtatttgtgtatctaaacatagaaaacgcacagtaaaaatgcggtgttataattttctggg

SEQ ID NO: 407163 - DNA, 2412 bp, Homo sapiens
tccaagaagagtccatttaggaaatctaaaatagagtgtccttccccaggagaactggatcagaaagagccccagatgtcacccagcgtagctgcatctctctcctgccctgttccctcaactccccctgaactctcacagagagctacattggacaccgtccctcctccacccccttctaaagttgggaaacggtgtagaaagacctctgatcccagaaggagcatcgtggagtgtcagcctgatgcctccgctactcctggggttggcacagctgacagcccagctgcccccacagactctagagatgaccagaagggactgagcctctctcctcagtctcctcctgaaagacggggctacccaggccctggtctcaggagtgattggcatgcatcctctcctctgctcattacaagtgacacagagcatgtcactctcctcagtgaagccgaacaccatggcattggtgacttgaaaagtaacgtcttatcagtggaagagggtgaggggctaaggacagcagatgctgagaagtcttctctgtctcaccctgggattcccccatctcctccttcctgtgggcctggctctcctctgatgccttcctgtgacgtgcactgtaccacagatgggagacagtgccaggcttcggcacaactagacaacctgccagcatcagcttggcattccacagactctgccagcccacagacctatgaggttgagctggagatgcaagcttctggccttcccaaacttcgaattaagaagatagaccccagctcttcattagaggctgagcccctcagcaaggaggagagctctctgggagaagagagcttcctccctgctctcagcatgcccagggccagcaggtccttaagcaaacctgaacccacctatgtgtcacccccctgcccccgcctctcccacagcacacctggcaagagcagggggcaaacctacatctgccaggcctgtacccccacccacggcccttctagtaccccctctccatttcaaacagatggggttccttggacaccatcccccaagcacagtgggaagacaactccagacataattaaagactggcccaggaggaagagggcggtgggctgtggcgccggctcctcttccgggaggggcgaggtcggtgcagaccttcctgggagcctgtcactgcttgagtcagagggcaaggaccacggccttgaactcagcatccacaggacgcccatcttggaggattttgagctcgagggagtgtgccagctcccagaccagtcgcctcccaggaacagcatgcctaaggccgaggaagcctcttcctggggacagtttgggttgagttccaggaagagagtcctgttggccaaggaagaagctgaccgtggagccaaaaggatctgtgacctgagagaagattcagaagttagtaagagtaaagaggggtctccaagttggagtgcatggcagctaccctccacgggagacgaagaggtgtttgtttccggctccaccccacctcccagctgtgccgtgcggagctgcctctctgccagtgccctccaggctctgacccagtctccgctgctgttccaggggaaaacaccttcctctcagagcaaagaccccagagatgaggatgtggatgttcttccctccactgtagaagactctcctttcagtcgcgctttctccaggaggcgccccatcagcagaacttatacacggaagaagctcatgggaacctggctggaggacttatagccacaaacattactgagcccaaaagatcaaggagtcagccaggaccctgtggacataaagaagttggatgcctggtcccaagcctcttttgccatggtcagtgttcagattgccattagaatgccttagggttttctaattccccttatggatccaatccatctcctggccctgccccttgttggggaagttgcaggaggagaggtggatggcaatgtgattggtgctataactcaggcagcctgggagtcaggaacccagacaaggaatcccattccagcctcaccccaaccatgaccttggcaagtcagggggccactctgcctcatttatgcaaatggagaaaggcgccctccctggggtcccttgagctgctgtaaggctgggctgctgcgacacaggcagcgctttgtaaactgtgaagccatatacgtgaaactgaagagtgcattgggcagtggaagctattttttgccttccctgtgtaacagtaaaatcatctctagtgactgagcactcagtacatttttgtttaatgttgggcctgaggttaactgtgaccatggtccagcttgagtggcttctggagcagccacattttcaaggactgtccaagagccagccagttcagggctc

SEQ ID NO: 407164 - DNA, 510 bp, Homo sapiens
ggctgtggcgccggctcctcttccgggaggggcgaggtcggtgcagaccttcctgggagcctgtcactgcttgagtcagagggcaaggaccacggccttgaactcagcatccacaggacgcccatcttggaggattttgagctcgagggagtgtgccagctcccagaccagtcgcctcccaggaacagcatgcctaaggccgaggaagcctcttcctggggacagtttgggttgagttccaggaagagagtcctgttggccaaggaagaagctgaccgtggagccaaaaggatctgtgacctgagagaagattcagaagttagtaagagtaaagaggggtctccaagttggagtgcatggcagctaccctccacgggagacgaagaggtgtttgtttccggtgagttcgtttttgaaacccagtttcctcatggtttcttttggtcagagtgcttgacaaggaggcacttgggagttgcttcttgggaggcctgggcttcccggttgggg

SEQ ID NO: 407165 - DNA, 393 bp, Homo sapiens
agctgggaccacaggtgttcgccaccatcccaggctaatttttaaattttttgtacagatgtggttttgctacattgcccaggctggtcttgaactcctgggctcgagcaatcctcccgtctcagcctcccaaagtgctgggattacaggtgtgagctaccacgtccggccaagatctgcttcttctgaaaccatggcaagagaaagacagacagacttggacctactgcagggagggttaagtagcagcgggactcccatcaagaagaaggaatgtcttccggagcctcatctgtctgttgggctggaggcagggcctttgtgaaggcgggtggtgctcagatcgcctctgggcccttcctccagccccgaggcggattcaccatgaggctg

SEQ ID NO: 407166 - DNA, 341 bp, Homo sapiens
taaaaaaggagtccctgcagctccagcacggagacacaggggctcaacagagtgcttcctaatagctttttgtcttgagtctagaccccttttgattagttaggaattagcttagttacatgtaatagagattctgtttttccttttctgggtatgccccacattcatctatatattcacatattccacagatatttgagtgactgcttttaccaattttagcttaagccctgcagatacagagctgaacgagaacgttcaatccgtgttctcttgaaacttaacgtagttacgtgaaggttaatataggaccagtaatcacaactgtgatgaatgttata

SEQ ID NO: 407167 - DNA, 1552 bp, Homo sapiens
gcatgcgccccaatttgcgctcggggaattaaaagaggggaaaaaaagcccgaagaaaactcacgccccaaacaaaacgcaaggagaggagggcgcgcggcctgcagccctcgcccgcgtccccggccgcggcgtgatgcgcgcggaccagcccgcgacgcccgggctgccgctgtccccgcacctggacgctggcgcggtggccgcgccccagcctcgatcgctcgccgcggcgactcggccccaggcttccggcgccggtgggggccctcgctctccatggggctgagggactggctgagaaccgtgtgctgctgctgccggtgcgagtgcttggaggagcgcgccctgcctgagaaggagcccctcgtcagtgataacaatccatattcctcatttggagcaactctggtgagggatgatgagaagaatttatggagtatgccccatgatgtgtcccacacagaggcagacgacgacagaaccctgtacaatttgatagtcattcgtaatcagcaggccaaagactcagaggagtggcagaagctcaactatgatatccataccctgcggcaggttcgaagggaagtaagaaacagatggaagtgcatcttagaagatttaggttttcaaaaggaagctgactctttgttgtcagtgactaaactcagcaccatcagtgattctaaaaacacaaggaaagctcgagagatgttgttaaaactggctgaagaaaccaatattttcccaacaagttgggagctctcagagagatatctctttgttgtggaccgtctcattgcacttgatgctgcagaagagttctttaagcttgctcgtcgaacttaccccaagaagcctggggttccatgcctggcagatggccagaaagaactgcacctgcacctgtggggggacctctcatgcagacttgcacatatgcagggagtattgcactgaagatctttgctggaccttcttctcttcagaagataattttcaaaagggagcaatgctgtgaatgcagcttgcttctctctacagattgagaagtccagcttcaaaagttacttgccacttaagcaaggaacttgtcaagagatcatggttcatgttactgaaaagactttaaggatttgtaaggttaatccatagattgctgagaaaaatggaaatatttttatttttacagattttgcacttctgaattcaggttaaaactaacttgtatttagtctgcttagaggactgtgacttgaaaatttttatataccaatgagctttttggtagcgtccacaatgtttaaaatatttcataggcgagatccgtgttctccatttattaatgcattgtagaccaatttaactgctgtgtttcaggaaaattcttcctagtttaataagcaagctaaaagttttattttttatatttagtgcttaatctttgcctcatgttatgtaaaattagcctgcagatattttctctcaattctgtagactctcgcaagataaacattcaaacagtgaaacaaacaataaaataaataaacct

SEQ ID NO: 407168 - DNA, 1163 bp, Homo sapiens
gcttaaggtaacgtgactctcttattaacgccgatcaggagtggcagaagctcaactatgatatccataccctgcggcaggttcgaagggaagtaagaaacagatggaagtgcatcttagaagatttaggttttcaaaaggaagctgactctttgttgtcagtgactaaactcagcaccatcagtgattctaaaaacacaaggaaagctcgagagatgttgttaaaactggctgaagaaaccaatattttcccaacaagttgggagctctcagagagatatctctttgttgtggaccgtctcattgcacttgatgctgcagaagagttctttaagcttgctcgtcgaacttaccccaagaagcctggggttccatgcctggcagatggccagaaagaactgcactaccttccgtttccaagtccctaaaggagaggctcaggggcagaatgggaattcttccatgaggactcagcagtcaaccaaagttggacaattacatgtagaagagactgcacctgtggggggacctctcatgcagacttgcacatatgcagggagtattgcactgaagatctttgctggaccttcttctcttcagaagataattttcaaaagggagcaatgctgtgaatgcagcttgcttctctctacagattgagaagtccagcttcaaaagttacttgccacttaagcaaggaacttgtcaagagatcatggttcatgttactgaaaagactttaaggatttgtaaggttaatccatagattgctgagaaaaatggaaatatttttatttttacagattttgcacttctgaattcaggttaaaactaacttgtatttagtctgcttagaggactgtgacttgaaaatttttatataccaatgagctttttggtagcgtccacaatgtttaaaatatttcataggcgagatccgtgttctccatttattaatgcattgtagaccaatttaactgctgtgtttcaggaaaattcttcctagtttaataagcaagctaaaagttttattttttatatttagtgcttaatctttgcctcatgttatgtaaaattagcctgcagatattttctctcaattctgtagactctcgcaagataaacattcaaacagtgaaacaaacaataaaataaataaacct

SEQ ID NO: 407169 - DNA, 1122 bp, Homo sapiens
gcatgcgccccaatttgcgctcggggaattaaaagaggggaaaaaaagcccgaagaaaactcacgccccaaacaaaacgcaaggagaggagggcgcgcggcctgcagccctcgcccgcgtccccggccgcggcgtgatgcgcgcggaccagcccgcgacgcccgggctgccgctgtccccgcacctggacgctggcgcggtggccgcgccccagcctcgatcgctcgccgcggcgactcggccccaggcttccggcgccggtgggggccctcgctctccatggggctgagggactggctgagaaccgtgtgctgctgctgccggtgcgagtgcttgggattacaggcgtgagtcaccgcgcccgtgcaatgcccttggcattttatctggaatagcatctgtaaactgaagtgtttgacctctgttttcttctctcctctttcatctgtatctgattcgttggctggcagctgcacctgtggggggacctctcatgcagacttgcacatatgcagggagtattgcactgaagatctttgctggaccttcttctcttcagaagataattttcaaaagggagcaatgctgtgaatgcagcttgcttctctctacagattgagaagtccagcttcaaaagttacttgccacttaagcaaggaacttgtcaagagatcatggttcatgttactgaaaagactttaaggatttgtaaggttaatccatagattgctgagaaaaatggaaatatttttatttttacagattttgcacttctgaattcaggttaaaactaacttgtatttagtctgcttagaggactgtgacttgaaaatttttatataccaatgagctttttggtagcgtccacaatgtttaaaatatttcataggcgagatccgtgttctccatttattaatgcattgtagaccaatttaactgctgtgtttcaggaaaattcttcctagtttaataagcaagctaaaagttttattttttatatttagtgcttaatctttgcctcatgttatgtaaaattagcctgcagatattttctctcaattctgtagactctcgcaagataaacattcaaacagtgaaacaaacaataaaataaataaacct

SEQ ID NO: 407170 - DNA, 1300 bp, Homo sapiens
gcatgcgccccaatttgcgctcggggaattaaaagaggggaaaaaaagcccgaagaaaactcacgccccaaacaaaacgcaaggagaggagggcgcgcggcctgcagccctcgcccgcgtccccggccgcggcgtgatgcgcgcggaccagcccgcgacgcccgggctgccgctgtccccgcacctggacgctggcgcggtggccgcgccccagcctcgatcgctcgccgcggcgactcggccccaggcttccggcgccggtgggggccctcgctctccatggggctgagggactggctgagaaccgtgtgctgctgctgccggtgcgagtgcttggaggagcgcgccctgcctgagaaggagcccctcgtcagtgataacaatccatattcctcatttggagcaactctggtgagggatgatgagaagaatttatggagtatgccccatgatgtgtcccacacagaggcagacgacgacagaaccctgtacaatttgatagtcattcgtaatcagcaggccaaagactcagaggagtggcagaagctcaactatgatatccataccctgcggcaggttcgaagggaagtaagaaacagatggaagtgcatcttagaagatttaggttttcaaaaggaagctgactctttgttgtcagtgactaaactcagcaccatcagtgattctaaaaacacaaggaaagctcgagagatgttgttaaaactggctgaagaaaccaatattttcccaacaagttgggagctctcagagagatatctctttgttgtggaccgtctcattgcacttgatgctgcagaagagttctttaagcttgctcgtcgaacttaccccaagaagcctggggttccatgcctggcagatggccagaaagaactgcactaccttccgtttccaagtccctaaaggagaggctcaggggcagaatgggaattcttccatgaggactcagcagtcaaccaaagttggacaattacatgtagaagagagtgagcaaatagagtttgcttagtgaaaaatgatactgaattctacataaatgtaaagtctttaatctgaggaccctgccccatgaattgtgcaggctgcattgaaacgccttggtgatctcatatttaggaagaaagttaaagagttggtcagatggatagttcataatgggtggttccattctgagagcccattgccccagctttggttttagttgtgtcataatctctgatcattaatcctactgactgagtggactatttcagttaataaaacaatatgattaataaaa

SEQ ID NO: 407171 - DNA, 1659 bp, Homo sapiens
gcatgcgccccaatttgcgctcggggaattaaaagaggggaaaaaaagcccgaagaaaactcacgccccaaacaaaacgcaaggagaggagggcgcgcggcctgcagccctcgcccgcgtccccggccgcggcgtgatgcgcgcggaccagcccgcgacgcccgggctgccgctgtccccgcacctggacgctggcgcggtggccgcgccccagcctcgatcgctcgccgcggcgactcggccccaggcttccggcgccggtgggggccctcgctctccatggggctgagggactggctgagaaccgtgtgctgctgctgccggtgcgagtgcttggaggagcgcgccctgcctgagaaggagcccctcgtcagtgataacaatccatattcctcatttggagcaactctggtgagggatgatgagaagaatttatggagtatgccccatgatgtgtcccacacagaggcagacgacgacagaaccctgtacaatttgatagtcattcgtaatcagcaggccaaagactcagaggagtggcagaagctcaactatgatatccataccctgcggcaggttcgaagggaagtaagaaacagatggaagtgcatcttagaagatttaggttttcaaaaggaagctgactctttgttgtcagtgactaaactcagcaccatcagtgattctaaaaacacaaggaaagctcgagagatgttgttaaaactggctgaagaaaccaatattttcccaacaagttgggagctctcagagagatatctctttgttgtggaccgtctcattgcacttgatgctgcagaagagttctttaagcttgctcgtcgaacttaccccaagaagcctggggttccatgcctggcagatggccagaaagaactgcactaccttccgtttccaagtccctaaaggagaggctcaggggcagaatgggaattcttccatgaggactcagcagtcaaccaaagttggacaattacatgtagaagagactgcacctgtggggggacctctcatgcagacttgcacatatgcagggagtattgcactgaagatctttgctggaccttcttctcttcagaagataattttcaaaagggagcaatgctgtgaatgcagcttgcttctctctacagattgagaagtccagcttcaaaagttacttgccacttaagcaaggaacttgtcaagagatcatggttcatgttactgaaaagactttaaggatttgtaaggttaatccatagattgctgagaaaaatggaaatatttttatttttacagattttgcacttctgaattcaggttaaaactaacttgtatttagtctgcttagaggactgtgacttgaaaatttttatataccaatgagctttttggtagcgtccacaatgtttaaaatatttcataggcgagatccgtgttctccatttattaatgcattgtagaccaatttaactgctgtgtttcaggaaaattcttcctagtttaataagcaagctaaaagttttattttttatatttagtgcttaatctttgcctcatgttatgtaaaattagcctgcagatattttctctcaattctgtagactctcgcaagataaacattcaaacagtgaaacaaacaataaaataaataaacct

SEQ ID NO: 407172 - DNA, 1896 bp, Homo sapiens
gcatgcgccccaatttgcgctcggggaattaaaagaggggaaaaaaagcccgaagaaaactcacgccccaaacaaaacgcaaggagaggagggcgcgcggcctgcagccctcgcccgcgtccccggccgcggcgtgatgcgcgcggaccagcccgcgacgcccgggctgccgctgtccccgcacctggacgctggcgcggtggccgcgccccagcctcgatcgctcgccgcggcgactcggccccaggcttccggcgccggtgggggccctcgctctccatggggctgagggactggctgagaaccgtgtgctgctgctgccggtgcgagtgcttggaggagcgcgccctgcctgagaaggagcccctcgtcagtgataacaatccatattcctcatttggagcaactctggtgagggatgatgagaagaatttatggagtatgccccatgatgtgtcccacacagaggcagacgacgacagaaccctgtacaatttgatagtcattcgtaatcagcaggccaaagactcagaggagtggcagaagctcaactatgatatccataccctgcggcaggttcgaagggaagtaagaaacagatggaagtgcatcttagaagatttaggttttcaaaaggaagctgactctttgttgtcagtgactaaactcagcaccatcagtgattctaaaaacacaaggaaagctcgagagatgttgttaaaactggctgaagaaaccaatattttcccaacaagttgggagctctcagagagatatctctttgttgtggaccgtctcattgcacttgatgctgcagaagagttctttaagcttgctcgtcgaacttaccccaagaagcctggggttccatgcctggcagatggccagaaagaactgcactaccttccgtttccaagtccctaaaggagaggctcaggggcagaatgggaattcttccatgaggactcagcagtcaaccaaagttggacaattacatgtagaagagagtgagcaaatagagtttgcttagtgaaaaatgatactgaattctacataaatgtaaagtctttaatctgaggaccctgccccatgaattgtgcaggctgcattgaaacgccttggtgatctcatatttaggaagaaagcccttggcattttatctggaatagcatctgtaaactgaagtgtttgacctctgttttcttctctcctctttcatctgtatctgattcgttggctggcagctgcacctgtggggggacctctcatgcagacttgcacatatgcagggagtattgcactgaagatctttgctggaccttcttctcttcagaagataattttcaaaagggagcaatgctgtgaatgcagcttgcttctctctacagattgagaagtccagcttcaaaagttacttgccacttaagcaaggaacttgtcaagagatcatggttcatgttactgaaaagactttaaggatttgtaaggttaatccatagattgctgagaaaaatggaaatatttttatttttacagattttgcacttctgaattcaggttaaaactaacttgtatttagtctgcttagaggactgtgacttgaaaatttttatataccaatgagctttttggtagcgtccacaatgtttaaaatatttcataggcgagatccgtgttctccatttattaatgcattgtagaccaatttaactgctgtgtttcaggaaaattcttcctagtttaataagcaagctaaaagttttattttttatatttagtgcttaatctttgcctcatgttatgtaaaattagcctgcagatattttctctcaattctgtagactctcgcaagataaacattcaaacagtgaaacaaacaataaaataaataaacct

SEQ ID NO: 407173 - DNA, 1206 bp, Homo sapiens
  misc_feature (41)..(41): n is a, c, g, or t
ccttcccccattccccatatattatttacctcgagagatgnagctagtctgcaacgactctcttattttccaccgctacacgagtggcagaagctcaactatgatatccataccctgcggcaggttcgaagggaagtaagaaacagatggaagtgcatcttagaagatttaggttttcaaaaggaagctgactctttgttgtcagtgactaaactcagcaccatcagtgattctaaaaacacaaggaaagctcgagagatgttgttaaaactggctgaagaaaccaatattttcccaacaagttgggagctctcagagagatatctctttgttgtggaccgtctcattgcacttgatgctgcagaagagttctttaagcttgctcgtcgaacttaccccaagaagcctggggttccatgcctggcagatggccagaaagaactgcactaccttccgtttccaagtccctaaaggagaggctcaggggcagaatgggaattcttccatgaggactcagcagtcaaccaaagttggacaattacatgtagaagagactgcacctgtggggggacctctcatgcagacttgcacatatgcagggagtattgcactgaagatctttgctggaccttcttctcttcagaagataattttcaaaagggagcaatgctgtgaatgcagcttgcttctctctacagattgagaagtccagcttcaaaagttacttgccacttaagcaaggaacttgtcaagagatcatggttcatgttactgaaaagactttaaggatttgtaaggttaatccatagattgctgagaaaaatggaaatatttttatttttacagattttgcacttctgaattcaggttaaaactaacttgtatttagtctgcttagaggactgtgacttgaaaatttttatataccaatgagctttttggtagcgtccacaatgtttaaaatatttcataggcgagatccgtgttctccatttattaatgcattgtagaccaatttaactgctgtgtttcaggaaaattcttcctagtttaataagcaagctaaaagttttattttttatatttagtgcttaatctttgcctcatgttatgtaaaattagcctgcagatattttctctcaattctgtagactctcgcaagataaacattcaaacagtgaaacaaacaataaaataaataaacct

SEQ ID NO: 407174 - DNA, 2089 bp, Homo sapiens
  misc_feature (5)..(5): n is a, c, g, or t
  misc_feature (611)..(611): n is a, c, g, or t
tgagncaagatcgcaccactgcactccagcctgggtgacagggagactcgtctcaaaaacaaaataaaacaacaacaacaacaaaaaaatctgaggaggtggacaccattttttggtactgaacgacgtgatgaccgtttaaaaagaaaggtagatgttaagaaggcttccttatacaaaaattcttgtatattgttccttccaattttatttttgttttgatatataaaatcctatgttaaatctctcatcctgaatatcagattactccagaaggagaaagtagcagtctaattattttatttggttgcatggtagtcttagtacaattaaatctcctttgaaagtttctcagttatgtagttatgaatagcactccacaccacggctgtggtagacctggagcggtattgggcccaggtcacagaatgatcacggaaggactttagagatcacctattgagtccctgttttagagaggagcaagcaaaggcccagagaactcactccatttgccgaggtccgacaagtgtgtaggtgagctggagccagaaccctgtctttcggtcttcactctagagctctttccaaacaaacatgctgacctgggngtctgacaattgctgtatgctgatgtttcctatttgaagtccacatgtctttgcaggggaagagaactgtctagtatcattcgttaatgcccactcttcatgtttgccaaagaccaccaatacattgggcagtgattgtgttacactggtttgtttatatgtcggctttcagtgatgccagaaaatcaaaaggaggttaagaaatcccagaggttcacccaggatgggaggctaaacctttgttgtattatgagtcttaattcaagataacataatctttagcctaataaacattaggttgaattttgaaaatgtaaacactaactgatctgtagactgacgtctatttccttggcaatattggccacacccattaaataataacttctcattctcccttcccccagcctctggcaacctctgttatactttctgtctctgaatttgactactttaggtgcctcatataagtggaatcacatgacatttgtccttttgtgatacgatattttctttaaaaagaaaatgaacagaaacagtacatgagagaagtcaggtctgcagccagtgtgcctcttagttccatattcatacaaggccctcttggaagctcagctttggagttggatattatctcagaagatatggcagcttaggaatctggtactctaaaaacagatttacaagcattagacttttttgtatatgtgtgtggtcattttagtcttcctgaaagtggttaagaccaatatttctaggcagactatagttcacatcatccagttctgtaagtcttggattatcgatctcattgtcatggcaaaaaaggacagggattactcaactcattactcctgtgtccagacctctgagcctggtgtgtgtgtgtggctcagtgcctttcccatagtggcccacatccccccagggccctgcatgaagttcctgcaagtctaccccctgcacgtgcagagcaaaaagagcttcctatgggagctgttctccagaaaagacagaaacccgggccctagagaaccagaagatttaaattccagtttcagctctgccattgactaattaggcaactgtaggcagttcactttgctcctttggaccagagatttctcatctacaaaatgaaaaacttggatttaattatctctgaagtcacttcaagcagaaatgtaacaattctttgatttattaaaaaaaataacatcaatgataatgaccaacagctaacacttattacaaggctccaggcactttcgaagtccttaatatttaatgttcactactaccttaggatataagtactgtgatgcagagtcctggacacagagaagtcagcaacttgcctgaggacagcctgcaggacacagcactgtgatttgaacccagagagtctgacttcagcccccagcgctcagctactattaattgaaagggcattgaagagacatgatgtcacaaaaaaa

SEQ ID NO: 407175 - DNA, 2035 bp, Homo sapiens
  misc_feature (5)..(5): n is a, c, g, or t
  misc_feature (611)..(611): n is a, c, g, or t
tgagncaagatcgcaccactgcactccagcctgggtgacagggagactcgtctcaaaaacaaaataaaacaacaacaacaacaaaaaaatctgaggaggtggacaccattttttggtactgaacgacgtgatgaccgtttaaaaagaaaggtagatgttaagaaggcttccttatacaaaaattcttgtatattgttccttccaattttatttttgttttgatatataaaatcctatgttaaatctctcatcctgaatatcagattactccagaaggagaaagtagcagtctaattattttatttggttgcatggtagtcttagtacaattaaatctcctttgaaagtttctcagttatgtagttatgaatagcactccacaccacggctgtggtagacctggagcggtattgggcccaggtcacagaatgatcacggaaggactttagagatcacctattgagtccctgttttagagaggagcaagcaaaggcccagagaactcactccatttgccgaggtccgacaagtgtgtaggtgagctggagccagaaccctgtctttcggtcttcactctagagctctttccaaacaaacatgctgacctgggngtctgacaattgctgtatgctgatgtttcctatttgaagtccacatgtctttgcaggggaagagaactgtctagtatcattcgttaatgcccactcttcatgtttgccaaagaccaccaatacattgggcagtgattgtgttacactggtttgtttatatgtcggctttcagtgatgccagaaaatcaaaaggaggttaagaaatcccagaggttcacccaggatgggaggctaaacctttgttgtattatgagtcttaattcaagataacataatctttagcctaataaacattaggttgaattttgaaaatgtaaacactaactgatctgtagactgacgtctatttccttggcaatattggccacacccattaaataataacttctcattctcccttcccccagcctctggcaacctctgttatactttctgtctctgaatttgactactttaggtgcctcatataagtggaatcacatgacatttgtccttttgtgatacgatattttctttaaaaagaaaatgaacagaaacagtacatgagagaagtcaggtctgcagccagtgtgcctcttagttccatattcatacaaggccctcttggaagctcagctttggagttggatattatctcagaagatatggcagcttaggaatctggtactctaaaaacagatttacaagcattagacttttttgtatatgtgtgtggtcattttagtcttcctgaaagtggttaagaccaatatttctaggcagactatagttcacatcatccagttctgtaagtcttggattatcgatctcattgtcatggcaagtgtgtgtgtgtggctcagtgcctttcccatagtggcccacatccccccagggccctgcatgaagttcctgcaagtctaccccctgcacgtgcagagcaaaaagagcttcctatgggagctgttctccagaaaagacagaaacccgggccctagagaaccagaagatttaaattccagtttcagctctgccattgactaattaggcaactgtaggcagttcactttgctcctttggaccagagatttctcatctacaaaatgaaaaacttggatttaattatctctgaagtcacttcaagcagaaatgtaacaattctttgatttattaaaaaaaataacatcaatgataatgaccaacagctaacacttattacaaggctccaggcactttcgaagtccttaatatttaatgttcactactaccttaggatataagtactgtgatgcagagtcctggacacagagaagtcagcaacttgcctgaggacagcctgcaggacacagcactgtgatttgaacccagagagtctgacttcagcccccagcgctcagctactattaattgaaagggcattgaagagacatgatgtcacaaaaaaa

SEQ ID NO: 407176 - DNA, 462 bp, Homo sapiens
gttgaagcatttgtgtgatagctaatttaaaatgtgtcagataattctgaacatctctgtcattttggtggttgcaagtattgattgtgtttttgcattccatttgagatcttggtttgacaagtgattttttaaattgaaacctggatattttgggtagtatattatgaaactctggatctctggatcgtatttaaagcttcagttttagctagcttactctaatgctattctggcaagagaaatcagggctgccaccttattactgccaggtacaggtagaaattgaattttctactctgcattcattaacatctaaggaaggatatcccttgtgactgctgggcagggatgagagttctgggttcccactacgcttttactgatgctttcttgtctgaaagggataggagtgccttgttaccactgggtgatggtgaaagccctgacccttcactaggc

SEQ ID NO: 407177 - DNA, 408 bp, Homo sapiens
caaaaataacaataacaatccttgaaccactactaaagaaggtaaattgtagggactttatttagaacccactgagacagaattaaatatcaggattttcttattttacattgatgcctttccagacagtagaaataaattcaacagaagtctttagtctggtcactcagagacaatggtagcacattagacagtgtctctaccttagttgtatctcttgaaaacacacttatccaaaacattattaaggttttgaaattcagtctcaatccctaagaaatgttcacttcagcattgtttttcttacttctgtgagagctggaggttaaaactctgtgaatagtgcatggaaatgaagaatgacttttctgtctatcaaaagtatgaaaataggggctgggtatggtg

SEQ ID NO: 407178 - DNA, 446 bp, Homo sapiens
actgaaacatacaggagttgttgttgatggactgtttccttacttccgtttcctatagggacattgctgctgttcttatttgcaatgaaacactgaagaccctgaaacttgggcatgatgaaataggaggcgctggtgtcaaacagttatgtgatgctttgaagcaccctcactgtagatgagagtgtcttgcactgcaaacatagccgatcacccgtgcctgctgtgaagaccttgctgtggcactcactgcctgcaaaacatggaggagcctgaacttcgactgggttggttaccttggatgctgatgtggtggtggtgctgtgtgaggctttgagccacccggactgtgcactgtggatgcttggtgtcactgtagctgaaaggaaacttaaccatcttccctacatcggaagatttaaggctgcacaaatctgcctttgatg

SEQ ID NO: 407179 - DNA, 370 bp, Homo sapiens
agacccactgtcagggagacaagcagtgatggtgacctcaggtgacatttgaaacttcagaagagcacttatatcttttcagccaagagatttggggattcaaggtccaaaccagtccaggcttactcttttgtgctggtgggcagtaggaagcctgcaagtagtactatttaaaagagaaaatgacatgagccaccatgcccggcctctattaaaatcttttatctttttatattaatttttaaatttttatttagagacggggttttaccatgttgccaaggcttgtcttgaactcctgagctcaagcgatccacccgcttcatcctcccaaagtgttaggatcacaggtgtgagcactgtgccctgc

SEQ ID NO: 407180 - DNA, 453 bp, Homo sapiens
aacacagagggaaatttgaaaggtgtagttactggtattatcaccattatcctcattttgtaaatgaggaaacagatacctgagatattttgcccaaggccaattaggattcaaacccagacagtgtgactagagagagattgtcctacataggcttatggtaactattgcctgctcaaagtaatgctcacagtggtctaggggttcccttacagcagtggctaccaaccagccttctgggcaacacacatagaaatcacgtgggacctggtaaaaagtacagaatcctgggttctactccttggagattctcatttagggattaggtcagtgtttcacaagctcaagtatcacctggagggcacccggagagcagactgggaatccacccccagggtgtcaggttctgtaagcttggaacgggtcctgacatttgcaagcttttaattaatg

SEQ ID NO: 407181 - DNA, 359 bp, Homo sapiens
tcaccaaaacaaagaaattcaccaactcaaatttttccttgagctctcagcagcagttaacatagctgaccacacccttcttcctagaatgttttcttctctcatctgtctgcagctgacattcctctaacttgtctggtcttgttctccgtggccttttctggtcccacatcctctgaacctctcaatcttggggtgcttcaaggttgagttctggtctcccagtcctggtctctccctaggtaatcttactcgtttctgaagatttaagttccattctccgatttcaatctcctgcccaattcccaacatttttgcaatagaatgtctaaggagcactcaaaattaacatatctaaa

SEQ ID NO: 407182 - DNA, 975 bp, Homo sapiens
tgccaaatgaaatataatgatatcactgtaaaacccgttccattttgattctgtggaatatatattgactcaattttcttcagacatactccccagccgcagagtcttacatcaggcggtctgtgcttgagctttggggaaggccacagcctgatccggataaggtcaatggggagatcctcaaaagaggctgctgcctgttatgactccggctgatggcaaccatagtagaggtggccacttactatggttgccatatgggaccccaggagctcgtcagataaacatccaaagaaagaaaaataattatttagctgcctggccattctaaaagattttgccaaaaagaaaaaacaaaacaaaaaacaaaacggtgagtatggggagaaaaagggactaatgatctcacagtctctggccatcccaagaaaaggctgctgcctagagataccttcctcctcccccattttctcctatcagtcagatataggaactaaaaatggtgttggcttcaagcccaagagggaaagaaaaggaactttaaaccctatagtccctattcaccaggtcccgcaagtatgccagtcctagattacttaaaatttcaaaacaaacttggccaaacttcaggcaggcccctcagcactgaatgccctggcctacaagtagtgacatcgttacatttattataaacaattggagcattgcctaaaaattgttccttgaggcctggcgcagtggctcacgcctgtaatcccagcactttgggagactaaggcaggtggctcacgaggtcaggagtttgagaccagcctggccaacatagtgaaaccccatctctgctagaaatacaaaaaattagccgggcgtggtggcgggcacctgtaatcccatctactagggaggctgaggcaggagaatcgcctgaacccgggaggcagaggttgcggtgagccgagataacgccactgcact

SEQ ID NO: 407183 - DNA, 878 bp, Homo sapiens
tgagactccaggcatccaccaccacacctccctaattttttgtatttttagtacagacagggttttgccatgttggctacgctggtctcaaactcctgagctcaagtgacccgcctacctcagcctttcaaagtgctgggattacaggtgtgagccactgcacgcagccatgttttcagttttcttgagggagattcctaggagtagaattgctgggctgtgtggtaacttccaggcctccttaaagctttagcctggactgggtagagcatggtttccactgcattctcttagtcacagtgagttgcaggttcaccccagcgtcagtggcgggcgggaagtggggatgacacaaggacctgagtgtccaagggggcttcatggagccctcatgtgaagtccccagcatggaccctgacacatcgtaggtcctcaacaaatgtcactccctgttgtcactctgtttagtactaagaataatgatataaaactgggacagtaaggaaaacacaaactgttgggacctatatctgaatctattagtctgcctaatagaaaagccaccatcaggattttggagattacaagctcactttagattagccatactggagtcagccctggaggctcccagagatcagaacaatcccagcgcttgacaggatggctgggaaacaatacatatgaatgccggaaaatgcagaactaatctaggaaaaagtgtaagaagaaaataaacatcatctgtcattctatctatcagagataactgctgtcaatattttggtttccttccaatattttttctattcactctgtgcataagtatgtatattttaataaaagtataattaagatcacaatgtaaatagtttata

SEQ ID NO: 407184 - DNA, 1738 bp, Homo sapiens
attcagaagcaggaactccttcaggtatagctggatctaggtgctcatccagtgaggtctggcacaccatctccttcaggtatagctggatccaggcacttagagaatgcagtgggaactagatttttctttctgcttcagcctgtcaggcctgctttcctctgtgttagctttactcttaaacaagctattcccaaatatggccactgttagtttcatgctcatatcttacagcttagcaagtacagtggattggccagatatgagtcatgtgcccacccctggagcctacccaaacccaggaaccaagagggaggaactaagagtggttcccatgggaaaattgggaggcctccaatcaaaagaaggaggaaaggaaaagcaatcattgaccctcactccccattatagttcacttcatgcagccaggcaccacctaccataggctgctctgctccactcttgattttgacttttccctttctttcacttttatttttatttacttatctatttatttgagacagagtctcactctgtcacccaggctagagagcactctcggctcactgcagcctccgcctcccaggttcaagtgattcatgtgcttcagcctcctcagtagctgggattacaggcgtgtgctaccacagccggctaatttttatatttttagtagagatagggtttcaccatgttggccaggctggtctcaaactcctggcctcaagtgatcctcccgcctcagcctcccaaagtgctgggattacaggagtgagccaccatgcccggccttacttttattttatttatttttatttatttattttttctttgagacagtcttactgtcgcccaggctggagtacagtggtgtgatctcagctcactgcaacctccacctcccgggttcaagtgattctcctgcctcagcctcccgagtagctgggattacaggcacgtgccaccacacccggctaattttttatttttagtagagatggggttcaccatgttggccaggctggtctcgaactcctgacctcaggtgatccgcccgcctcggtcttccaaagtgctgggattacaggcatgaaccaccgcgcctggccttacttttaattttaattacgtaaatcaggacttcatctttatataatgttcacatattacaaaggtacatttcagcctactccctccctttcttgtcatttttttttaatgaaaaaaagttgttttttttttttatgagagatgaggtcttactgtatggcccaggctggacttgagctcctggtctcaagccatcctcctacctcagcctcccgagtcgctgggcctttctttctatttaaatttatatttacagggttttgttttgtttgttttttaatcatcaatcaaattttaatgtccatttatttatactttgtgtctttcctggagagctgttcacaagagtatggaggccttccttattcagtgtgactggtgcctggtgttcctagtgtggagatactatgatttgttatctacagtgattaaatctagattgtttccagtttttcactattgaaagttgtgacctgaagctggttgtggcaatgtgtgcctgtagtcccagctacatgagaggctaaggtgggaggattgcttgagctcaggaaatcaaggctgcagtgagccatgatcatgccactgcactccagcctgggcaacagagtgagacttcgtatct

SEQ ID NO: 407185 - DNA, 2190 bp, Homo sapiens
  misc_feature (1391)..(1391): n is a, c, g, or t
  misc_feature (1427)..(1427): n is a, c, g, or t
  misc_feature (1657)..(1657): n is a, c, g, or t
ctcataatttatttccatgcatctttgctttggatcctagctttattggtgaacatttatgcctttctatagcaatctgggttttcttagccaattgaaatgggcatttattagatcatttaagcatcatatcaatatagtatatttggcgactttatgataagttcttatgatagatgttcaaaactctgctcaggtgacatttttatggatccacatagtttttgtcatatatgaaaagaaagcattgagttgtgcagatggttaaatgtgcattgagttatttctctggaatttgcatgagaatggaccgacttgtagttgtattaacttttctagtgcccaggttagaaagtttgatctgtgtagtttttaaaggcagcatccaaatcacttatattcagaagaaaatggtaacagatttagaagctgtctatattttccccattatccataatacatattattggcaatatggttttcactctttgttgttaacgtatcaacaatgtgcaatagccactaataatcatttgttaatgcatgcttccaagttctgtatttgaaaatctcagacttcatatatggtaagcgatggagtaatttataacttttatgttgaattcttgctactttaaaaaattgtgcttctccttttttaaagcatatgacttacttaacagctgatagtcagttacctggatttttagtatttttttacatcacaaaaagatttctctgaagtttgcgcaggggtctatttgtaggcagtttccaacttactaataagtaaggttctgaaagttataagttagctgtctggaatagatagtctcatagaaaccaggttgtagatggtgatttggttccttgggcaacctactgaaacccatttactatataatgtggctgaataatattattgatagtgctatagtatttagcaactgtctgtcaagtgattttgaactctcattttgaaatctaactttcatagcattattctgatgaatttttggtagtgcgatttgactttttctacctccattctaccagttcacagtgcattctagcagtggaaatcaaaaaacctattgagatggaatttgggaggaaaggaggacttactgatatccctagctgtagaaagaaagtaactgggtatcctgtctgaaagaggaaggatgtgatgatcttcatggctctgttgtggagatgtatgtctgcttatacatggcaggcaaccaattggaggtttatatattttaaaaataaagaaggggcggccgggcgccgtggctcacgcctgtaatcccaacactttgggaggccgaggcgggcagatcacggggtcaggagatcgagaccatcctggctaacacggtgaaacnctgtctccactaaaaatacaaaaaattagccgggcntggtagcgggcgcctgtaatcccagctactcaggaggcggaggcaggagaatggcgcgaacccgggaggcggagcttgcagtgagccgagatggctccactgcactccagcctgggcgacacagcgagactccgtctcaaaaaaaaaaaaaaaaaaaaaagaaggagcattttataattttacactgattagccaaaggatggagaaacccaatacttctgctcgttcancatgcctcacagtatattccaagtattttcattgtatatcttctacttactctaccaccctatgccccacaatttggactcttggtttttaaatggtagtacaggtaagagtagttaagtttctaataccagaatagttttgaaatatattattgttattatcatcatcatgtagagacagcatctcattctgtcacgtgggctgaagtgcagtggtgtaatcatagcttgcactgcagccttgaactcctaggctcaagggtttcttaagccttagtcttaatatacagctttataagtgtgcattactgttcacagctaactttaaaattgttttttgtaaagacaggatcttactatgttgatcagactggccttgaacccctgggttcaagggatcctcctgccttggtctcccagctactcaggaggcggaggcaggagaatggcgcgaacccgggaggcggagcttgcagtgagccgagatggctccactgcactccagcctgggcgacacagcgagactccgtctc

SEQ ID NO: 407186 - DNA, 242 bp, Homo sapiens
tgccactttttaaaaatctgctttctgaactattttaatagccatttaaaaatacttgctttatacttttttttccagaaaatgtagaaatgtgcattagaaatttttttttcactttttgacagttatgtaaaatgacttacaggttttagttatggccattaactccttttactgtcactcacttcctatagttttatctttttaaatgtatgccctcttttctggcactgtatttaaaa

SEQ ID NO: 407187 - DNA, 651 bp, Homo sapiens
taaaattgaattatcttattatgtcctagtttcaagttctgcatcagattatgaattgcagtttttccttcccacattgtagtttgcatttttcattcccttaatggtgtattttgatgaacagaagttcttaattttaatgtagcacaatttatcattgctcccttaatgatgagtgtttttaattatctatttaagaaatattagctatgttttacaacatttaaaaactcatttgatggtagtatacagacaatgacactctgatgggtaaaaggcagaactctttgttactggcagctccaaatcagagaaggctgccaggcagggccccataggggatttcacccaagaccatggtaacaacaagctggagctacacggggcagcttatggtaagcaggatgtgtttagctaggtcttccaagcttctcacggattgcctaatctgaatgatctccggggctccagtgtatagggactatccttaattgtttcctacctggttctggggcaataggggcaggcgcacagtggccttagtgtgtgagatcaaaatagtagaaatagttgaagtgtggctttaatcagctgctcagaaaggaaaactgattgtcctctagccagggcttcaggactgggtcaagaaac

SEQ ID NO: 407188 - DNA, 565 bp, Homo sapiens
gagatggaatctcactctgtcgcccaggttggagtgcagtggtgcaatctcggctcactgcaacctccacctcctgagttcaagcgactctcctgcctcggcctccctagtaactgggattacaggcacccaccatcacgcctggctaatttttgtatttttagtagagacagggtttcgccatgttggccaggctggtcttgaactcctgaactcaggtgatctgcctgcctcggcctcccaaaatgctaggattacaggcgtgagccaccacacccggtgggttgtctttttattgttgagttgtaagcattctttttaatattctggatactagtttcttatcaggtacaatctttgtgaatatattctcccattccatggattgtcttctcactttctggatactatacagtacaagttttaaattttgatgaagttcacttgatttctgttttttatgttattgcttatgcttttggtgtcatacctaaaaaaccattgtctaaatcaattgcctatgaggtgttacccctatgttttcttctaaagttttatgatttta

SEQ ID NO: 407189 - DNA, 171 bp, Homo sapiens
aaatacaaaaaaaaaaaaaaattagccaagcgtggtggcatgtgcctgtagtcccagctattcgggaggctgaggcaggagaattgcttgaacccaggaggtggaggttgcagtgagccaagactgcatgactgcattccatcctggacaatagagggagactcaatctca

SEQ ID NO: 407190 - DNA, 391 bp, Homo sapiens
acgggacataaccctgtcgtaagttgaggagcatctataaaataattctagtaaagttcacttactctttcgtctgattttataatttagaataattattacctacttaaatattacttgtttttattgactccttgctatgaaagatgatggaattagttatttaactcttaagcagtagggaatttgttacctactgtattcttcaaatttttttccatgtgcataaattacttttaaaattagaggcagaaaaataaaatgaaattaacatttactgagcaccacagtactcttgctactattctagatgtttgggagcaggcatgtaagggaagggtataaaaataggacttatggtacaaaatagggtataaaagtagagtcttcc

SEQ ID NO: 407191 - DNA, 351 bp, Homo sapiens
tggaataatcaagtaaaacagggacatcttacaagacatatcaccctttctcaagccttgccacagtggttgcagaggggagatgcatgtctatcaaagaagaaaatgtaaaaattaccaagttttgacaagaaaatgaatatgaactttctacagcgcaactgttagatcaatagcaactacctaaaagtaattagcctcatgcaatgttaataactatttattttaatttctacatcactaagccatatttgaaaaatatatttgaaatgtaatatagtgaaaatacttgttaaaattaagttataaataatattgtggtaataagcaatgcctaaaccttagcagcat

SEQ ID NO: 407192 - DNA, 568 bp, Homo sapiens
cagcctttcactgtctcccacgtctctgcaccttgtaggatgtcctcatgtctcttcatctctgctcctgtgtcatactcattatatagcaaacattcagcaattattagaatggttgcttctatcgacaggtaggtgggtgaatggatggatgaatgggttagtgaatgttctactattatctctcagacagctgtttcattttccaaacggctgtctgagataaataatattgtaatctccaaggacagaagaaaaaactaaggttcaagattaaaaaaaaaacacaaacaaacaaaaaatgtcatctgactcgagacttgacacaatccagctgttgctggccctctgctctaggccacagatatggctggacagagaaaggagaactccagtgaccttgcagtacatccacaaaaaatgagcacttttgtcctggggcagtggaacattcactgcagtgtatgtgtgcctatgtgtatgtgtgtgagagtggctgaaagaccctgatttgatatttttgataaaatacacctgggttagcatcctagatctaccttatttaaaa

SEQ ID NO: 407193 - DNA, 385 bp, Homo sapiens
gggcttcttaaactctaggtagtgaaggactagcttgttggtttgtttctaacttccatctgtcctgaatgaataattttgataatacaataaaaaatatattactagagaaataatcacacatttgaatgttgcagcaatgtcaaactgccataaacatttctaattgcttattctcaatattttttactgacctcgttgcaggtcagtagtggttcacagaccagcacaggtctgccaaccacactctgagaaactgttctaaggatcaccattcctaagagaaattccctgaataaagagttctttgatcaaataagtttgggagagcctgtaagctagaaagtgttgatgctcagtaacatattaaagctctgaaaagtcc

SEQ ID NO: 407194 - DNA, 442 bp, Homo sapiens
cttcagggtgattgggaacaaggtaagatttatgaatttcacaagcatgggcccattggtgtgctacacttgttgtgaaccaagttctctaatcaggagcaatgctgtgtggaataccatgacagagaataaagcattttcaaagtacacagaaggtttttgtggaaacactgtgcacatggaaggatcagatgtcaattccagtgagaaaagaagtgttgccctttccataatggaagtgttccaaataatcaatttttgtctcaaggaagctaggtagttcccccaaggaattatgccataccaggggctcagtgttagtctctgtgttggcaagttggactctctcagtggtggcagtagccagatctagtgggtagaaattcatgttgctgagcctatgaataacctccattcctttttttttttttttgagacagag

SEQ ID NO: 407195 - DNA, 277 bp, Homo sapiens
aagaaagattgggagattaacaaaaagagttacagtggttcaggtgagaggtgacctgaaagaagaatattatggtcaggatagagggaacaggtgggccctagcaatgcctgtggagttagataactggtaggatggggacattgcatatgactggaggttgcagtgggggaaggttaatgggaaggtcaaaggcgaactggaatcactgagagttttcttatatgtcagtctctgtacctactacctggtgacactgagccatcttgactaactc

SEQ ID NO: 407196 - DNA, 804 bp, Homo sapiens
gtgtcatagtgttcttttggagtattttggaagaccagaaatgtctcagaagggatataattatttatatcaaatcttaaagtattccttcttcaagtggacattctaactatttttctcatttatctttttgggttttgtcatattccacagagaataaaattataacttttctgatttatatgcttttcctactgtttcaaatttagcaggtatttcagggtagactgaaattacttatacgttgttttggaaatttctgtagctgccttacattttagtaggcactttacttgcttatgagcagattacttcaagaaagcagaagcttagattcccagagatgagcatttattttccctttgtgtgtaccaacactctaagaacaatacaagagcccccacttgtgcttctgaaaaacaagtggaaaaacttgtgggttgcatggaaagaacttcacaagtaaattacttgaggaatccacaaagcagtattgtgggtggcattgtcagaagagtgacagaatggtaatttaccagttattaccaatgtctagcaaaatttacaaactcttgcattttagacctctagacctttgttacctgcattttcttagcccaaaatatcttcattccccttctctgcctggctacagcctatgtggtcttctatgtctcagcttaagaattactggctgcagaaagccaccctcaacaccctcttctattcttgcatcaccctccatgcctcctactacagcatttatcacactgcattacagttgtcattgtatgtggctcatgt

SEQ ID NO: 407197 - DNA, 378 bp, Homo sapiens
taagagatggggtcttgctatgttgccaaggctgatctccaactcctggagctcaagcagtcctactgtttcaacctccagagtagcagggactacaggactgtgtctggcttttgctcattttttagttggtgatatggtttggctgtgtccctacccaaatcttatcttgaactgtagctcccaaaattcccacatgttgtgagagggacctggtgggaggtaatccaattatggggacgggtctttcctgtgacaatgaataagtctcatgagatctgatggttttatgaaggagagtttccctgcacaagttctcttctctcatctgctgccatgtgagacgtgcctttcaccttccaccatgataatgaggcc

SEQ ID NO: 407198 - DNA, 415 bp, Homo sapiens
ccaggatttcagcatcacaaactgggcaagttaagagaagggacagatacattttaagttttatgttaaagatttttttctaactgaagcaagatgaacccatttaggaggtctgtgataacaagcagaacactctggacaaatgtccctagtattttaagaagggctcaaatataaagcctgtgacatcacaaacaaaactttttcctgtgatctgagctatactctcaggtgctcacctcattctcctgccatcagggtgctcgatttacttacaatccactagaccaacctcatgtataaaatgaccatgagctccaggcatggtggctcgtgcctgtaatcccagcactttaggaggcctgggcaggtggatttgcttgtggagttcaagggcagcctgggcaccccatct

SEQ ID NO: 407199 - DNA, 739 bp, Homo sapiens
gccatgtgacaacagaggcggaaactggaggatgcactttggagatgagggaaagaactacaaaccaaggagtataggcagccactagaagctggaaaagatggaaatccattcttccttccgaatctctagaaagaatcagcctgccaacaacttgactttagctcagtgaaactgattttgtacttctggcttccagaactgtaagataatatatttgtattatttttaaccactcagtttgtgataacttgttacagcagcaatcaaaaatgaatgcagagagtcagaaacttttaaaaggtgaattaatgagtattgaagtcaaactggactatacgattctgctgactcggagtcaagttctctgtccatcacatcacatgatcaggatgtcagtcattgtggtcttgacccctctgatgaggtttacttgttgtgacaaggcccaaaggaagagggatttgggtagaatttgcttgacctatttctgtgtttttgtaagtttttgttttgttctgttttgtttttaaacaactggtttctttctgtgaaggaacatttattttttcaccccccagatgcctttctttgcaacttttgctgtcatttcatttggttgatttctatttcactcttgattcagtgttgtttctttcacaataagataaataaaatgatcagaaatcgagcaagactttccttttgttagttctttcttttgatgtccaaagaaaaa

SEQ ID NO: 407200 - DNA, 654 bp, Homo sapiens
tagtagagacagggtttcatcatgttggccaggatggtctcgatctcttgaccttgtgatatgcctgccttggcctcccaaagtgctgcaattacaggcgtgagccactgcacctggcctagctatattatttaacactaacaaattatttgtgaaacatctcacaagtgagtgaaataaaccaagtctgtctatgtatgctggggttgagaacctccttattataccaagctctctcctagctaagaaatcatgcccatcccagaggtctggccgtaataccatgagtggtgccaagggtttgctccttgaaaaggaaaagggtaaaaccccaagctctgtttcattcaagcccaaccaggtgaggcaaagaaagtgggagatcagccagttgctctaaactgtttaactctctcattttgtagcaaaagaaagatgagctgagagaatataagggacttacctagagtcacacatctgcatagcctaaaggacatcctgacaaacccaaaagtagatctttctgtgcccattgaatggcaatctcccaatattactctgtcctttcctcttttgccctatctcccaccaaaagtacatggtttctcttgtctgaatgtatagtagtgcagtcgctgttttcaatatctagaa

SEQ ID NO: 407201 - DNA, 408 bp, Homo sapiens
ctactgacattttaacctcactgtgtaccaaagtcaaactcatcatcttttctccaaagtcagtttctcttccaatttttccaacctagttcacaacactacaatttattcaatcctcaatcctgctgatggagtgacatctgtgaagagacacaaaggagatgagaaagtaagccctatgcgaatttgagaagagaacatttagggcagaaggaacattaaatgcaagacccagaggtagaaaatgcttggactatttgaggaacaacaacatggccagtgtggttggagtagaatgagttagggagaggttattaggtgatgaatttaaagaggctgcagaggcttgagatcattcaggggctttggcttttattctgactaagatgggaatctattgaagggttt

SEQ ID NO: 407202 - DNA, 441 bp, Homo sapiens
tgagactcaaaatcaagactttgtgcctgtgtacctcccatgatggtgtatatacttaacatttccttccctgtgaaattattatttttaacatatctgatagactgttgagaagttaatgtaataggaattgtctttctgaataccaaaattaaattcaattttagaccccaaatcttgtttgcagagtcctctgaaagttagactagggcccctgccttctgcagacaaccctcccagctcttcttttaccacttccatgatagacacttggacacttctaaagggctagagggtggttaagttaaactgcccacttgtgtcattttgagtaatgcagaataagttcctggtctcatttttttgtacactttttttttttttttttttgagacagagtcttcctctgtcgcccaggctggagtacagtggcatgatctc

SEQ ID NO: 407203 - DNA, 771 bp, Homo sapiens
tgaatctcagaaaaatgaagttacttatataatgtaaagtttcattgatagaatgataaagacctcttgtctaagtcttatctaacctcttttatttcttttttaatttttactttttctaggtcataagtcatgtcttggtaaagaaggagagttaaaagtcaataagcattacaaaaattgccattttgacatcagcaaatcaaatttctctatctaattaaaggaaaaccctttctcttatttctcttctcttttcctcttctcttcctcctcctctatttcccctctccttatccccttgtctccctcttctgctctttctctacttcctctttctctttttttgatatatttctatcatatattttcagaaataattcagtggcatctcatgtagatgtaccactttcttattgcaactcagagtgcaattgtgatgaaagtcagtgggaaccagtctgtgggaacaatggaataacttacctgtcaccttgtctagcaggatgcaaatcctcaagtggtattaaaaagcatacaaacagaaattactcagcacacttgggtgaatgcccaagagataatacttgtacaaggaaatttttcatctatgttgcaattcaagtcataaactctttgttctctgcaacaggaggtaccacatttatcttgttgactgtgaagattggtcaccctgaatggaagcacttgcaagggtttccgccaatgggtttagaccctggggggattcagccccaatattttggggct

SEQ ID NO: 407204 - DNA, 2713 bp, Homo sapiens
ggagactttaacatcagaaaaaggatggacttgttgcagttgctgtagcattcaaagtcaaggtgatcatttcaaaccaagcatcagcaacaattaaaaatattcacttggtatctgtagtttaataatggaccaacatcaacatttgaataaaacagcagagtcagcatcttcagagaaaaagaaaacaagacgctgcaatggattcaagatgttcttggcagccctgtcattcagctatattgctaaagcactaggtggaatcattatgaaaatttccatcactcaaatagaaaggagatttgacatatcctcttctcttgctggtttaattgatggaagctttgaaattggaaatttgcttgtgattgtatttgtaagttactttggatctaaactacacagaccgaagttaattggaattggttgtctccttatgggaactggaagtattttgacatctttaccacatttcttcatgggatattataggtattctaaagaaacccatattaatccatcagaaaattcaacatcaagtttatcaacctgtttaattaatcaaaccttatcattcaatggaacatcacctgagatagtagaaaaagattgtgtaaaggaatctgggtcacacatgtggatctatgtcttcatggggaatatgcttcgtggcataggggaaacccccatagtaccattggggatttcatacattgatgattttgcaaaagaaggacattcttccttgtatttaggtagtttgaatgcaataggaatgattggtccagtcattggctttgcactgggatctctgtttgctaaaatgtacgtggatattggatatgtagatctgagcactatcagaataactcctaaggactctcgttgggttggagcttggtggcttggtttccttgtgtctggactattttccattatttcttccataccattttttttcttgccgaaaaatccaaataaaccacaaaaagaaagaaaaatttcactatcattgcatgtgctgaaaacaaatgatgatagaaatcaaacagctaatttgaccaaccaaggaaaaaatgttaccaaaaatgtgactggttttttccagtctttgaaaagcatccttaccaatcccctgtatgttatatttctgcttttgacattgttacaagtaagcagctttattggttcttttacttacgtctttaaatatatggagcaacagtacggtcagtctgcatctcatgctaactttttgttgggaatcataaccattcctacggttgcaactggaatgtttttaggaggatttatcattaaaaaattcaaattgtctttagttggaattgccaaattttcatttcttacttcgatgatatccttcttgtttcaacttctatatttccctctaatctgcgaaagcaaatcagttgccggcctaaccttgacctatgatggaaataattcagtggcatctcatgtagatgtaccactttcttattgcaactcagagtgcaattgtgatgaaagtcagtgggaaccagtctgtgggaacaatggaataacttacctgtcaccttgtctagcaggatgcaaatcctcaagtggtattaaaaagcatacagtgttttataactgtagttgtgtggaagtaactggtctccagaacagaaattactcagcacacttgggtgaatgcccaagagataatacttgtacaaggaaatttttcatctatgttgcaattcaagtcataaactctttgttctctgcaacaggaggtaccacatttatcttgttgactgtgaagattgttcaacctgaattgaaagcacttgcaatgggtttccagtcaatggttataagaacactaggaggaattctagctccaatatattttggggctctgattgataaaacatgtatgaagtggtccaccaacagctgtggagcacaaggagcttgtaggatatataattccgtattttttggaagggtctacttgggcttatctatagctttaagattcccagcacttgttttatatattgttttcatttttgctatgaagaaaaaatttcaaggaaaagataccaaggcatcggacaatgaaagaaaagtaatggatgaagcaaacttagaattcttaaataatggtgaacattttgtaccttctgctggaacagatagtaaaacatgtaatttggacatgcaagacaatgctgctgccaactaacattgcattgattcattaagatgttatttttgaggtgttcctggtctttcactgacaattccaacattctttacttacagtggaccaatggataagtctatgcatctataataaactataaaaaatgggagtacccatggttaggatatagctatgcctttatggttaagattagaatatatgatccataaaaatttaaagtgagaggcatggttagtgtgtgatacaataaaaagtaattgtttggtagttgtaactgctaataaaaccagtgactagaatataagggaggtaaaaaggacaagatagattaatagcctaaataaagagaaaagcctgatgcctttaaaaaaaatgaaacactttggatgtattacttaggccaaaatctggcctggatttatgctataatatatattttcatgttaagttgtatatttttcagaaattataaatattattaatttaaaatttgaa

SEQ ID NO: 407205 - DNA, 2659 bp, Homo sapiens
ggagactttaacatcagaaaaaggatggacttgttgcagttgctgtagcattcaaagtcaaggtgatcatttcaaaccaagcatcagcaacaattaaaaatattcacttggtatctgtagtttaataatggaccaacatcaacatttgaataaaacagcagagtcagcatcttcagagaaaaagaaaacaagacgctgcaatggattcaagatgttcttggcagccctgtcattcagctatattgctaaagcactaggtggaatcattatgaaaatttccatcactcaaatagaaaggagatttgacatatcctcttctcttgctggtttaattgatggaagctttgaaattggaaatttgcttgtgattgtatttgtaagttactttggatctaaactacacagaccgaagttaattggaattggttgtctccttatgggaactggaagtattttgacatctttaccacatttcttcatgggatattataggtattctaaagaaacccatattaatccatcagaaaattcaacatcaagtttatcaacctgtttaattaatcaaaccttatcattcaatggaacatcacctgagatagtagaaaaagattgtgtaaaggaatctgggtcacacatgtggatctatgtcttcatggggaatatgcttcgtggcataggggaaacccccatagtaccattggggatttcatacattgatgattttgcaaaagaaggacattcttccttgtatttaggtagtttgaatgcaataggaatgattggtccagtcattggctttgcactgggatctctgtttgctaaaatgtacgtggatattggatatgtagatctgagcactatcagaataactcctaaggactctcgttgggttggagcttggtggcttggtttccttgtgtctggactattttccattatttcttccataccattttttttcttgccgaaaaatccaaataaaccacaaaaagaaagaaaaatttcactatcattgcatgtgctgaaaacaaatgatgatagaaatcaaacagctaatttgaccaaccaaggaaaaaatgttaccaaaaatgtgactggttttttccagtctttgaaaagcatccttaccaatcccctgtatgttatatttctgcttttgacattgttacaagtaagcagctttattggttcttttacttacgtctttaaatatatggagcaacagtacggtcagtctgcatctcatgctaactttttgttgggaatcataaccattcctacggttgcaactggaatgtttttaggaggatttatcattaaaaaattcaaattgtctttagttggaattgccaaattttcatttcttacttcgatgatatccttcttgtttcaacttctatatttccctctaatctgcgaaagcaaatcagttgccggcctaaccttgacctatgatggaaataattcagtggcatctcatgtagatgtaccactttcttattgcaactcagagtgcaattgtgatgaaagtcagtgggaaccagtctgtgggaacaatggaataacttacctgtcaccttgtctagcaggatgcaaatcctcaagtggtattaaaaagcatacagtgttttataactgtagttgtgtggaagtaactggtctccagaacagaaattactcagcacacttgggtgaatgcccaagagataatacttgtacaaggaaatttttcatctatgttgcaattcaagtcataaactctttgttctctgcaacaggaggtaccacatttatcttgttgactgtgaagattgttcaacctgaattgaaagcacttgcaatgggtttccagtcaatggttataagaacactaggaggaattctagctccaatatattttggggctctgattgataaaacatgtatgaagtggtccaccaacagctgtggagcacaaggagcttgtaggatatataattccgtattttttggaagggtctacttgggcttatctatagctttaagattcccagcacttgttttatatattgttttcatttttgctatgaagaaaaaatttcaaggaaaagataccaaggcatcggacaatgaaagaaaagtaatggatgaagcaaacttagaattcttaaataatggtgaacattttgtaccttctgctggaacagatagtaaaacatgtaatttggacatgcaagacaatgctgctgccaactaacattgcattgattcattaagatgttatttttgaggtgttcctggtctttcactgacaattccaacattctttacttacagtggaccaatggataagtctatgcatctataataaactataaaaaatgggagtacccatggttaggatatagctatgcctttatggttaagattagaatatatgatccataaaaatttaaagtgagaggcatggttagtgtgtgatacaataaaaagtaattgtttggtagttgtaactgctaataaaaccagtgactagaatataagggaggtaaaaaggacaagatagattaatagcctaaataaagagaaaagcctgatgcctttaaaaaaaatgaaacactttggatgttaagttgtatatttttcagaaattataaatattattaatttaaaatttgaa

SEQ ID NO: 407206 - DNA, 2671 bp, Homo sapiens
ggagactttaacatcagaaaaaggatggacttgttgcagttgctgtagcattcaaagtcaaggtgatcatttcaaaccaagcatcagcaacaattaaaaatattcacttggtatctgtagtttaataatggaccaacatcaacatttgaataaaacagcagagtcagcatcttcagagaaaaagaaaacaagacgctgcaatggattcaagatgttcttggcagccctgtcattcagctatattgctaaagcactaggtggaatcattatgaaaatttccatcactcaaatagaaaggagatttgacatatcctcttctcttgctggtttaattgatggaagctttgaaattggaaatttgcttgtgattgtatttgtaagttactttggatctaaactacacagaccgaagttaattggaattggttgtctccttatgggaactggaagtattttgacatctttaccacatttcttcatgggatattataggtattctaaagaaacccatattaatccatcagaaaattcaacatcaagtttatcaacctgtttaattaatcaaaccttatcattcaatggaacatcacctgagatagtagaaaaagattgtgtaaaggaatctgggtcacacatgtggatctatgtcttcatggggaatatgcttcgtggcataggggaaacccccatagtaccattggggatttcatacattgatgattttgcaaaagaaggacattcttccttgtatttaggtagtttgaatgcaataggaatgattggtccagtcattggctttgcactgggatctctgtttgctaaaatgtacgtggatattggatatgtagatctgagcactatcagaataactcctaaggactctcgttgggttggagcttggtggcttggtttccttgtgtctggactattttccattatttcttccataccattttttttcttgccgaaaaatccaaataaaccacaaaaagaaagaaaaatttcactatcattgcatgtgctgaaaacaaatgatgatagaaatcaaacagctaatttgaccaaccaaggaaaaaatgttaccaaaaatgtgactggttttttccagtctttgaaaagcatccttaccaatcccctgtatgttatatttctgcttttgacattgttacaagtaagcagctttattggttcttttacttacgtctttaaatatatggagcaacagtacggtcagtctgcatctcatgctaactttttgttgggaatcataaccattcctacggttgcaactggaatgtttttaggaggatttatcattaaaaaattcaaattgtctttagttggaattgccaaattttcatttcttacttcgatgatatccttcttgtttcaacttctatatttccctctaatctgcgaaagcaaatcagttgccggcctaaccttgacctatgatggaaataattcagtggcatctcatgtagatgtaccactttcttattgcaactcagagtgcaattgtgatgaaagtcagtgggaaccagtctgtgggaacaatggaataacttacctgtcaccttgtctagcaggatgcaaatcctcaagtggtattaaaaagcatacaaacagaaattactcagcacacttgggtgaatgcccaagagataatacttgtacaaggaaatttttcatctatgttgcaattcaagtcataaactctttgttctctgcaacaggaggtaccacatttatcttgttgactgtgaagattgttcaacctgaattgaaagcacttgcaatgggtttccagtcaatggttataagaacactaggaggaattctagctccaatatattttggggctctgattgataaaacatgtatgaagtggtccaccaacagctgtggagcacaaggagcttgtaggatatataattccgtattttttggaagggtctacttgggcttatctatagctttaagattcccagcacttgttttatatattgttttcatttttgctatgaagaaaaaatttcaaggaaaagataccaaggcatcggacaatgaaagaaaagtaatggatgaagcaaacttagaattcttaaataatggtgaacattttgtaccttctgctggaacagatagtaaaacatgtaatttggacatgcaagacaatgctgctgccaactaacattgcattgattcattaagatgttatttttgaggtgttcctggtctttcactgacaattccaacattctttacttacagtggaccaatggataagtctatgcatctataataaactataaaaaatgggagtacccatggttaggatatagctatgcctttatggttaagattagaatatatgatccataaaaatttaaagtgagaggcatggttagtgtgtgatacaataaaaagtaattgtttggtagttgtaactgctaataaaaccagtgactagaatataagggaggtaaaaaggacaagatagattaatagcctaaataaagagaaaagcctgatgcctttaaaaaaaatgaaacactttggatgtattacttaggccaaaatctggcctggatttatgctataatatatattttcatgttaagttgtatatttttcagaaattataaatattattaatttaaaatttgaa

SEQ ID NO: 407207 - DNA, 2662 bp, Homo sapiens
ttgaaaagtcaagcactttgtgtgtgtgtgtgtgtgtgtgtgtgtgtgtgtgtgtacatgaaagaaaatcagacagattgaccatctttgatggtaactcaaagggataaatagacatagttaacagataaaaaaacaacaggtgaaaccatgatatttcatgtcttgaccagattataagcactcttaggataaaagcaaggtgataacccactttgttcatggtgtattgaagtatctttcttagtggacactcccatttcaccccctctcatcacctgttctgaaatacatgctgggaagttgacaaacaagattctggtaatttggagaagacagcggttcaaataaaggagaaaatttctctgtatttctgggaaaactgaaaatattcagtagataagcaaaatgttcaatttcatgttgctcttatagttataggtattctaaagaaacccatattaatccatcagaaaattcaacatcaagtttatcaacctgtttaattaatcaaaccttatcattcaatggaacatcacctgagatagtagaaaaagattgtgtaaaggaatctgggtcacacatgtggatctatgtcttcatggggaatatgcttcgtggcataggggaaacccccatagtaccattggggatttcatacattgatgattttgcaaaagaaggacattcttccttgtatttaggtagtttgaatgcaataggaatgattggtccagtcattggctttgcactgggatctctgtttgctaaaatgtacgtggatattggatatgtagatctgagcactatcagaataactcctaaggactctcgttgggttggagcttggtggcttggtttccttgtgtctggactattttccattatttcttccataccattttttttcttgccgaaaaatccaaataaaccacaaaaagaaagaaaaatttcactatcattgcatgtgctgaaaacaaatgatgatagaaatcaaacagctaatttgaccaaccaaggaaaaaatgttaccaaaaatgtgactggttttttccagtctttgaaaagcatccttaccaatcccctgtatgttatatttctgcttttgacattgttacaagtaagcagctttattggttcttttacttacgtctttaaatatatggagcaacagtacggtcagtctgcatctcatgctaactttttgttgggaatcataaccattcctacggttgcaactggaatgtttttaggaggatttatcattaaaaaattcaaattgtctttagttggaattgccaaattttcatttcttacttcgatgatatccttcttgtttcaacttctatatttccctctaatctgcgaaagcaaatcagttgccggcctaaccttgacctatgatggaaataattcagtggcatctcatgtagatgtaccactttcttattgcaactcagagtgcaattgtgatgaaagtcagtgggaaccagtctgtgggaacaatggaataacttacctgtcaccttgtctagcaggatgcaaatcctcaagtggtattaaaaagcatacagtgttttataactgtagttgtgtggaagtaactggtctccagaacagaaattactcagcacacttgggtgaatgcccaagagataatacttgtacaaggaaatttttcatctatgttgcaattcaagtcataaactctttgttctctgcaacaggaggtaccacatttatcttgttgactgtgaagattgttcaacctgaattgaaagcacttgcaatgggtttccagtcaatggttataagaacactaggaggaattctagctccaatatattttggggctctgattgataaaacatgtatgaagtggtccaccaacagctgtggagcacaaggagcttgtaggatatataattccgtattttttggaagggtctacttgggcttatctatagctttaagattcccagcacttgttttatatattgttttcatttttgctatgaagaaaaaatttcaaggaaaagataccaaggcatcggacaatgaaagaaaagtaatggatgaagcaaacttagaattcttaaataatggtgaacattttgtaccttctgctggaacagatagtaaaacatgtaatttggacatgcaagacaatgctgctgccaactaacattgcattgattcattaagatgttatttttgaggtgttcctggtctttcactgacaattccaacattctttacttacagtggaccaatggataagtctatgcatctataataaactataaaaaatgggagtacccatggttaggatatagctatgcctttatggttaagattagaatatatgatccataaaaatttaaagtgagaggcatggttagtgtgtgatacaataaaaagtaattgtttggtagttgtaactgctaataaaaccagtgactagaatataagggaggtaaaaaggacaagatagattaatagcctaaataaagagaaaagcctgatgcctttaaaaaaaatgaaacactttggatgtattacttaggccaaaatctggcctggatttatgctataatatatattttcatgttaagttgtatatttttcagaaattataaatattattaatttaaaatttgaa

SEQ ID NO: 407208 - DNA, 2728 bp, Homo sapiens
agcggacttcaggccatctcggcgtatacgtgcaagtcacaggggatgggatggcttggcttgggctcagagacctgacagtggcaatgtatggccacgttactgaatctacatgttgcaagagaaaaactagcagatgttcttggcagccctgtcattcagctatattgctaaagcactaggtggaatcattatgaaaatttccatcactcaaatagaaaggagatttgacatatcctcttctcttgctggtttaattgatggaagctttgaaattggaaatttgcttgtgattgtatttgtaagttactttggatctaaactacacagaccgaagttaattggaattggttgtctccttatgggaactggaagtattttgacatctttaccacatttcttcatgggataattttgattatcctcagtaaggcttcacaacttcacctgctgctgtacaggttttcccatcagcatttcactgaagctgctctttctaagttataggtattctaaagaaacccatattaatccatcagaaaattcaacatcaagtttatcaacctgtttaattaatcaaaccttatcattcaatggaacatcacctgagatagtagaaaaagattgtgtaaaggaatctgggtcacacatgtggatctatgtcttcatggggaatatgcttcgtggcataggggaaacccccatagtaccattggggatttcatacattgatgattttgcaaaagaaggacattcttccttgtatttaggtagtttgaatgcaataggaatgattggtccagtcattggctttgcactgggatctctgtttgctaaaatgtacgtggatattggatatgtagatctgagcactatcagaataactcctaaggactctcgttgggttggagcttggtggcttggtttccttgtgtctggactattttccattatttcttccataccattttttttcttgccgaaaaatccaaataaaccacaaaaagaaagaaaaatttcactatcattgcatgtgctgaaaacaaatgatgatagaaatcaaacagctaatttgaccaaccaaggaaaaaatgttaccaaaaatgtgactggttttttccagtctttgaaaagcatccttaccaatcccctgtatgttatatttctgcttttgacattgttacaagtaagcagctttattggttcttttacttacgtctttaaatatatggagcaacagtacggtcagtctgcatctcatgctaactttttgttgggaatcataaccattcctacggttgcaactggaatgtttttaggaggatttatcattaaaaaattcaaattgtctttagttggaattgccaaattttcatttcttacttcgatgatatccttcttgtttcaacttctatatttccctctaatctgcgaaagcaaatcagttgccggcctaaccttgacctatgatggaaataattcagtggcatctcatgtagatgtaccactttcttattgcaactcagagtgcaattgtgatgaaagtcagtgggaaccagtctgtgggaacaatggaataacttacctgtcaccttgtctagcaggatgcaaatcctcaagtggtattaaaaagcatacagtgttttataactgtagttgtgtggaagtaactggtctccagaacagaaattactcagcacacttgggtgaatgcccaagagataatacttgtacaaggaaatttttcatctatgttgcaattcaagtcataaactctttgttctctgcaacaggaggtaccacatttatcttgttgactgtgaagattgttcaacctgaattgaaagcacttgcaatgggtttccagtcaatggttataagaacactaggaggaattctagctccaatatattttggggctctgattgataaaacatgtatgaagtggtccaccaacagctgtggagcacaaggagcttgtaggatatataattccgtattttttggaagggtctacttgggcttatctatagctttaagattcccagcacttgttttatatattgttttcatttttgctatgaagaaaaaatttcaaggaaaagataccaaggcatcggacaatgaaagaaaagtaatggatgaagcaaacttagaattcttaaataatggtgaacattttgtaccttctgctggaacagatagtaaaacatgtaatttggacatgcaagacaatgctgctgccaactaacattgcattgattcattaagatgttatttttgaggtgttcctggtctttcactgacaattccaacattctttacttacagtggaccaatggataagtctatgcatctataataaactataaaaaatgggagtacccatggttaggatatagctatgcctttatggttaagattagaatatatgatccataaaaatttaaagtgagaggcatggttagtgtgtgatacaataaaaagtaattgtttggtagttgtaactgctaataaaaccagtgactagaatataagggaggtaaaaaggacaagatagattaatagcctaaataaagagaaaagcctgatgcctttaaaaaaaatgaaacactttggatgtattacttaggccaaaatctggcctggatttatgctataatatatattttcatgttaagttgtatatttttcagaaattataaatattattaatttaaaatttgaa

SEQ ID NO: 407209 - DNA, 2638 bp, Homo sapiens
agcggacttcaggccatctcggcgtatacgtgcaagtcacaggggatgggatggcttggcttgggctcagagacctgacagtggcaatgtatggccacgttactgaatctacatgttgcaagagaaaaactagcagatgttcttggcagccctgtcattcagctatattgctaaagcactaggtggaatcattatgaaaatttccatcactcaaatagaaaggagatttgacatatcctcttctcttgctggtttaattgatggaagctttgaaattggaaatttgcttgtgattgtatttgtaagttactttggatctaaactacacagaccgaagttaattggaattggttgtctccttatgggaactggaagtattttgacatctttaccacatttcttcatgggatattataggtattctaaagaaacccatattaatccatcagaaaattcaacatcaagtttatcaacctgtttaattaatcaaaccttatcattcaatggaacatcacctgagatagtagaaaaagattgtgtaaaggaatctgggtcacacatgtggatctatgtcttcatggggaatatgcttcgtggcataggggaaacccccatagtaccattggggatttcatacattgatgattttgcaaaagaaggacattcttccttgtatttaggtagtttgaatgcaataggaatgattggtccagtcattggctttgcactgggatctctgtttgctaaaatgtacgtggatattggatatgtagatctgagcactatcagaataactcctaaggactctcgttgggttggagcttggtggcttggtttccttgtgtctggactattttccattatttcttccataccattttttttcttgccgaaaaatccaaataaaccacaaaaagaaagaaaaatttcactatcattgcatgtgctgaaaacaaatgatgatagaaatcaaacagctaatttgaccaaccaaggaaaaaatgttaccaaaaatgtgactggttttttccagtctttgaaaagcatccttaccaatcccctgtatgttatatttctgcttttgacattgttacaagtaagcagctttattggttcttttacttacgtctttaaatatatggagcaacagtacggtcagtctgcatctcatgctaactttttgttgggaatcataaccattcctacggttgcaactggaatgtttttaggaggatttatcattaaaaaattcaaattgtctttagttggaattgccaaattttcatttcttacttcgatgatatccttcttgtttcaacttctatatttccctctaatctgcgaaagcaaatcagttgccggcctaaccttgacctatgatggaaataattcagtggcatctcatgtagatgtaccactttcttattgcaactcagagtgcaattgtgatgaaagtcagtgggaaccagtctgtgggaacaatggaataacttacctgtcaccttgtctagcaggatgcaaatcctcaagtggtattaaaaagcatacagtgttttataactgtagttgtgtggaagtaactggtctccagaacagaaattactcagcacacttgggtgaatgcccaagagataatacttgtacaaggaaatttttcatctatgttgcaattcaagtcataaactctttgttctctgcaacaggaggtaccacatttatcttgttgactgtgaagattgttcaacctgaattgaaagcacttgcaatgggtttccagtcaatggttataagaacactaggaggaattctagctccaatatattttggggctctgattgataaaacatgtatgaagtggtccaccaacagctgtggagcacaaggagcttgtaggatatataattccgtattttttggaagggtctacttgggcttatctatagctttaagattcccagcacttgttttatatattgttttcatttttgctatgaagaaaaaatttcaaggaaaagataccaaggcatcggacaatgaaagaaaagtaatggatgaagcaaacttagaattcttaaataatggtgaacattttgtaccttctgctggaacagatagtaaaacatgtaatttggacatgcaagacaatgctgctgccaactaacattgcattgattcattaagatgttatttttgaggtgttcctggtctttcactgacaattccaacattctttacttacagtggaccaatggataagtctatgcatctataataaactataaaaaatgggagtacccatggttaggatatagctatgcctttatggttaagattagaatatatgatccataaaaatttaaagtgagaggcatggttagtgtgtgatacaataaaaagtaattgtttggtagttgtaactgctaataaaaccagtgactagaatataagggaggtaaaaaggacaagatagattaatagcctaaataaagagaaaagcctgatgcctttaaaaaaaatgaaacactttggatgtattacttaggccaaaatctggcctggatttatgctataatatatattttcatgttaagttgtatatttttcagaaattataaatattattaatttaaaatttgaa

SEQ ID NO: 407210 - DNA, 2659 bp, Homo sapiens
ggagactttaacatcagaaaaaggatggacttgttgcagttgctgtagcattcaaagtcaaggtgatcatttcaaaccaagcatcagcaacaattaaaaatattcacttggtatctgtagtttaataatggaccaacatcaacatttgaataaaacagcagagtcagcatcttcagagaaaaagaaaacaagacgctgcaatggattcaagatgttcttggcagccctgtcattcagctatattgctaaagcactaggtggaatcattatgggtttaattgatggaagctttgaaattggaaatttgcttgtgattgtatttgtaagttactttggatctaaactacacagaccgaagttaattggaattggttgtctccttatgggaactggaagtattttgacatctttaccacatttcttcatgggatattataggtattctaaagaaacccatattaatccatcagaaaattcaacatcaagtttatcaacctgtttaattaatcaaaccttatcattcaatggaacatcacctgagatagtagaaaaagattgtgtaaaggaatctgggtcacacatgtggatctatgtcttcatggggaatatgcttcgtggcataggggaaacccccatagtaccattggggatttcatacattgatgattttgcaaaagaaggacattcttccttgtatttaggtagtttgaatgcaataggaatgattggtccagtcattggctttgcactgggatctctgtttgctaaaatgtacgtggatattggatatgtagatctgagcactatcagaataactcctaaggactctcgttgggttggagcttggtggcttggtttccttgtgtctggactattttccattatttcttccataccattttttttcttgccgaaaaatccaaataaaccacaaaaagaaagaaaaatttcactatcattgcatgtgctgaaaacaaatgatgatagaaatcaaacagctaatttgaccaaccaaggaaaaaatgttaccaaaaatgtgactggttttttccagtctttgaaaagcatccttaccaatcccctgtatgttatatttctgcttttgacattgttacaagtaagcagctttattggttcttttacttacgtctttaaatatatggagcaacagtacggtcagtctgcatctcatgctaactttttgttgggaatcataaccattcctacggttgcaactggaatgtttttaggaggatttatcattaaaaaattcaaattgtctttagttggaattgccaaattttcatttcttacttcgatgatatccttcttgtttcaacttctatatttccctctaatctgcgaaagcaaatcagttgccggcctaaccttgacctatgatggaaataattcagtggcatctcatgtagatgtaccactttcttattgcaactcagagtgcaattgtgatgaaagtcagtgggaaccagtctgtgggaacaatggaataacttacctgtcaccttgtctagcaggatgcaaatcctcaagtggtattaaaaagcatacagtgttttataactgtagttgtgtggaagtaactggtctccagaacagaaattactcagcacacttgggtgaatgcccaagagataatacttgtacaaggaaatttttcatctatgttgcaattcaagtcataaactctttgttctctgcaacaggaggtaccacatttatcttgttgactgtgaagattgttcaacctgaattgaaagcacttgcaatgggtttccagtcaatggttataagaacactaggaggaattctagctccaatatattttggggctctgattgataaaacatgtatgaagtggtccaccaacagctgtggagcacaaggagcttgtaggatatataattccgtattttttggaagggtctacttgggcttatctatagctttaagattcccagcacttgttttatatattgttttcatttttgctatgaagaaaaaatttcaaggaaaagataccaaggcatcggacaatgaaagaaaagtaatggatgaagcaaacttagaattcttaaataatggtgaacattttgtaccttctgctggaacagatagtaaaacatgtaatttggacatgcaagacaatgctgctgccaactaacattgcattgattcattaagatgttatttttgaggtgttcctggtctttcactgacaattccaacattctttacttacagtggaccaatggataagtctatgcatctataataaactataaaaaatgggagtacccatggttaggatatagctatgcctttatggttaagattagaatatatgatccataaaaatttaaagtgagaggcatggttagtgtgtgatacaataaaaagtaattgtttggtagttgtaactgctaataaaaccagtgactagaatataagggaggtaaaaaggacaagatagattaatagcctaaataaagagaaaagcctgatgcctttaaaaaaaatgaaacactttggatgtattacttaggccaaaatctggcctggatttatgctataatatatattttcatgttaagttgtatatttttcagaaattataaatattattaatttaaaatttgaa

SEQ ID NO: 407211 - DNA, 979 bp, Homo sapiens
tttattatttttttaaatacaaatctttcccattgggaacctttttggtgtgtggtatgtaactgatttttctaaatgttcagcacattcagggtttggggggttgtagtaagggtacttgtggagctctcaacagcaggactttaaaaatcttttctccagtgctctgcttttaacatgacttaaatattctctcagcctgtttcagttttcctgccattggcttatgctatcttctatgaggggagttagcaaactttttctataaaaagcccagtggtaaatattttaggttttgtgggccatatggtttctgctcttgtagcatgaaagcagtcatagacaatacataaatgagtgagtatggctgtgttccaacaaaactagttacagaaaaaggtagtgggctggatttggtttattggcggtagtttgccaatacctgctttatgacactgtactcttacaacttctgctcacctagtttctgcttcgtcatagtgggctttctcatagttatgcctctgattttcccttgtaacttcttagaataccttcttcacctctcatctttgctactgattacctgtttccatatttcacaattttaagtttccgagagcacaggcgatagctaaattaagatgctttgcatgttaccactattatgtactttgcttggctgtctaccctgttgcttcaatataaccaattccaaatagctgcattccttttgagggtctcttccttgccaatccagagttcattgcaagaaatggggtgatttggatcattttaaggaagtttatggaattcaactctagtgtggtatcattaatgtaattaagctcttctctccttatgtgcatcatgttggtcctactacagtttggtttcctcatactctgtcttcctctaacctcctggttactgaatacttagattttttttctcattcataacttgagcttttgcaact

SEQ ID NO: 407212 - DNA, 741 bp, Homo sapiens
tcgaacttctgacctcaagtgatccacttgcctcagcctcctaaagtgctaggattacaggcgtgagccaccgtgcccagctgcttttgacattttctttgggaggtttctggggtacaattagctgaaatctgaagtttggttttgcatggtcttgcccaagctggtggttggtcattgtggccttctgatctggtgatcctaagaaacattctgaaaacatacccaaaaacacataaaaggcgtaccttaccatttaaaggttctttcagtaaaggcctatgagtaatttttcatggagggagcccattcttacgaagttttaatggacaaacatatcattatcctttaaaatggtattattacgtggtcttttaatttttaaaaagctcatttttccccattatcaagataacatgttctagacagacaatttaggaaatgcatatgattatttttgttctaattttctgtaataccaccacatagagacagtagtttttaaaaactgtgtgatatttaatgtattgttttcatttcctttaagatgcaatttagagttttagccttgaactttagttttccttcctcttggagatttagtttgatgctaaagtgctatcttcttgtttcaacttttgcttaatttactccaacacttttagacagcaaattaggtaactttatactagtgttatctaacaatgttttgctaacttccattttaagatgttagctcac

SEQ ID NO: 407213 - DNA, 405 bp, Homo sapiens
aaactcagttattggaaactactgatgtacccatataacctgggtcaatcttctgatgctagccttggacctcaacatatatttatttctccccttgggacacagatcgataaggttaaagatgtccctttgcttcctcactgccaggaatattttggttgaaatatgaatatgtatattaacctcagtcacttttggcaaacttctttctacaggttatttgagagtttattatattattaattgtaaaggtatcagatatacatagaggagacattacacacgtgtgtgtgtgtgtgtgtgtgtgtataatacacatttactcctgtattcatagacgagaaaaacaaaaaccatgctaaccatgtcttcatttttggaatttgaacattatggaccaataaa

SEQ ID NO: 407214 - DNA, 339 bp, Homo sapiens
tttactttgctgaatggtttctttaaaacaactcatcttaatgtaaaatatcttcttgttctcactatctttttcttttttttccataaaatttcaaacatacaccaaagtagaaagaaggcaaaagtggtaacctatatttgtacacaccaaatttatacaattataatacatgacaatcttatttcagccattacttctgctcatccacgtatacccttggtactatttttaagcaaatagagaactcctttttaaccttttggtaataatgataccaacatttattgagcatttactatttatttacagggcatcatgatcatgataagaggtttg

SEQ ID NO: 407215 - DNA, 460 bp, Homo sapiens
  misc_feature (251)..(251): n is a, c, g, or t
  misc_feature (372)..(372): n is a, c, g, or t
  misc_feature (409)..(409): n is a, c, g, or t
  misc_feature (451)..(451): n is a, c, g, or t
atggatgagactcagtcatgttgagtgacaaaagccagacacaaaagaatacatactgtatggttcaatttttatgaaattgaagatgaaccagaatttatggtgataaaaaatacgatagcccagctaatttttgtatttttagtagagacagggtttcgtcatgtgggccaggctggtctcgaacttctgacctcaagtgatccacttgcctcagcctcctaaagtgctaggattacaggcgtgacacncgtgcccagctgcttttgacattttctttggggaggtttctgggggtacaattaggctggaaatctggaagtttgggtttttgcatgggtcttgccccaagctgggtgggttgggtcattntgggcctttctgattctgggtgatccccaaggaacantctggaaaacataccccaaaaacacattaaaagggcgttacnttacccttt

SEQ ID NO: 407216 - DNA, 377 bp, Homo sapiens
atttgtaagggtacctctgtagcttgtcttcctaaggttttgttttttgttctcgtagcccataggggtttaagtctgaccagcttaccctggcatttctttatttttctcagtggaattgtctacagttgagccaggagacattcctctttgggacatcctagtagaatggcatagtctgtcttctgagttgatagaagaggatggaagactcctttagtactctgagaaagactgatttcttttttcaggaccaggtttgccatttggcctatatacacccatattgcttcccactcttttcttccagtaccgaggtcaagccactgattgtattcttagaattaaaaaggcagtgtgataaggtgttttaggag

SEQ ID NO: 407217 - DNA, 439 bp, Homo sapiens
tctcttgtcattgactagaattgacattcactgagcaactgcttgcctgtctgtggatcaggccatgtgctggtcattatatattcattacctcattttgtcttcacaaaacccttcaagttatgaatataggtccagtggcatgggaaaaaagtagaagaggatatttcaggaggactgctcagggatcgaaaaaggtttaaaacccataaccaccaaatacaatacgtacatctgctttaggaacttgattcagtcaaccaaaatgcagaaagacattttttaaagacaatcagagagatacgaatgtggactgggtattagatgttaacaagaaattattgttggtgaggtgtggtaatgaaattgcagttatataagtagcaatattttttagataatatgccaagtatgtagggatgtaatgacctaaggtcta

SEQ ID NO: 407218 - DNA, 428 bp, Homo sapiens
gagagctagcaccatgagcttcaataccctgtgtgaattttcagcagaaaagcagtgagccaagcccagaagaccatgaatggaaaaagaatatgaagccacactgtaagttcagcctacagaaagcgtatcacagatattacatcaatggaagaggaataaagggttcagagggaaaacaggttacctgaggtacgtgcatcacctgaggtcaggagttcgagagcagcctggccaacatggtgaaaccccatctctattaaaaacacacacacacaaaattagctgggcgtggtggcgggcacctgtaatcccagctacttgggaggctgaggcaggagaactgcctgaacctgggaggcggaggttgtagtgagctgagacagtgccattgcactccagcctgcaacaagagtgaaactctgtct

SEQ ID NO: 407219 - DNA, 459 bp, Homo sapiens
aattaagtgaatattgtagttgctgccgagttgcactgttcagatgctgttgctacgtaaaattccactcctagaattactggtgaaaagtcattttattatgctcacaaattgtgtgggacaggaatttggatggagcacagtgatggctggggaaggagccagggagtggcagggagcttttcagctactggcctggaggttgacattggctgtcagctgtggcctcagctaggctctcggttggaacacctacactgtgtagtttctccctgtgggcacatttgacttcttcacaacctggcactgggttctaacaatgagccttccaagagagcaagagaagtgcatggcattttaatgattagtcttggaattcacatgatgtgtcttctgtcatacttcattggatgaagcagtaaccaaggtccatccagcttctatagaagggtacataga

SEQ ID NO: 407220 - DNA, 683 bp, Homo sapiens
gacaggctcttgctctgtcacccagactgaagtgcagtggtgtgatcatagctcaccgtagccctgaactcctgggctcaagcaatcctccctcagtctccagagtagctgagagtacaggtgcgtaccaccgtttccagttttgttttgttttgttttttatagtcagaatcttgctttgttgctcaggctggtctcaaactcctggctttaagcaatccgccagccttggcctcccaaggtgctgggacccccaggatgagacacgtgatcagcccttgcatttcttaatctgaatgtaacgccagtgaaaagagtaacagatgttaagaaaatggaattttagccctggctcttttatcaatttgcagatgacttttaagaacgaaccacagccttcagcctgttttcccaactgctaaaacaaagaaaatacctgtcctacattctcatcaatatgactgagaaaaaaaggtttggaatcagtacaacaaacacttggaagaaaaagtatacaagtgctatttttgtttttcttacacacttgtatatacatattaataaggcaaattcaagttttaaaaactttggtcttagtgaaatcagaagaatatattttcccccaagtttcagacacatatatacctcagaatgtggatgctacagaaaaaatattccaaaag

SEQ ID NO: 407221 - DNA, 411 bp, Homo sapiens
aaacattcctatgactttgtttccaaacttttctttggcagcgctgtgcgttccagaaagggtgggcaagaatgcgagggggtaaatcagaagaagtttcatattaagaagcctaagtgtgcccaaatgtgagtgggtcacacgagatgcactaagcgtctcagtcagctaataacaatcagctcatggcccacctggccctgctgtcgccccgaccttccagctgtgagcctacggcagctggggcaatggtgtacccaacctgctccttgctcacctctggcatggctgggtccgagctccagaacatggcatctctcctccctgcaccaccttccctgaggggtggggcctgcccaaggccttggactcatcctgacctgaggcattgttcaaggagtttgatcccag

SEQ ID NO: 407222 - DNA, 745 bp, Homo sapiens
tttttctccaatgaattatttcttcaggagtgctggtaattaaattagcaggaagactacttatatttagtgaatgtatattacacagagttggcaagacaaggctcaagctacatctcaaattaaaatagaaatgtatatgcaatagggaacttacttttcctttgtgagaagtaaggggaatctcgcatttcaatagaaaagtctgaataagagaactagaataacccaaaacagttcattttttttgtcggtaaaatttgagcatttgtgaatttaagtttttttatttttatttttttacactttcaggtattgtaaacctatgagtggttttacattcacctgggcaaataatctgttaatttaattaatttggaatgaaggatgaaaacctgacttttcagatgttgtctctaaaatgtctctctcagaggtactgcaagtatgaaggaggaatataatcattggctattatctcctccctcccacagagtaccttctgtcatagggtaactcctctgcagtggttgtcatatcttctcttctcgagggtcgctgctctgttccctcctctccaggtcagggtcatcgggttggcggcgtcatcggggcatggagtcacctgggtctgctcctcagcttgtccgtcaggttcgggagcatctgtcctggcttctggttcttttcagaacttttaccacgctgagcacttggtctctggagcttgagctgtttggctgtg

SEQ ID NO: 407223 - DNA, 770 bp, Homo sapiens
tttgagatggagtctcactctgttgcccaggctggagtgcagtggtgcgatcttggctcactgcaacctccacctcctgggttcaagcgagtctcctgcctcagcctcctgaatagctgggattacaggcatgtgctaccacacctggctgacttttgtatttttagtagagatggctttcaccatgttggttaggctggtctcgaactcctgatctcatgatccacccacatcggcctcccaaagcgctgggattacagacgtgagccaccgtgcccggccgagaaatctaattttttaatagttcatcctatccccactgactgtaataccaaccccaacatttattaacttcccatatatgatgaatcattctgcattctgttctgtttccacacttgttacttggggaagaaaaaaaaagaagaaaagaaatttttatctgagaaatatgagcccctttacattatcaggcccagagaggcattgaaatagaacagcaatcatgtcacgcccccttgagctaaataattattatctcttgaagccagctgttatgtgggatgccaggtaaccataaaatgccatatatcctgtacttcataatatgtagccaatcactaactaatgttatttctgtaagccagtgaacattccttcctttccttcctttctttcccttccttcccttctttcccttccttttctttccccttcccccttccctcctttcccctcccctcccctcaacaggatcttgctttgtcacc

SEQ ID NO: 407224 - DNA, 681 bp, Homo sapiens
agcctgtgtggtcaggcatggtgaactgggcatgccagtgactcccccagttcagactctctgttagaggcctactcttgcttgtgggggagcctgccttatgttgctttgagttttaagccccatgtttacctactagcttgaaaaacagagctgcccagacataatcaacccttgacactcaacccagtctggcgacaaagcgattatagtttttaaattattagtagtattttcatttcctcacattgcttataccgctcaaacttatgaccagttccgagctctggagagaagccattttgcaaagggatgtcccctcctgctcctggatatctgagtattaaaaatttgcttgggttgtgcatggtggctcatgcctgtaatcccagcactttggtaggcctaggcaggattgcctgacctcaggagtttgagatcagcttgggcaacgtggtgaaactccatctctactaaaaataaaaaaataaaaaaagagatacttgggtggatctcaggcctggtcacttcctggttgtgtgttggcactgttgatgtttggggataattgtttttggggggagtgggccaccttgtgcattgtaggacatttagtatccctggcatctccccactagatgccagtagcaccttcttcccttgatgtgacaatcaaaaatg

SEQ ID NO: 407225 - DNA, 712 bp, Homo sapiens
cccgaactgctggatcactgtgtattttaacaggacccccaggtgaactctaagtgtgttcaagtttgagaaacatggatcttgagcacagttgtatctctctgaacttttttgagagaattaagtgaagccattagtagggtttcctgcatagacacatattcaacacctttagtaaaaaacaaaaagcccgcttcttaaaagaatatgctttactttgaaagtttgcatttatgctatcttgtctatttaatgctatataatttcagacataatatagtaactctacaagacctccttccctgtataaaaagacgcactataagtttttgtagtcatctttgaggtctgtctgtagtgtgctttattaaaagcgagcaaatactgaaggatcccatttaagtatgtggtctgcggtggagtctaatttgtaccactaggcaaaggtcacacagaggagctcgttaatgcacttactccgggatgaaatcaatctccatacttcaccatattgatctgatagctcattggcgcttccctccgtgaactggttagctcacgtgtgaatggagagagatagatagctttctgggcctgagaattctagctggggtgccatccagggcaaaaggtggatgtttttacatcctcatttgggtggcccttttggtttctggtgttaggctcttgtgctggtatatcagttagtcag

SEQ ID NO: 407226 - DNA, 367 bp, Homo sapiens
atctaggaaactaaaaaatcagaaaagttagtttgattttatcagatacatctgctacatctaatgagatgatcatatagtttttttcctcccataaactgtgaatataatgaatcacattaattgatttttttaaatgttaaaccaatctccatttctgggataaattcaacttagtcatgttgtattagccttttgtatatcttatatctataatactgaatgagattatcatactctttacatgtatttgaagccatgtcattaagtgcatacaatttttattaaatttttaattgacaaataattgtatttatttatggggtacgatgtagtgttttgatatatgtttacattgtagagtgac

SEQ ID NO: 407227 - DNA, 350 bp, Homo sapiens
taaataatttctaccataaatgaaaattttcagaagttagaaaaagagaagccccccagttcattatgtaagattataacttaaaatcccaataaggacagaacaaggaaaaatgtgtatgtatattcatctcacatataaatagaatgttttctatttatagaaataaaaaatgtcttacaaactcacaaattaagtagttatttttttaaaaatagagacatacagtttatcctaggaatgtaagtatggttcatcagaaagatgaatataatgccagattaacaaccgattggctgggcgtattggcttacgcctgtaatcccagcactttgggaggccaaggccgg

SEQ ID NO: 407228 - DNA, 474 bp, Homo sapiens
gtgcagagtcttatcccagaaattaaaccaactgaccatactcaacttataccacagttaaaggaacaccattccttcaagatgaaaaagaatcaacaagaaatctggcaattcaaaaagtaagaatgtaccttaaccttcaaatgggtgcatttgagctctccagcgatggttcttaaccacattggaatgactaaaatgacagacaggcaattcggaatctggatggcaagaaagctcattgagattcaggaaagtgctgaaacacaatttaaggaattcaataattccagtagaatgatccaaaagctgaaagacataatagccattaaaaaaacactacttctggaattaaaaaaaatactacatggatttgataatacatccagacctttagcaacagaacataccaaagagagaaaagaatctcagagcttaaaaaccagtttttataatcaactccatcagacaaaa

SEQ ID NO: 407229 - DNA, 977 bp, Homo sapiens
gtatggtacctctcataggttttctgagtaactgagaaaaagcatttgtttattttgttagtattttatttttaaagtttaagttaaattttatattttattttaattacctgtcactgactttaagtccagtattttgctagtatttttaaaccactgtttctgctcttctttcctacccacatacctttttgttttcctctctcctaatctgtctttacttggtagtacatttggcctggtagattcagatggaccttgctatgcagtgatggtgtacaatatagtgcagagctggggagtgctcattggagactctgtagccattcctgagcccaacctgcggcttcaccgaattcagcacaaaggaaaggactattccttttccagtgttcgagtggagacgcccctcctgctagtggtgaatgggaagcctcagggatccagcagccaggctgttgccacagtggcatcgcgaccacagtgtgaatgacctttgacttgcatgctcaacagggagtggaggagaggagacaaggctctggacagccggtccagccacatccagtgattcagcagggatgggaggaatgttttaaatgaagactttctctttccctgcctgtattacacttcgtatctcttctctctcctctgtcctcatcatgttccagctctctacagggccacatactcttctggcatatctctcctgtctcttccactgctctctatgttttaagcaaagagcatggaattggtagaagtcttgggatcttgccatgggacagagtccccaaggttcctgttgttgcctccttcctaagcctcatatgtatatatcagttcagtatttattgctaaaggagggggcttaattttgtaatggcttttatttttagcaatttttatttttatttttgaactttaggtccttcctcttctttggggctggaacagaattaaatttgtttgga

SEQ ID NO: 407230 - DNA, 1166 bp, Homo sapiens
gtatggtacctctcataggttttctgagtaactgagaaaaagcatttgtttattttgttagtattttatttttaaagtttaagttaaattttatattttattttaattacctgtcactgactttaagtccagtattttgctagtatttttaaaccactgtttctgctcttctttcctacccacatacctttttgttttcctctctcctaatctgtctttacttggtagtacatttggcctggtagattcagatggaccttgctatgcagtgatggtgtacaatatagtgcagagctggggagtgctcattggagactctgtagccattcctgagcccaacctgcggcttcaccgaattcagcacaaaggaaaggactattccttttccagtgttcgagtggagacgcccctcctgctagtggtgaatgggaagcctcagggatccagcagccaggctgttgccacagtggcatcgcgaccacagtgtgaatgacctttgacttgcatgctcaacagggagtggaggagaggagacaaggctctggacagccggtccagccacatccagtgattcagcagggatgggaggaatgttttaaatgaagactttctctttccctgcctgtattacacttcgtatctcttctctctcctctgtcctcatcatgttccagctctctacagggccacatactcttctggcatatctctcctgtctcttccactgctctctatgttttaagcaaagagcatggaattggtagaagtcttgggatcttgccatgggacagagtccccaaggttcctgttgttgcctccttcctaagcctcatatgtatatatcagttcagtatttattgctaaaggagggggcttaattttgtaatggcttttatttttagcaatttttatttttatttttgaactttaggtccttcctcttctttggggctggaacagaattaaatttgtttggaaaaaaaaaaaaacaccacgtagtttggcctgctttattctccctaggcctgtattctttgttttaggatcacttcaatttattggagtaatacccccatttttttctttatacaaagcagtttatttctctcccagttaaaagaattccgacaatagacagccccaggcaggaatggcaactccacaaa

SEQ ID NO: 407231 - DNA, 2016 bp, Homo sapiens
agcgggggagtggccgggagatgatggctgatgaagaggaagaagtcaagccgatcttgcagaaattgcaggaactcgtggatcagctctactcatttcgagactgctatttcgagacacatagtgttgaggatgctgggaggaagcaacaggatgtgcggaaggagatggagaaaaccctacagcagatggaagaagtagtgggttctgtccagggcaaggcacaagttctaatgctaactgggaaagcactaaatgtgactcctgactatagccctaaggctgaggagcttctgtcaaaggctgtgaagctggagcccgagctggtggaagcctggaaccagctgggtgaggtgtactggaaaaaaggggatgttgcagctgcccacacctgcttctcaggagccctcacccattgcaggaacaaagtctccttgcaaaacctgtcaatggtgcttcgtcagctgcggactgacactgaagatgaacattctcaccatgtcatggacagtgtccgacaggctaagttggctgttcagatggatgtccatgatggccgctcctggtatattcttgggaattcatatctttccctttacttctctactggccagaaccctaagatctcccagcaagccctcagtgcctatgcccaagcagagaaagttgacagaaaagcgtctagcaatcctgaccttcatctgaacagggcgacgttgcataaatatgaagagagttatggggaggccctggagggcttctctcgggctgcagccctggaccctgcctggccagagccccggcaacgagagcaacaacttctggaattcctggatagattaaccagcctccttgagagtaagggaaaggtgaagaccaaaaagctgcagagcatgctgggaagcttgcgcccagcccatctaggcccttgcagtgatgggcactatcagtcagcctctgggcagaaagtgaccctggagctcaagccactgagtacgcttcagcctggggtgaacagcggtgccgtcatcctgggaaaggtggtatttagcctcaccacagaggagaaagtcccctttacatttggcctggtagattcagatggaccttgctatgcagtgatggtgtacaatatagtgcagagctggggagtgctcattggagactctgtagccattcctgagcccaacctgcggcttcaccgaattcagcacaaaggaaaggactattccttttccagtgttcgagtggagacgcccctcctgctagtggtgaatgggaagcctcagggatccagcagccaggctgttgccacagtggcatcgcgaccacagtgtgaatgacctttgacttgcatgctcaacagggagtggaggagaggagacaaggctctggacagccggtccagccacatccagtgattcagcagggatgggaggaatgttttaaatgaagactttctctttccctgcctgtattacacttcgtatctcttctctctcctctgtcctcatcatgttccagctctctacagggccacatactcttctggcatatctctcctgtctcttccactgctctctatgttttaagcaaagagcatggaattggtagaagtcttgggatcttgccatgggacagagtccccaaggttcctgttgttgcctccttcctaagcctcatatgtatatatcagttcagtatttattgctaaaggagggggcttaattttgtaatggcttttatttttagcaatttttatttttatttttgaactttaggtccttcctcttctttggggctggaacagaattaaatttgtttggaaaaaaaaaaaaacaccacgtagtttggcctgctttattctccctaggcctgtattctttgttttaggatcacttcaatttattggagtaatacccccatttttttctttatacaaagcagtttatttctctcccagttaaaagaattccgacaatagacagccccaggcaggaatggcaactccacaaa

SEQ ID NO: 407232 - DNA, 849 bp, Homo sapiens
agcgggggagtggccgggagatgatggctgatgaagaggaagaagtcaagccgatcttgcagaaattgcaggaactcgtggatcagctctactcatttcgagactgctatttcgagacacatagtgttgaggatgctgggaggaagcaacaggatgtgcggaaggagatggagaaaaccctacagcagatggaagaagtagtgggttctgtccagggcaaggcacaagttctaatgctaactgggaaagcactaaatgtgactcctgactatagccctaaggctgaggagcttctgtcaaaggctgtgaagctggagcccgagctggtggaagcctggaaccagctgggtgaggtgtactggaaaaaaggggatgttgcagctgcccacacctgcttctcaggagccctcacccatgtgagctgccccctatccctttggaaagcagagatgggaaggatgaatttctttggttctatgagtttccctaggacatgaataccagagtagaactgaaattgaactaggacagaatcaggagggaggaaaggtcagagagcagacctgaatgaggaaaatagaggcaggggcctgggaaaggaagatgatgatgggatcaggttcagggggagaaaggaagtgaagaaaagctagcagctaagctgatccctgtggatgggggttgaagatacagatggcagcaagaatttagatgaaaaaattagggctgggtgtggtagcttacacctgtaatcctagcactttgagaggccgaggcaggaggatcacttgagctcaggagtttgagaccagcctaggcaacatggtgagaccttgtctctacaaaaaa

SEQ ID NO: 407233 - DNA, 1827 bp, Homo sapiens
agcgggggagtggccgggagatgatggctgatgaagaggaagaagtcaagccgatcttgcagaaattgcaggaactcgtggatcagctctactcatttcgagactgctatttcgagacacatagtgttgaggatgctgggaggaagcaacaggatgtgcggaaggagatggagaaaaccctacagcagatggaagaagtagtgggttctgtccagggcaaggcacaagttctaatgctaactgggaaagcactaaatgtgactcctgactatagccctaaggctgaggagcttctgtcaaaggctgtgaagctggagcccgagctggtggaagcctggaaccagctgggtgaggtgtactggaaaaaaggggatgttgcagctgcccacacctgcttctcaggagccctcacccattgcaggaacaaagtctccttgcaaaacctgtcaatggtgcttcgtcagctgcggactgacactgaagatgaacattctcaccatgtcatggacagtgtccgacaggctaagttggctgttcagatggatgtccatgatggccgctcctggtatattcttgggaattcatatctttccctttacttctctactggccagaaccctaagatctcccagcaagccctcagtgcctatgcccaagcagagaaagttgacagaaaagcgtctagcaatcctgaccttcatctgaacagggcgacgttgcataaatatgaagagagttatggggaggccctggagggcttctctcgggctgcagccctggaccctgcctggccagagccccggcaacgagagcaacaacttctggaattcctggatagattaaccagcctccttgagagtaagggaaaggtgaagaccaaaaagctgcagagcatgctgggaagcttgcgcccagcccatctaggcccttgcagtgatgggcactatcagtcagcctctgggcagaaagtgaccctggagctcaagccactgagtacgcttcagcctggggtgaacagcggtgccgtcatcctgggaaaggtggtatttagcctcaccacagaggagaaagtcccctttacatttggcctggtagattcagatggaccttgctatgcagtgatggtgtacaatatagtgcagagctggggagtgctcattggagactctgtagccattcctgagcccaacctgcggcttcaccgaattcagcacaaaggaaaggactattccttttccagtgttcgagtggagacgcccctcctgctagtggtgaatgggaagcctcagggatccagcagccaggctgttgccacagtggcatcgcgaccacagtgtgaatgacctttgacttgcatgctcaacagggagtggaggagaggagacaaggctctggacagccggtccagccacatccagtgattcagcagggatgggaggaatgttttaaatgaagactttctctttccctgcctgtattacacttcgtatctcttctctctcctctgtcctcatcatgttccagctctctacagggccacatactcttctggcatatctctcctgtctcttccactgctctctatgttttaagcaaagagcatggaattggtagaagtcttgggatcttgccatgggacagagtccccaaggttcctgttgttgcctccttcctaagcctcatatgtatatatcagttcagtatttattgctaaaggagggggcttaattttgtaatggcttttatttttagcaatttttatttttatttttgaactttaggtccttcctcttctttggggctggaacagaattaaatttgtttgga

SEQ ID NO: 407234 - DNA, 1194 bp, Homo sapiens
agcgggggagtggccgggagatgatggctgatgaagaggaagaagtcaagccgatcttgcagaaattgcaggaactcgtggatcagctctactcatttcgagactgctatttcgagacacatagtgttgaggatgctgggaggaagcaacaggatgtgcggaaggagatggagaaaaccctacagcagatggaagaagtagtgggttctgtccagggcaaggcacaagttctaatgctaactgggaaagcactaaatgtgactcctgactatagccctaaggctgaggagcttctgtcaaaggctgtgaagtatcagtcagcctctgggcagaaagtgaccctggagctcaagccactgagtacgcttcagcctggggtgaacagcggtgccgtcatcctgggaaaggtggtatttagcctcaccacagaggagaaagtcccctttacatttggcctggtagattcagatggaccttgctatgcagtgatggtgtacaatatagtgcagagctggggagtgctcattggagactctgtagccattcctgagcccaacctgcggcttcaccgaattcagcacaaaggaaaggactattccttttccagtgttcgagtggagacgcccctcctgctagtggtgaatgggaagcctcagggatccagcagccaggctgttgccacagtggcatcgcgaccacagtgtgaatgacctttgacttgcatgctcaacagggagtggaggagaggagacaaggctctggacagccggtccagccacatccagtgattcagcagggatgggaggaatgttttaaatgaagactttctctttccctgcctgtattacacttcgtatctcttctctctcctctgtcctcatcatgttccagctctctacagggccacatactcttctggcatatctctcctgtctcttccactgctctctatgttttaagcaaagagcatggaattggtagaagtcttgggatcttgccatgggacagagtccccaaggttcctgttgttgcctccttcctaagcctcatatgtatatatcagttcagtatttattgctaaaggagggggcttaattttgtaatggcttttatttttagcaatttttatttttatttttgaactttaggtccttcctcttctttggggctggaacagaattaaatttgtttgga

SEQ ID NO: 407235 - DNA, 406 bp, Homo sapiens
aatactttcttgttttcattctttttttccccattctttctgcatatctgctctccccgtctccagttgttttgaatcatggctgagcattttatcacctgatgagtttttaaagctctgtaagctcagaccaagccccagactaatacatcagaatctctaggggtgggacctggtattgggtaagtttttaaactccacaggtgattacatttggcagccaaggttgggacccatggtttcagatgtagtaaccacatcaattaacttagtacctcttaagaaggttgcttattagaataacctgggagattttctccacactgttccctcccttccacttcccttattaatttagtgagccagtgttaactgatgggaatatacacatacccttggatatgtt

SEQ ID NO: 407236 - DNA, 808 bp, Homo sapiens
ctagctctccacctgctcgctatcatgaaaagcacttcctcttcccttttgctttatctcttgtcttcctccacattaatccagagcacatacacaaacatgtacataccttctcccaaataagtacatacctgcatctatataagtgtcacgtcttcaaccttacctctccccctagacctaactcactttttaaaaaaaattcccacagttacagcatgtatcacttaatttattctctacctatggtttgtattgttttgtgttgtatatcttatgcttatatggttttatatgggctgacttaccttcctggttgtaagcttcttgagatcagggatttaattttttctcatgtatctctcgtatagcccttaccacgttggtaaatatgtagtaaatgcttattaagtcttaaaataagcctgtcctgtggagcagaaacgttcctcaggaagtgtcttatcgagtgttcccattttacaaaagagaaaattggaacagtgaagtgacccattttctttatgacataactggtgagtagcaagccctgaaccagaacctagggctcctgactcttagttcagtgtgcctgttcccaggcagccttgaccacgctgatgctcagggaaacactgccacgagaacatggcatttactgctgctcacgtggacagtggtgatatccatgccctgaacaacagcctgaagttcttcccagcattccccatttttcatcttgcctccttaactttataaaaccctctctattcaggaactagggaatgaatgagagtcctctctcatg

SEQ ID NO: 407237 - DNA, 358 bp, Homo sapiens
tcccttcacccgcggctgcctcctgcccccatgactacagtgtgatgctgtctgggaagctgaatgtcatcttccctgggcttacctgccaggctcctctcatccacatcttccagcctctagccacatggacccctccggaaagcatgtgtgtgtggggggtatgtgtgaacatttttcatgcttgatgtgagccggaagaaaaatgagcttctctatttgataagtgtggacctgcccacagcactaaatttggttctgccgtcaccggcgccatgaagcagcagcctggtttagaggcttgcctttggtttcaaataatttctccaggctcatgttacatatgacccattcacag

SEQ ID NO: 407238 - DNA, 1877 bp, Homo sapiens
atcataacctgcccacaagttctacgcacctgtgactttgggggtcaaattatatactcttcaaattgacttaagtacacaccgcttagatttcatgcgtttcaaatttagactaagagaaagatgctctagaatttaaccaggttttttaaatcagtaatttaagattttctaaccatttgaacaaattttacttacatgtatgcacatgtcatttttcgtgtttctatttttatgttctcaaaggtaggataagggaaggaaggaggaaacagcccatttggggttcaagagctagctctgctaagggcttgtaagctatttctattctgccctttggtctttttcttgtttgtcttgtctttatttttaaatgaaattcttgaagctatgtattgaattttctagtatagaggatgtgacttccacctccaaattccatttaactgattcttttaaaagaaagataggcgtatatacaccacgccaaaataataataaggtacctatgtgagaattgcaaattataccccagggtagcatttaggcagcgtcggcaaaaagtgagttaataaatcagaagctacatattaaaaaaaaaatcagtcaatccgtcgtgtgtttaattcttgcctaaagtaaatggagatattgttttgctttggtaaccagcaatttttaatttttttttattgcccgcaaattgagattgttttgttaaaatctgttgatctagcagcaagtagaattattcaactggaatcttgtattctattcagagcttaattttccgttaaggaaaaaaatgagcttcagtttgtgttgtgatgtgtataatttgcatgctgaatcacaacatgcttggagagattgtagagactctttggtaaataatctaacctttacaatttccgtttatatgttaacatttttctataatatgagtgcctttccaatgcacagatattttttatggctgtaatttctctgtaaaaataatttttaagcatacattttattctttttttgcaacaaccgagatttttccaagattgttctgtttcccctcgccctcctagctcccgcccccgtcacttcggcgcttgtattttctaattattcatgggtgccatgttgagtgtttgtaatttgaccaccacaggtaagcttcctgtttacttgaacactcagcctcatctccggtgaatgaagggaaaagcacagatgggtttctcccaggcacagctcactccaaaggtgtcttcatagagccaacccagcctttctcaagggagcatttccccacttaatgtgtttatcagcatctttcttccgccaagaattcaagagcattttcaaaattgatagattttggtgcagttttgcaagtttccgtggaaggctgtctcccgcttctgggatccacccccatgtcgggaccagatcggctgcagggagtcatgtttatgaaatgttggtggttttttttttttttcattcatactagaagtgtttttataacgaaaatctgcactttacaactctgcaggccatgcatgcaatggtgatttacagccttgtttacgtgtaattcctccaggtgatttatcccaatttatgcaaagatcctattttaaacagacacggagaagtggtaaccgtttcctaacagcagcaagaatgccccttccgtttgcctggtgaaaagaactgacattaacagcagcttggaggcttcgaggaggtggggacgtggcctgagctcgggacgggggcccagtgcgggttgtcggagcgtggctgcccggcgatgtctctgtatttatcaataaatctcccggttgctctgggaagcacttatgtcctgttccattatt

SEQ ID NO: 407239 - DNA, 2131 bp, Homo sapiens
tgcgcgcgcggaggcagcggcgggggcgaccggagctggggcagagtggggagcgagggagggggaggagagagagggaggcggagggcagtgagagacgcatttccagttctcaactacgagccacgagtttgcagatggggctgctcggcggcgcctgtggctgagggagagcagcggcggcggggagcgaccgggagcggcggcagcggcggcgcggaggcggctgaggtgcgagccgcaatgcagcaagtcttggaaaaccttacggagctgccctcgtctactggagcagaagaaatagacctaattttcctcaagggaattatggagaatcctattgtaaaatcacttgctaaggctcatgagaggctagaagattccaaactagaagctgtcagtgacaataacttggaattagtcaatgaaattcttgaagacatcactcctctaataaatgtggatgaaaatgtggcagaattggttggtatactcaaagaacctcacttccagtcactgttggaggcccatgatattgtggcatcaaagtgttatgattcacctccatcaagcccagaaatgaataattcttctatcaataatcagttattaccagtagatgccattcgtattcttggtattcacaaaagagctggggaaccactgggtgtgacatttagggttgaaaataatgatctggtaattgcccgaatcctccatgggggaatgatagatcgacaaggtctacttcatgtgggagatataattaaagaagtcaatggccatgaggttggaaataatccaaaggaattacaagaattactgaaaaatattagtggaagtgtcaccctaaaaatcttaccaagttatagagataccattactcctcaacaggtatttgtgaagtgtcattttgattataatccatacaatgacaacctaataccttgcaaagaagcaggattgaagttttccaaaggagagattcttcagattgtaaatagagaagatccaaattggtggcaggctagccatgtaaaagagggaggaagcgctggtctcattccaagccagttcctggaagagaagagaaaggcatttgttagaagagactgggacaattcaggacctttttgtggaactataagtagcaaaaaaaagaaaaagatgatgtatctcacaaccagaaatgcagaatttgatcgtcatgaaatccagatatatgaggaggtagccaaaatgcctcccttccagagaaaaacattagtattgataggagctcaaggtgtaggccgaagaagcttgaaaaacaggttcatagtattgaatcccactagatttggaactacggtgccatttacttcacggaaaccaagggaagatgaaaaagatggccaggcatataagtttgtgtcacgatctgagatggaagcagatattaaagctggaaagtatttggaacatggggaatatgaaggaaatctctatggaaccaaaattgattctattcttgaggttgtccaaactggacggacttgcattctggatgtcaacccacaagcactgaaagtattgaggacatcagagtttatgccctatgtggtatttattgcggctccggagctagagacgttacgtgccatgcacaaggctgtggtggatgcaggaatcactaccaagcttctgaccgactctgacttgaagaaaacagtggatgaaagtgcacggattcagagagcatacaaccactattttgatttgatcatcataaatgataatctagacaaagcctttgaaaaactgcaaactgccatagagaaactgagaatggaaccacagtgggtcccaatcagctgggtttactgatgattcagtaaggttaacaatgaaaattaaactcttaaaaagtgactgcaacaaataaaccttctactgagaaaatacatcacagatagaagattatctgctaagtccaggcatttttatggtgtagattgaaataatagtacacttctgaatttttatataaaatgtggttggaaggtgtactaatatataatttatcttaatttttctaactttgtatggataatctttctattcatatcacataaagaaatgcgttgaagca

SEQ ID NO: 407240 - DNA, 415 bp, Homo sapiens
  misc_feature (393)..(393): n is a, c, g, or t
tgaagtactaaatacattgtcagttacaattaaatcagagtggtttgacaaggattttttaaattcagtggcaagtgatacaactatagtatttttaattgtgctatgtgttttaggtatttgtgaagtgtcattttgattataatccatacaatgacaacctaataccttgcaaagaagcaggattgaagttttccaaaggagagattcttcagattgtaaatagagaagatccaaattggtggcaggctagccatgtaaaagagggaggaagcgctggtctcattccaagccagttcctggaagagaagagaaaggcatttgttagaagagactgggacaattcaggacctttttgtggaactataagtagcaaaaaaaagaaaaaaaaanaaaaaaaaaaaaaatttgtggg

SEQ ID NO: 407241 - DNA, 2012 bp, Homo sapiens
tgcgcgcgcggaggcagcggcgggggcgaccggagctggggcagagtggggagcgagggagggggaggagagagagggaggcggagggcagtgagagacgcatttccagttctcaactacgagccacgagtttgcagatggggctgctcggcggcgcctgtggctgagggagagcagcggcggcggggagcgaccgggagcggcggcagcggcggcgcggaggcggctgaggtgcgagccggctcatgagaggctagaagattccaaactagaagctgtcagtgacaataacttggaattagtcaatgaaattcttgaagacatcactcctctaataaatgtggatgaaaatgtggcagaattggttggtatactcaaagaacctcacttccagtcactgttggaggcccatgatattgtggcatcaaagtgttatgattcacctccatcaagcccagaaatgaataattcttctatcaataatcagttattaccagtagatgccattcgtattcttggtattcacaaaagagctggggaaccactgggtgtgacatttagggttgaaaataatgatctggtaattgcccgaatcctccatgggggaatgatagatcgacaaggtctacttcatgtgggagatataattaaagaagtcaatggccatgaggttggaaataatccaaaggaattacaagaattactgaaaaatattagtggaagtgtcaccctaaaaatcttaccaagttatagagataccattactcctcaacaggtatttgtgaagtgtcattttgattataatccatacaatgacaacctaataccttgcaaagaagcaggattgaagttttccaaaggagagattcttcagattgtaaatagagaagatccaaattggtggcaggctagccatgtaaaagagggaggaagcgctggtctcattccaagccagttcctggaagagaagagaaaggcatttgttagaagagactgggacaattcaggacctttttgtggaactataagtagcaaaaaaaagaaaaagatgatgtatctcacaaccagaaatgcagaatttgatcgtcatgaaatccagatatatgaggaggtagccaaaatgcctcccttccagagaaaaacattagtattgataggagctcaaggtgtaggccgaagaagcttgaaaaacaggttcatagtattgaatcccactagatttggaactacggtgccatttacttcacggaaaccaagggaagatgaaaaagatggccaggcatataagtttgtgtcacgatctgagatggaagcagatattaaagctggaaagtatttggaacatggggaatatgaaggaaatctctatggaaccaaaattgattctattcttgaggttgtccaaactggacggacttgcattctggatgtcaacccacaagcactgaaagtattgaggacatcagagtttatgccctatgtggtatttattgcggctccggagctagagacgttacgtgccatgcacaaggctgtggtggatgcaggaatcactaccaagcttctgaccgactctgacttgaagaaaacagtggatgaaagtgcacggattcagagagcatacaaccactattttgatttgatcatcataaatgataatctagacaaagcctttgaaaaactgcaaactgccatagagaaactgagaatggaaccacagtgggtcccaatcagctgggtttactgatgattcagtaaggttaacaatgaaaattaaactcttaaaaagtgactgcaacaaataaaccttctactgagaaaatacatcacagatagaagattatctgctaagtccaggcatttttatggtgtagattgaaataatagtacacttctgaatttttatataaaatgtggttggaaggtgtactaatatataatttatcttaatttttctaactttgtatggataatctttctattcatatcacataaagaaatgcgttgaagca

SEQ ID NO: 407242 - DNA, 2204 bp, Homo sapiens
tgcgcgcgcggaggcagcggcgggggcgaccggagctggggcagagtggggagcgagggagggggaggagagagagggaggcggagggcagtgagagacgcatttccagttctcaactacgagccacgagtttgcagatggggctgctcggcggcgcctgtggctgagggagagcagcggcggcggggagcgaccgggagcggcggcagcggcggcgcggaggcggctgaggtgcgagccgcaatgcagcaagtcttggaaaaccttacggagctgccctcgtctactggagcagaagaaatagacctaattttcctcaagggaattatggagaatcctattgtaaaatcacttgctaaggctcatgagaggctagaagattccaaactagaagctgtcagtgacaataacttggaattagtcaatgaaattcttgaagacatcactcctctaataaatgtggatgaaaatgtggcagaattggttggtatactcaaagaacctcacttccagtcactgttggaggcccatgatattgtggcatcaaagtgttatgattcacctccatcaagcccagaaatgaataattcttctatcaataatcagttattaccagtagatgccattcgtattcttggtattcacaaaagagctggggaaccactgggtgtgacatttagggttgaaaataatgatctggtaattgcccgaatcctccatgggggaatgatagatcgacaaggtctacttcatgtgggagatataattaaagaagtcaatggccatgaggttggaaataatccaaaggaattacaagaattactgaaaaatattagtggaagtgtcaccctaaaaatcttaccaagttatagagataccattactcctcaacaggtatttgtgaagtgtcattttgattataatccatacaatgacaacctaataccttgcaaagaagcaggattgaagttttccaaaggagagattcttcagattgtaaatagagaagatccaaattggtggcaggctagccatgtaaaagagggaggaagcgctggtctcattccaagccagttcctggaagagaagagaaaggcatttgttagaagagactgggacaattcaggacctttttgtggaactataagtagcaaaaaaaagaaaaagatgatgtatctcacaaccagaaatgcagaatttgatcgtcatgaaatccagatatatgaggaggtagccaaaatgcctcccttccagagaaaaacattagtattgataggagctcaaggtgtaggccgaagaagcttgaaaaacaggttcatagtattgaatcccactagatttggaactacggtgccatttacttcacggaaaccaagggaagatgaaaaagatggccaggcatataagtttgtgtcacgatctgagatggaagcagatattaaagctggaaagtatttggaacatggggaatatgaaggaaatctctatggaaccaaaattgattctattcttgaggttgtccaaactggacggacttgcattctggatgtcaacccacaagcactgaaagtattgaggacatcagagtttatgccctatgtggtatttattgcggctccggagctagagacgttacgtgccatgcacaaggctgtggtggatgcaggaatcactaccaagcttctgaccgactctgacttgaagaaaacagtggatgaaagtgcacggattcagagagcatacaaccactattttgatttgatcatcataaatgataatctagacaaagcctttgaaaaactgcaaactgccatagagaaactgagaatggaaccacagtgggtcccaatcagctgggtttactgatgattcagtaaggttaacaatgaaaattaaactcttaaaaagtgactgcaacaaataaaccttctactgagaaaatacatcacagatagaagattatctgctaagtccaggcatttttatggtgtagattgaaataatagtacacttctgaatttttatataaaatgtggttggaaggtgtactaatatataatttatcttaatttttctaactttgtatggataatctttctattcatatcacataaagaaatgcgttgaagcattttgtatatgttttgatttagtacccttgcctttttcatcaaaggaattttcaaatcattcactctaacatt

SEQ ID NO: 407243 - DNA, 1188 bp, Homo sapiens
  misc_feature (1166)..(1166): n is a, c, g, or t
tgcgcgcgcggaggcagcggcgggggcgaccggagctggggcagagtggggagcgagggagggggaggagagagagggaggcggagggcagtgagagacgcatttccagttctcaactacgagccacgagtttgcagatggggctgctcggcggcgcctgtggctgagggagagcagcggcggcggggagcgaccgggagcggcggcagcggcggcgcggaggcggctgaggtgcgagccgcaatgcagcaagtcttggaaaaccttacggagctgccctcgtctactggagcagaagaaatagacctaattttcctcaagggaattatggagaatcctattgtaaaatcacttgctaaggctcatgagaggctagaagattccaaactagaagctgtcagtgacaataacttggaattagtcaatgaaattcttgaagacatcactcctctaataaatgtggatgaaaatgtggcagaattggttggtatactcaaagaacctcacttccagtcactgttggaggcccatgatattgtggcatcaaagtgttatgattcacctccatcaagcccagaaatgaataattcttctatcaataatcagttattaccagtagatgccattcgtattcttggtattcacaaaagagctggggaaccactgggtgtgacatttagggttgaaaataatgatctggtaattgcccgaatcctccatgggggaatgatagatcgacaaggtctacttcatgtgggagatataattaaagaagtcaatggccatgaggttggaaataatccaaaggaattacaagaattactgaaaaatattagtggaagtgtcaccctaaaaatcttaccaagttatagagataccattactcctcaacaggtatttgtgaagtgtcattttgattataatccatacaatgacaacctaataccttgcaaagaagcaggattgaagttttccaaaggagagattcttcagattgtaaatagagaagatccaaattggtggcaggctagccatgtaaaagagggaggaagcgctggtctcattccaagccagttcctggaagagaagagaaaggcatttgttagaagagactgggacaattcaggaccttttgtggacactataagtagcaaaaaaaaaaaaanaaaaaaaaaaaaaatttgtggg

SEQ ID NO: 407244 - DNA, 984 bp, Homo sapiens
tgcgcgcgcggaggcagcggcgggggcgaccggagctggggcagagtggggagcgagggagggggaggagagagagggaggcggagggcagtgagagacgcatttccagttctcaactacgagccacgagtttgcagatggggctgctcggcggcgcctgtggctgagggagagcagcggcggcggggagcgaccgggagcggcggcagcggcggcgcggaggcggctgaggtgcgagccgcaatgcagcaagtcttggaaaaccttacggagctgccctcgtctactggagcagaagaaatagacctaattttcctcaagggaattatggagaatcctattgtaaaatcacttgctaaggctcatgagaggctagaagattccaaactagaagctgtcagtgacaataacttggaattagtcaatgaaattcttgaagacatcactcctctaataaatgtggatgaaaatgtggcagaattggttggtatactcaaagaacctcacttccagtcactgttggaggcccatgatattgtggcatcaaagtgttatgattcacctccatcaagcccagaaatgaataattcttctatcaataatcagttattaccagtagatgccattcgtattcttggtattcacaaaagagctggggaaccactgggtgtgacatttagggttgaaaataatgatctggtaattgcccgaatcctccatgggggaatgatagatcgacaaggtctacttcatgtgggagatataattaaagaagtcaatggccatgaggttggaaataatccaaaggaattacaagaattactgaaaaatattagtggaagtgtcaccctaaaaatcttaccaagttatagagataccattactcctcaacaggttagtaataaaatttttggtagtattaaaaatactttcatgtttttaatcacagtgttggaaataactatcagttgctactattttgct

SEQ ID NO: 407245 - DNA, 2300 bp, Homo sapiens
tgcgcgcgcggaggcagcggcgggggcgaccggagctggggcagagtggggagcgagggagggggaggagagagagggaggcggagggcagtgagagacgcatttccagttctcaactacgagccacgagtttgcagatggggctgctcggcggcgcctgtggctgagggagagcagcggcggcggggagcgaccgggagcggcggcagcggcggcgcggaggcggctgaggtgcgagccggactaaatcattttgctactttaaaaaaatcacgaaagtacattatttgaagtttggagaagaaagggatttggtaacaaaggacagccatttccattttaagcagctaaacagcaggagagatttctgtaagaaggtaccagctcagattccattgttcatcattttgcaatgcagcaagtcttggaaaaccttacggagctgccctcgtctactggagcagaagaaatagacctaattttcctcaagggaattatggagaatcctattgtaaaatcacttgctaaggctcatgagaggctagaagattccaaactagaagctgtcagtgacaataacttggaattagtcaatgaaattcttgaagacatcactcctctaataaatgtggatgaaaatgtggcagaattggttggtatactcaaagaacctcacttccagtcactgttggaggcccatgatattgtggcatcaaagtgttatgattcacctccatcaagcccagaaatgaataattcttctatcaataatcagttattaccagtagatgccattcgtattcttggtattcacaaaagagctggggaaccactgggtgtgacatttagggttgaaaataatgatctggtaattgcccgaatcctccatgggggaatgatagatcgacaaggtctacttcatgtgggagatataattaaagaagtcaatggccatgaggttggaaataatccaaaggaattacaagaattactgaaaaatattagtggaagtgtcaccctaaaaatcttaccaagttatagagataccattactcctcaacaggtatttgtgaagtgtcattttgattataatccatacaatgacaacctaataccttgcaaagaagcaggattgaagttttccaaaggagagattcttcagattgtaaatagagaagatccaaattggtggcaggctagccatgtaaaagagggaggaagcgctggtctcattccaagccagttcctggaagagaagagaaaggcatttgttagaagagactgggacaattcaggacctttttgtggaactataagtagcaaaaaaaagaaaaagatgatgtatctcacaaccagaaatgcagaatttgatcgtcatgaaatccagatatatgaggaggtagccaaaatgcctcccttccagagaaaaacattagtattgataggagctcaaggtgtaggccgaagaagcttgaaaaacaggttcatagtattgaatcccactagatttggaactacggtgccatttacttcacggaaaccaagggaagatgaaaaagatggccaggcatataagtttgtgtcacgatctgagatggaagcagatattaaagctggaaagtatttggaacatggggaatatgaaggaaatctctatggaaccaaaattgattctattcttgaggttgtccaaactggacggacttgcattctggatgtcaacccacaagcactgaaagtattgaggacatcagagtttatgccctatgtggtatttattgcggctccggagctagagacgttacgtgccatgcacaaggctgtggtggatgcaggaatcactaccaagcttctgaccgactctgacttgaagaaaacagtggatgaaagtgcacggattcagagagcatacaaccactattttgatttgatcatcataaatgataatctagacaaagcctttgaaaaactgcaaactgccatagagaaactgagaatggaaccacagtgggtcccaatcagctgggtttactgatgattcagtaaggttaacaatgaaaattaaactcttaaaaagtgactgcaacaaataaaccttctactgagaaaatacatcacagatagaagattatctgctaagtccaggcatttttatggtgtagattgaaataatagtacacttctgaatttttatataaaatgtggttggaaggtgtactaatatataatttatcttaatttttctaactttgtatggataatctttctattcatatcacataaagaaatgcgttgaagca

SEQ ID NO: 407246 - DNA, 1714 bp, Homo sapiens
gtcgacccattggaataatgaaataacaaagtacttttagtaacaaatttcatccacatatcataaataaccacaggctattttgactccttatagtcactgttggaggcccatgatattgtggcatcaaagtgttatgattcacctccatcaagcccagaaatgaataattcttctatcaataatcagttattaccagtagatgccattcgtattcttggtattcacaaaagagctggggaaccactgggtgtgacatttagggttgaaaataatgatctggtaattgcccgaatcctccatgggggaatgatagatcgacaaggtctacttcatgtgggagatataattaaagaagtcaatggccatgaggttggaaataatccaaaggaattacaagaattactgaaaaatattagtggaagtgtcaccctaaaaatcttaccaagttatagagataccattactcctcaacaggtatttgtgaagtgtcattttgattataatccatacaatgacaacctaataccttgcaaagaagcaggattgaagttttccaaaggagagattcttcagattgtaaatagagaagatccaaattggtggcaggctagccatgtaaaagagggaggaagcgctggtctcattccaagccagttcctggaagagaagagaaaggcatttgttagaagagactgggacaattcaggacctttttgtggaactataagtagcaaaaaaaagaaaaagatgatgtatctcacaaccagaaatgcagaatttgatcgtcatgaaatccagatatatgaggaggtagccaaaatgcctcccttccagagaaaaacattagtattgataggagctcaaggtgtaggccgaagaagcttgaaaaacaggttcatagtattgaatcccactagatttggaactacggtgccatttacttcacggaaaccaagggaagatgaaaaagatggccaggcatataagtttgtgtcacgatctgagatggaagcagatattaaagctggaaagtatttggaacatggggaatatgaaggaaatctctatggaaccaaaattgattctattcttgaggttgtccaaactggacggacttgcattctggatgtcaacccacaagcactgaaagtattgaggacatcagagtttatgccctatgtggtatttattgcggctccggagctagagacgttacgtgccatgcacaaggctgtggtggatgcaggaatcactaccaagcttctgaccgactctgacttgaagaaaacagtggatgaaagtgcacggattcagagagcatacaaccactattttgatttgatcatcataaatgataatctagacaaagcctttgaaaaactgcaaactgccatagagaaactgagaatggaaccacagtgggtcccaatcagctgggtttactgatgattcagtaaggttaacaatgaaaattaaactcttaaaaagtgactgcaacaaataaaccttctactgagaaaatacatcacagatagaagattatctgctaagtccaggcatttttatggtgtagattgaaataatagtacacttctgaatttttatataaaatgtggttggaaggtgtactaatatataatttatcttaatttttctaactttgtatggataatctttctattcatatcacataaagaaatgcgttgaagca

SEQ ID NO: 407247 - DNA, 1353 bp, Homo sapiens
tgaagtactaaatacattgtcagttacaattaaatcagagtggtttgacaaggattttttaaattcagtggcaagtgatacaactatagtatttttaattgtgctatgtgttttaggtatttgtgaagtgtcattttgattataatccatacaatgacaacctaataccttgcaaagaagcaggattgaagttttccaaaggagagattcttcagattgtaaatagagaagatccaaattggtggcaggctagccatgtaaaagagggaggaagcgctggtctcattccaagccagttcctggaagagaagagaaaggcatttgttagaagagactgggacaattcaggacctttttgtggaactataagtagcaaaaaaaagaaaaagatgatgtatctcacaaccagaaatgcagaatttgatcgtcatgaaatccagatatatgaggaggtagccaaaatgcctcccttccagagaaaaacattagtattgataggagctcaaggtgtaggccgaagaagcttgaaaaacaggttcatagtattgaatcccactagatttggaactacggtgccatttacttcacggaaaccaagggaagatgaaaaagatggccaggcatataagtttgtgtcacgatctgagatggaagcagatattaaagctggaaagtatttggaacatggggaatatgaaggaaatctctatggaaccaaaattgattctattcttgaggttgtccaaactggacggacttgcattctggatgtcaacccacaagcactgaaagtattgaggacatcagagtttatgccctatgtggtatttattgcggctccggagctagagacgttacgtgccatgcacaaggctgtggtggatgcaggaatcactaccaagcttctgaccgactctgacttgaagaaaacagtggatgaaagtgcacggattcagagagcatacaaccactattttgatttgatcatcataaatgataatctagacaaagcctttgaaaaactgcaaactgccatagagaaactgagaatggaaccacagtgggtcccaatcagctgggtttactgatgattcagtaaggttaacaatgaaaattaaactcttaaaaagtgactgcaacaaataaaccttctactgagaaaatacatcacagatagaagattatctgctaagtccaggcatttttatggtgtagattgaaataatagtacacttctgaatttttatataaaatgtggttggaaggtgtactaatatataatttatcttaatttttctaactttgtatggataatctttctattcatatcacataaagaaatgcgttgaagca

SEQ ID NO: 407248 - DNA, 883 bp, Homo sapiens
caaggtgatgatgagaatagatctgcctgttttctaaaaactctccccactgtggtatctccaccaggcttttttatttcttttgtgaaattaagatctctgagcaaggactaatagaacaggtatggagaagagaaatgtgtctgccatattagtctagatgtcctcaaatgtctggaagggtagatggagaacttacatatttgtttattctaagacatcgtaagagacacagagcacttatattttgttctctttctttcttttttggagagggagtcttgctctgtcgtccaggctgtagtgcagtggcatgagctcagctcactgcaacctccacattcagggttcaagcaagtctcctgcctcagcctcctgagcagctgggattacaggtgtgtgctaccacgcccggctaatttttgtattttttagtagagatgggatttcaccatgttagccaggctggtctcgaactcctgacctcaacaattagtgaataagggtgtctgctctggtatctggctggcctggttacaaattccagcttgatcactttttagcagtgtgactataggaaaatcatgtagcctttctgtctctcggtttttccttaggaaaatagggatgctgataataccttgctcagggggttgtccaaagctgtgttgtgcagtatggcagccaccaccatatggggccaccaaacacttgcaatgtgctgcttggaattgagatgcgctgcaaacgcaaagtacgtgctggatttcaaagacttagtacaaaaagaaaaaagaacgcaaaacatctcattaataatttttgtattgattccatattgaaatatattgcatcaaataaaatatatctttaacattgaaat

SEQ ID NO: 407249 - DNA, 431 bp, Homo sapiens
ctatttttagacttttctttttagtaggaggctaaagtagcttaagctattaaggtttgttatgcttatgtctgcaggaagaagtagctaaaaacttgttagctgaatttaacttgggatgtgatgttcaccaaactgagcatgtgtatcgagtctatgtggccacgtttcttgggtttggtggcaatgctgtcctctgtcagagtactcaggatctcagtctagagagaatctagaaggagtgcctgggtactctgacagaggacagcagcagataaagtgttttttccatgacaaaactaccaagttccaagaccaaaaggtacacatagacctttcttacagacttagggcacaaaactgaaattcaccaacatgagagctgctgcctaacatgtacactggcttttgagaatgccttcttcttcttc

SEQ ID NO: 407250 - DNA, 5831 bp, Homo sapiens
  misc_feature (3592)..(3592): n is a, c, g, or t
agcgggcaggcggtgacgtgttgccggcgggggccgggcgggggtgcggctccaggaaaggagcgcggcctccaggaagccggctggccgtgatgctgcccactggtggtcccccgctcccggggtccccggccggccaagcaggagggctctaactccgtgaggaccccagcattatttctataattgtttgtgagaaggactgaatcccagagcattgccttgttgctgacctttcagtatggggaggattggcatctcctgtctttttcctgcttcttggcattttagcatatctccagtagggtgtcctcgaattctgaataccaatttacgccaaattatggtcattagtgtcctggctgctgctgtttcacttttatatttttctgttgtcataatccgaaataagtatgggcgactaaccagagacaagaaatttcaaaggtacctggcacgagttaccgacattgaagctacagacaccaataaccccaatgtgaactatgggatcgtggtggactgtggtagcagtgggtctcgagtatttgtttactgctggccaaggcataatggcaatccacatgatctgttggatatcaggcaaatgagggataaaaaccgaaagccagtggtcatgaagataaaaccgggcatttcagaatttgctacctctccagagaaagtcagtgattacatttctccacttttgaactttgctgcagagcatgtgccacgggcaaaacacaaagagacacctctctacattctctgcacggctggaatgagaatcctccccgaaagccagcagaaagctattctggaagaccttctgaccgatatccccgtgcactttgactttctgttttctgactctcatgcagaagtaatttctgggaaacaagaaggtgtgtatgcttggattggcattaattttgtccttggacgatttgagcatattgaagatgatgatgaggccgttgtggaagttaacattcctggaagtgaaagcagcgaagccattgtccgtaaaaggacagcgggcattctcgacatgggcggcgtgtcgactcagatagcgtacgaagtccccaaaactgaagaagtagctaaaaacttgttagctgaatttaacttgggatgtgatgttcaccaaactgagcatgtgtatcgagtctatgtggccacgtttcttgggtttggtggcaatgctgctcgacagagatacgaagacagaatatttgccaacaccattcaaaagaacaggctcctgggtaaacagactggtctgactcctgatatgccgtacttggacccctgcctacccctagacattaaagatgaaatccagcaaaatggacaaaccatatacctacgagggactggagactttgacctgtgtcgagagactatccagcctttcatgaataaaacaaacgagacccagacttccctcaatggggtctaccagcccccaattcacttccagaacagtgaattctatggcttctccgaattctactactgcaccgaggatgtgttacgaatggggggagactacaatgctgctaaatttactaaagctgcaaaggattattgtgcaacaaagtggtccattttgcgggaacgctttgaccgaggactgtacgcctctcatgctgacctccacaggcttaagtatcagtgcttcaaatcggcctggatgtttgaggtgtttcataggggcttttcgtttcctgtcaactataaaagcttaaagactgccttgcaagtttacgacaaggaggttcagtggacccttggagccatcctctacaggacccgctttctaccattaagagacatccagcaggaggccttccgagccagtcacacccactggcggggcgtttcctttgtctacaaccactacctgttctctggctgcttcctggtggtgctgctggccatcctgctgtacctgctgcggctgcggcgcatccacaggcgcactccccggagcagctcggccgccgccctctggatggaggagggccttcccgcccagaatgccccggggaccttgtgatccagctcacagctccacgaagactcaaaaggaaaagccatttttgcctcagggtttctcctctttattttcctgtggttttgttttttctttcccttttttgttcctccaaacaaaaacaaaatgcaggccgagcgcggtggctcacgcctgtaatcccagcactttgggaggccgaggcgggcggatcatgaggtcaggagatcgagaccatcctggctaacacggtgaaaccccgtctctactaaaaatacaaaaaattagctgggtgtggtggcgggcgcccgtagtcccagctactcaggaggctgaggcaggagaatggcatgaacctgggaggcagagcttgcagtgagccgagatcacaccactgcactccagcctgggcgacagagtgagactccgtctcaaaaaaaaaaaaaatgcattgtttataagccctgctgtctagaagtattgcgtttagccattttgagtacagcattaaattgaggagtggggaagagggaaattcacttgatttttgctgcacaggatatctgccaaaaataaatgagatttctggggtttctctaaggaatgttaaatttaaacacatgcactttgatactggagggaggtggaaagatgcattctgtcagtggagaggggactgaatagtgatgctttcatagaaccaaaaaacttactgcctgaaatgataatcctcttttttctctatcttgaaagctctaacctgaagagggtgatttttttttttatttattgttcaggtctgttactgtatatgttttctttgcaaatttaaattttttaaaccatttatatccaaaacagagaaacatgggcaccaggagataaccatttataaaagtgatagtgaactatcgactacagctttgtgcgagtgtgtgaaaaatcccaagaaaccagcgtgaggggaggcaatgctggttctttaaaaacacacacttcagaatttactggtacattttatttagaaaaatcctcgttactgttatcttttcctgaccgcaggtaattacgctccttattccatatttcagtggcattagaacactgtggttttgaaagaattggaaattcctagtttcaccagtttcggttttattggaactagagcacatgcccacttcttgctcagtattcctcagtgtttctgcttaatcgtgcctcagtttcttccagcttccaattggtgtttcccccaccccccttaattaaaagtcatctcagcttttaatcgtactgggagaccccatgcacagcctgccgagtcctcttcctaaccgcattgactgaggctgttgctggcagcaccactgtaaatccagaagggaagagtctgcatccaatacaggaaataaattcacattttgaaggaaaaaattcgacaatttaagccaaaatctaaaaaggacaattggattggcatatgtgagattggtgttttttcacctatttatttagttgagaagtttggggaattctcgtacagttttnttaggtggagtttgttttgtgcgagtgtctgtgtgtgctgttccctaactccagaacagttaaattcctgtagttggtagcagattagtacccagaagtggggttgttgctataacagataactgaggatattataaaagtggctttggaactaggtactgggcagaggctgggagagtttggagaaacaggagagaaaaggcctgtattgccatgaactgagcattaggggcagttctgctgagggatcagaagagaagaccaagggaattctgtcccagttgtggctcaaactgcctcaggtgcagcttaacctgcgtctctggaaggtaaaatgcatctgatccttgaggcaagagctgtgggggcatggctccctcacctggatttcaaagcgtgttaccagcagcctggggacccaggctctgcctctggatttacctgcatcgtatttgcgcttcgtggtcaaagttgttaagaaaggggtgagcttctggctacctaataagttggtcttggccacctgcctgcgacacttcctggaggagccatggattattggtggaggctgcagggagctggcgatggagccactggtgtcagcagcagagagggaagaaaggaaaggaaggggccacaaatggttgaagtgggcaggtgggcacccagggagttaggggaccccgccttccagctctgggcatagaagagttagtcacatacctgaggatcctgaaacaagggctgagaaaacctcattgctccagctgagaggtagtagtggatttgccatttttaaacagttgcctaagaaaaaacgttgaagaatatgcagcagacactatatgtggcctgtaaagcctagaatatttactaaaatatttacagaaaaagtttgctggtccttgtgagaacaatgcagttcaaaaaaggatacagacagaagcatcctcttaaatcaggaatgtagtttccatttgtgggcacgaaaagatggacaagagaagtaaccaaacttcaatcttaaaatatttgttgcaccagaatttcacttcggatttttccgtctagattattttcaagatgagttttgaaacaaaccaagaaacctgcccctcacccaaaattgtttaaaaagagaccactcaagggagttcattatgccgtatggagatgtctgcagtcgcagcaaatcacattccagagaaggtctcgcgtaggtgaagacagccaggtgctttctctaagagatacagggtgggtgagagacaagccagggaggatcttaattcaagagaagaattcataccaagagctgaccaagaaggcagtaaattctgtgtacttgtagcagaagaaattggactaggaacttgcccaaagctttatcaaagaaaagcattgtgttcaatcttggtagaaacatgccagcaataagtgcttatgttccatagccatatcatgggcttctcacttttaaacctcctccaggggatgttctcagacatttcacaatccctctggggacattacagtagaagagaaacacatggaactgtaccagtgctttttgcccatgttcatcctaagctccggctttaggcagtgctttctgacctgggcggagtgaagacgctgctggtggctgaggccagtaacatggggcccctgcccagccaccctgaaggctgggtaggtccctcttttcaccaccagttttccacacctgtgtactctagattaacaaactctggataaacagatatttacattttaaactcaggcctacacagagtagttttccttataaggagcatgtatcacttagcaagaaactaaaaatggcaaatgagtttttcatcctttaagaaaaaaatcagctttagaattctctgcggtcagttgtgtgcaatgcaacaaaactacctttcagtaaattacttagttatttatttcagtgttttgtttcttttgatactaagtttccctttcaataatgaatgatgtgaccaaccaaggagaatttgtttgttctgtactaaaattatattttacagttaggaattataaaaagcaagggagcatctttaaatgttttttgtttaagcgatgtcttccatccaaagtaagaataatactctcggaaggtccttttggtgtcatgtcacttgctgtatgtggcagccttacagtgccacacttgggtactgaaaaatcaataaaacgaaagttcatcatc

SEQ ID NO: 407251 - DNA, 5855 bp, Homo sapiens
  misc_feature (3616)..(3616): n is a, c, g, or t
agcgggcaggcggtgacgtgttgccggcgggggccgggcgggggtgcggctccaggaaaggagcgcggcctccaggaagccggctggccgtgatgctgcccactggtggtcccccgctcccggggtccccggccggccaagcaggagggctctaactccgtgaggaccccagcattatttctataattgtttgtgagaaggactgaatcccagagcattgccttgttgctgacctttcagtatggggaggattggcatctcctgtctttttcctgcttcttggcattttagcatatctccagtagggtgtcctcgaattctgaataccaatttacgccaaattatggtcattagtgtcctggctgctgctgtttcacttttatatttttctgttgtcataatccgaaataagtatgggcgactaaccagagacaagaaatttcaaaggtacctggcacgagttaccgacattgaagctacagacaccaataaccccaatgtgaactatgggatcgtggtggactgtggtagcagtgggtctcgagtatttgtttactgctggccaaggcataatggcaatccacatgatctgttggatatcaggcaaatgagggataaaaaccgaaagccagtggtcatgaagataaaaccgggcatttcagaatttgctacctctccagagaaagtcagtgattacatttctccacttttgaactttgctgcagagcatgtgccacgggcaaaacacaaagagacacctctctacattctctgcacggctggaatgagaatcctccccgaaagccagcagaaagctattctggaagaccttctgaccgatatccccgtgcactttgactttctgttttctgactctcatgcagaagtaatttctgggaaacaagaaggtgtgtatgcttggattggcattaattttgtccttggacgatttgagcatattgaagatgatgatgaggccgttgtggaagttaacattcctggaagtgaaagcagcgaagccattgtccgtaaaaggacagcgggcattctcgacatgggcggcgtgtcgactcagatagcgtacgaagtccccaaaactgtaagctttgcgtcctcacagcaggaagaagtagctaaaaacttgttagctgaatttaacttgggatgtgatgttcaccaaactgagcatgtgtatcgagtctatgtggccacgtttcttgggtttggtggcaatgctgctcgacagagatacgaagacagaatatttgccaacaccattcaaaagaacaggctcctgggtaaacagactggtctgactcctgatatgccgtacttggacccctgcctacccctagacattaaagatgaaatccagcaaaatggacaaaccatatacctacgagggactggagactttgacctgtgtcgagagactatccagcctttcatgaataaaacaaacgagacccagacttccctcaatggggtctaccagcccccaattcacttccagaacagtgaattctatggcttctccgaattctactactgcaccgaggatgtgttacgaatggggggagactacaatgctgctaaatttactaaagctgcaaaggattattgtgcaacaaagtggtccattttgcgggaacgctttgaccgaggactgtacgcctctcatgctgacctccacaggcttaagtatcagtgcttcaaatcggcctggatgtttgaggtgtttcataggggcttttcgtttcctgtcaactataaaagcttaaagactgccttgcaagtttacgacaaggaggttcagtggacccttggagccatcctctacaggacccgctttctaccattaagagacatccagcaggaggccttccgagccagtcacacccactggcggggcgtttcctttgtctacaaccactacctgttctctggctgcttcctggtggtgctgctggccatcctgctgtacctgctgcggctgcggcgcatccacaggcgcactccccggagcagctcggccgccgccctctggatggaggagggccttcccgcccagaatgccccggggaccttgtgatccagctcacagctccacgaagactcaaaaggaaaagccatttttgcctcagggtttctcctctttattttcctgtggttttgttttttctttcccttttttgttcctccaaacaaaaacaaaatgcaggccgagcgcggtggctcacgcctgtaatcccagcactttgggaggccgaggcgggcggatcatgaggtcaggagatcgagaccatcctggctaacacggtgaaaccccgtctctactaaaaatacaaaaaattagctgggtgtggtggcgggcgcccgtagtcccagctactcaggaggctgaggcaggagaatggcatgaacctgggaggcagagcttgcagtgagccgagatcacaccactgcactccagcctgggcgacagagtgagactccgtctcaaaaaaaaaaaaaatgcattgtttataagccctgctgtctagaagtattgcgtttagccattttgagtacagcattaaattgaggagtggggaagagggaaattcacttgatttttgctgcacaggatatctgccaaaaataaatgagatttctggggtttctctaaggaatgttaaatttaaacacatgcactttgatactggagggaggtggaaagatgcattctgtcagtggagaggggactgaatagtgatgctttcatagaaccaaaaaacttactgcctgaaatgataatcctcttttttctctatcttgaaagctctaacctgaagagggtgatttttttttttatttattgttcaggtctgttactgtatatgttttctttgcaaatttaaattttttaaaccatttatatccaaaacagagaaacatgggcaccaggagataaccatttataaaagtgatagtgaactatcgactacagctttgtgcgagtgtgtgaaaaatcccaagaaaccagcgtgaggggaggcaatgctggttctttaaaaacacacacttcagaatttactggtacattttatttagaaaaatcctcgttactgttatcttttcctgaccgcaggtaattacgctccttattccatatttcagtggcattagaacactgtggttttgaaagaattggaaattcctagtttcaccagtttcggttttattggaactagagcacatgcccacttcttgctcagtattcctcagtgtttctgcttaatcgtgcctcagtttcttccagcttccaattggtgtttcccccaccccccttaattaaaagtcatctcagcttttaatcgtactgggagaccccatgcacagcctgccgagtcctcttcctaaccgcattgactgaggctgttgctggcagcaccactgtaaatccagaagggaagagtctgcatccaatacaggaaataaattcacattttgaaggaaaaaattcgacaatttaagccaaaatctaaaaaggacaattggattggcatatgtgagattggtgttttttcacctatttatttagttgagaagtttggggaattctcgtacagttttnttaggtggagtttgttttgtgcgagtgtctgtgtgtgctgttccctaactccagaacagttaaattcctgtagttggtagcagattagtacccagaagtggggttgttgctataacagataactgaggatattataaaagtggctttggaactaggtactgggcagaggctgggagagtttggagaaacaggagagaaaaggcctgtattgccatgaactgagcattaggggcagttctgctgagggatcagaagagaagaccaagggaattctgtcccagttgtggctcaaactgcctcaggtgcagcttaacctgcgtctctggaaggtaaaatgcatctgatccttgaggcaagagctgtgggggcatggctccctcacctggatttcaaagcgtgttaccagcagcctggggacccaggctctgcctctggatttacctgcatcgtatttgcgcttcgtggtcaaagttgttaagaaaggggtgagcttctggctacctaataagttggtcttggccacctgcctgcgacacttcctggaggagccatggattattggtggaggctgcagggagctggcgatggagccactggtgtcagcagcagagagggaagaaaggaaaggaaggggccacaaatggttgaagtgggcaggtgggcacccagggagttaggggaccccgccttccagctctgggcatagaagagttagtcacatacctgaggatcctgaaacaagggctgagaaaacctcattgctccagctgagaggtagtagtggatttgccatttttaaacagttgcctaagaaaaaacgttgaagaatatgcagcagacactatatgtggcctgtaaagcctagaatatttactaaaatatttacagaaaaagtttgctggtccttgtgagaacaatgcagttcaaaaaaggatacagacagaagcatcctcttaaatcaggaatgtagtttccatttgtgggcacgaaaagatggacaagagaagtaaccaaacttcaatcttaaaatatttgttgcaccagaatttcacttcggatttttccgtctagattattttcaagatgagttttgaaacaaaccaagaaacctgcccctcacccaaaattgtttaaaaagagaccactcaagggagttcattatgccgtatggagatgtctgcagtcgcagcaaatcacattccagagaaggtctcgcgtaggtgaagacagccaggtgctttctctaagagatacagggtgggtgagagacaagccagggaggatcttaattcaagagaagaattcataccaagagctgaccaagaaggcagtaaattctgtgtacttgtagcagaagaaattggactaggaacttgcccaaagctttatcaaagaaaagcattgtgttcaatcttggtagaaacatgccagcaataagtgcttatgttccatagccatatcatgggcttctcacttttaaacctcctccaggggatgttctcagacatttcacaatccctctggggacattacagtagaagagaaacacatggaactgtaccagtgctttttgcccatgttcatcctaagctccggctttaggcagtgctttctgacctgggcggagtgaagacgctgctggtggctgaggccagtaacatggggcccctgcccagccaccctgaaggctgggtaggtccctcttttcaccaccagttttccacacctgtgtactctagattaacaaactctggataaacagatatttacattttaaactcaggcctacacagagtagttttccttataaggagcatgtatcacttagcaagaaactaaaaatggcaaatgagtttttcatcctttaagaaaaaaatcagctttagaattctctgcggtcagttgtgtgcaatgcaacaaaactacctttcagtaaattacttagttatttatttcagtgttttgtttcttttgatactaagtttccctttcaataatgaatgatgtgaccaaccaaggagaatttgtttgttctgtactaaaattatattttacagttaggaattataaaaagcaagggagcatctttaaatgttttttgtttaagcgatgtcttccatccaaagtaagaataatactctcggaaggtccttttggtgtcatgtcacttgctgtatgtggcagccttacagtgccacacttgggtactgaaaaatcaataaaacgaaagttcatcatc

SEQ ID NO: 407252 - DNA, 2709 bp, Homo sapiens
agcgggcaggcggtgacgtgttgccggcgggggccgggcgggggtgcggctccaggaaaggagcgcggcctccaggaagccggctggccgtgatgctgcccactggtggtcccccgctcccggggtccccggccggccaagcaggagggctctaactccgtgaggaccccagcattatttctataattgtttgtgagaaggactgaatcccagagcattgccttgttgctgacctttcagtatggggaggattggcatctcctgtctttttcctgcttcttggcattttagcatatctccagtagggtgtcctcgaattctgaataccaatttacgccaaattatggtcattagtgtcctggctgctgctgtttcacttttatatttttctgttgtcataatccgaaataagtatgggcgactaaccagagacaagaaatttcaaaggtacctggcacgagttaccgacattgaagctacagacaccaataaccccaatgtgaactatgggatcgtggtggactgtggtagcagtgggtctcgagtatttgtttactgctggccaaggcataatggcaatccacatgatctgttggatatcaggcaaatgagggataaaaaccgaaagccagtggtcatgaagataaaaccgggcatttcagaatttgctacctctccagagaaagtcagtgattacatttctccacttttgaactttgctgcagagcatgtgccacgggcaaaacacaaagagacacctctctacattctctgcacggctggaatgagaatcctccccgaaagccagcagaaagctattctggaagaccttctgaccgatatccccgtgcactttgactttctgttttctgactctcatgcagaagtaatttctgggaaacaagaaggtgtgtatgcttggattggcattaattttgtccttggacgatttgagcatattgaagatgatgatgaggccgttgtggaagttaacattcctggaagtgaaagcagcgaagccattgtccgtaaaaggacagcgggcattctcgacatgggcggcgtgtcgactcagatagcgtacgaagtccccaaaactgtaagctttgcgtcctcacagcaggaagaagtagctaaaaacttgttagctgaatttaacttgggatgtgatgttcaccaaactgagcatgtgtatcgagtctatgtggccacgtttcttgggtttggtggcaatgctgctcgacagagatacgaagacagaatatttgccaacaccattcaaaagaacaggctcctgggtaaacagactggtctgactcctgatatgccgtacttggacccctgcctacccctagacattaaagatgaaatccagcaaaatggacaaaccatatacctacgagggactggagactttgacctgtgtcgagagactatccagcctttcatgaataaaacaaacgagacccagacttccctcaatggggtctaccagcccccaattcacttccagaacagtgaattctatggcttctccgaattctactactgcaccgaggatgtgttacgaatggggggagactacaatgctgctaaatttactaaagctgcaaaggattattgtgcaacaaagtggtccattttgcgggaacgctttgaccgaggactgtacgcctctcatgctgacctccacaggcttaagtatcagtgcttcaaatcggcctggatgtttgaggtgtttcataggggcttttcgtttcctgtcaactataaaagcttaaagactgccttgcaagtttacgacaaggaggttcagtggacccttggagccatcctctacaggacccgctttctaccattaagagacatccagcaggaggccttccgagccagtcacacccactggcggggcgtttcctttgtctacaaccactacctgttctctggctgcttcctggtggtgctgctggccatcctgctgtacctgctgcggctgcggcgcatccacaggcgcactccccggagcagctcggccgccgccctctggatggaggagggccttcccgcccagaatgccccggggaccttgtgatccagctcacagctccacgaagactcaaaaggaaaagccatttttgcctcagggtttctcctctttattttcctgtggttttgttttttctttcccttttttgttcctccaaacaaaaacaaaatgcaggccgagcgcggtggctcacgcctgtaatcccagcactttgggaggccgaggcgggcggatcatgaggtcaggagatcgagaccatcctggctaacacggtgaaaccccgtctctactaaaaatacaaaaaattagctgggtgtggtggcgggcgcccgtagtcccagctactcaggaggctgaggcaggagaatggcatgaacctgggaggcagagcttgcagtgagccgagatcacaccactgcactccagcctgggcgacagagtgagactccgtctcaaaaaaaaaaaaaatgcattgtttataagccctgctgtctagaagtattgcgtttagccattttgagtacagcattaaattgaggagtggggaagagggaaattcacttgatttttgctgcacaggatatctgccaaaaataaatgagatttctggggtttctctacaacaaaacaaaaaaacacaacaaacaaaacaaaaaaaacac

SEQ ID NO: 407253 - DNA, 5313 bp, Homo sapiens
  misc_feature (3074)..(3074): n is a, c, g, or t
caaatcggccgagctcgaattcgcgagtatttgtttactgctggccaaggcataatggcaatccacatgatctgttggatatcaggcaaatgagggataaaaaccgaaagccagtggtcatgaagataaaaccgggcatttcagaatttgctacctctccagagaaagtcagtgattacatttctccacttttgaactttgctgcagagcatgtgccacgggcaaaacacaaagagacacctctctacattctctgcacggctggaatgagaatcctccccgaaagccagcagaaagctattctggaagaccttctgaccgatatccccgtgcactttgactttctgttttctgactctcatgcagaagtaatttctgggaaacaagaaggtgtgtatgcttggattggcattaattttgtccttggacgatttgagcatattgaagatgatgatgaggccgttgtggaagttaacattcctggaagtgaaagcagcgaagccattgtccgtaaaaggacagcgggcattctcgacatgggcggcgtgtcgactcagatagcgtacgaagtccccaaaactgaagaagtagctaaaaacttgttagctgaatttaacttgggatgtgatgttcaccaaactgagcatgtgtatcgagtctatgtggccacgtttcttgggtttggtggcaatgctgctcgacagagatacgaagacagaatatttgccaacaccattcaaaagaacaggctcctgggtaaacagactggtctgactcctgatatgccgtacttggacccctgcctacccctagacattaaagatgaaatccagcaaaatggacaaaccatatacctacgagggactggagactttgacctgtgtcgagagactatccagcctttcatgaataaaacaaacgagacccagacttccctcaatggggtctaccagcccccaattcacttccagaacagtgaattctatggcttctccgaattctactactgcaccgaggatgtgttacgaatggggggagactacaatgctgctaaatttactaaagctgcaaaggattattgtgcaacaaagtggtccattttgcgggaacgctttgaccgaggactgtacgcctctcatgctgacctccacaggcttaagtatcagtgcttcaaatcggcctggatgtttgaggtgtttcataggggcttttcgtttcctgtcaactataaaagcttaaagactgccttgcaagtttacgacaaggaggttcagtggacccttggagccatcctctacaggacccgctttctaccattaagagacatccagcaggaggccttccgagccagtcacacccactggcggggcgtttcctttgtctacaaccactacctgttctctggctgcttcctggtggtgctgctggccatcctgctgtacctgctgcggctgcggcgcatccacaggcgcactccccggagcagctcggccgccgccctctggatggaggagggccttcccgcccagaatgccccggggaccttgtgatccagctcacagctccacgaagactcaaaaggaaaagccatttttgcctcagggtttctcctctttattttcctgtggttttgttttttctttcccttttttgttcctccaaacaaaaacaaaatgcaggccgagcgcggtggctcacgcctgtaatcccagcactttgggaggccgaggcgggcggatcatgaggtcaggagatcgagaccatcctggctaacacggtgaaaccccgtctctactaaaaatacaaaaaattagctgggtgtggtggcgggcgcccgtagtcccagctactcaggaggctgaggcaggagaatggcatgaacctgggaggcagagcttgcagtgagccgagatcacaccactgcactccagcctgggcgacagagtgagactccgtctcaaaaaaaaaaaaaatgcattgtttataagccctgctgtctagaagtattgcgtttagccattttgagtacagcattaaattgaggagtggggaagagggaaattcacttgatttttgctgcacaggatatctgccaaaaataaatgagatttctggggtttctctaaggaatgttaaatttaaacacatgcactttgatactggagggaggtggaaagatgcattctgtcagtggagaggggactgaatagtgatgctttcatagaaccaaaaaacttactgcctgaaatgataatcctcttttttctctatcttgaaagctctaacctgaagagggtgatttttttttttatttattgttcaggtctgttactgtatatgttttctttgcaaatttaaattttttaaaccatttatatccaaaacagagaaacatgggcaccaggagataaccatttataaaagtgatagtgaactatcgactacagctttgtgcgagtgtgtgaaaaatcccaagaaaccagcgtgaggggaggcaatgctggttctttaaaaacacacacttcagaatttactggtacattttatttagaaaaatcctcgttactgttatcttttcctgaccgcaggtaattacgctccttattccatatttcagtggcattagaacactgtggttttgaaagaattggaaattcctagtttcaccagtttcggttttattggaactagagcacatgcccacttcttgctcagtattcctcagtgtttctgcttaatcgtgcctcagtttcttccagcttccaattggtgtttcccccaccccccttaattaaaagtcatctcagcttttaatcgtactgggagaccccatgcacagcctgccgagtcctcttcctaaccgcattgactgaggctgttgctggcagcaccactgtaaatccagaagggaagagtctgcatccaatacaggaaataaattcacattttgaaggaaaaaattcgacaatttaagccaaaatctaaaaaggacaattggattggcatatgtgagattggtgttttttcacctatttatttagttgagaagtttggggaattctcgtacagttttnttaggtggagtttgttttgtgcgagtgtctgtgtgtgctgttccctaactccagaacagttaaattcctgtagttggtagcagattagtacccagaagtggggttgttgctataacagataactgaggatattataaaagtggctttggaactaggtactgggcagaggctgggagagtttggagaaacaggagagaaaaggcctgtattgccatgaactgagcattaggggcagttctgctgagggatcagaagagaagaccaagggaattctgtcccagttgtggctcaaactgcctcaggtgcagcttaacctgcgtctctggaaggtaaaatgcatctgatccttgaggcaagagctgtgggggcatggctccctcacctggatttcaaagcgtgttaccagcagcctggggacccaggctctgcctctggatttacctgcatcgtatttgcgcttcgtggtcaaagttgttaagaaaggggtgagcttctggctacctaataagttggtcttggccacctgcctgcgacacttcctggaggagccatggattattggtggaggctgcagggagctggcgatggagccactggtgtcagcagcagagagggaagaaaggaaaggaaggggccacaaatggttgaagtgggcaggtgggcacccagggagttaggggaccccgccttccagctctgggcatagaagagttagtcacatacctgaggatcctgaaacaagggctgagaaaacctcattgctccagctgagaggtagtagtggatttgccatttttaaacagttgcctaagaaaaaacgttgaagaatatgcagcagacactatatgtggcctgtaaagcctagaatatttactaaaatatttacagaaaaagtttgctggtccttgtgagaacaatgcagttcaaaaaaggatacagacagaagcatcctcttaaatcaggaatgtagtttccatttgtgggcacgaaaagatggacaagagaagtaaccaaacttcaatcttaaaatatttgttgcaccagaatttcacttcggatttttccgtctagattattttcaagatgagttttgaaacaaaccaagaaacctgcccctcacccaaaattgtttaaaaagagaccactcaagggagttcattatgccgtatggagatgtctgcagtcgcagcaaatcacattccagagaaggtctcgcgtaggtgaagacagccaggtgctttctctaagagatacagggtgggtgagagacaagccagggaggatcttaattcaagagaagaattcataccaagagctgaccaagaaggcagtaaattctgtgtacttgtagcagaagaaattggactaggaacttgcccaaagctttatcaaagaaaagcattgtgttcaatcttggtagaaacatgccagcaataagtgcttatgttccatagccatatcatgggcttctcacttttaaacctcctccaggggatgttctcagacatttcacaatccctctggggacattacagtagaagagaaacacatggaactgtaccagtgctttttgcccatgttcatcctaagctccggctttaggcagtgctttctgacctgggcggagtgaagacgctgctggtggctgaggccagtaacatggggcccctgcccagccaccctgaaggctgggtaggtccctcttttcaccaccagttttccacacctgtgtactctagattaacaaactctggataaacagatatttacattttaaactcaggcctacacagagtagttttccttataaggagcatgtatcacttagcaagaaactaaaaatggcaaatgagtttttcatcctttaagaaaaaaatcagctttagaattctctgcggtcagttgtgtgcaatgcaacaaaactacctttcagtaaattacttagttatttatttcagtgttttgtttcttttgatactaagtttccctttcaataatgaatgatgtgaccaaccaaggagaatttgtttgttctgtactaaaattatattttacagttaggaattataaaaagcaagggagcatctttaaatgttttttgtttaagcgatgtcttccatccaaagtaagaataatactctcggaaggtccttttggtgtcatgtcacttgctgtatgtggcagccttacagtgccacacttgggtactgaaaaatcaataaaacgaaagttcatcatc

SEQ ID NO: 407254 - DNA, 2126 bp, Homo sapiens
agcgggcaggcggtgacgtgttgccggcgggggccgggcgggggtgcggctccaggaaaggagcgcggcctccaggaagccggctggccgtgatgctgcccactggtggtcccccgctcccggggtccccggccggccaagcaggagggctctaactccgtgaggaccccagcattatttctataattgtttgtgagaaggactgaatcccagagcattgccttgttgctgacctttcagtatggggaggattggcatctcctgtctttttcctgcttcttggcattttagcatatctccagtagggtgtcctcgaattctgaataccaatttacgccaaattatggtcattagtgtcctggctgctgctgtttcacttttatatttttctgttgtcataatccgaaataagtatgggcgactaaccagagacaagaaatttcaaaggtacctggcacgagttaccgacattgaagctacagacaccaataaccccaatgtgaactatgggatcgtggtggactgtggtagcagtgggtctcgagtatttgtttactgctggccaaggcataatggcaatccacatgatctgttggatatcaggcaaatgagggataaaaaccgaaagccagtggtcatgaagataaaaccgggcatttcagaatttgctacctctccagagaaagtcagtgattacatttctccacttttgaactttgctgcagagcatgtgccacgggcaaaacacaaagagacacctctctacattctctgcacggctggaatgagaatcctccccgaaagccagcagaaagctattctggaagaccttctgaccgatatccccgtgcactttgactttctgttttctgactctcatgcagaagtaatttctgggaaacaagaaggtgtgtatgcttggattggcattaattttgtccttggacgatttgagcatattgaagatgatgatgaggccgttgtggaagttaacattcctggaagtgaaagcagcgaagccattgtccgtaaaaggacagcgggcattctcgacatgggcggcgtgtcgactcagatagcgtacgaagtccccaaaactgaagaagtagctaaaaacttgttagctgaatttaacttgggatgtgatgttcaccaaactgagcatgtgtatcgagtctatgtggccacgtttcttgggtttggtggcaatgctgctcgacagagatacgaagacagaatatttgccaacaccattcaaaagaacaggctcctgggtaaacagactggtctgactcctgatatgccgtacttggacccctgcctacccctagacattaaagatgaaatccagcaaaatggacaaaccatatacctacgagggactggagactttgacctgtgtcgagagactatccagcctttcatgaataaaacaaacgagacccagacttccctcaatggggtctaccagcccccaattcacttccagaacagtgaattctatggcttctccgaattctactactgcaccgaggatgtgttacgaatggggggagactacaatgctgctaaatttactaaagctgcaaaggattattgtgcaacaaagtggtccattttgcgggaacgctttgaccgaggactgtacgcctctcatgctgacctccacaggcttaagtatcagtgcttcaaatcggcctggatgtttgaggtgtttcataggggcttttcgtttcctgtcaactataaaagcttaaagactgccttgcaagtttacgacaaggaggttcagtggacccttggagccatcctctacaggacccgctttctaccattaagccatcggagaccagagccgccccctctgctcgagaaaggggctcagcggcggcggaagcggagggggaccaccgtggagagcgcggtcccagcccggccactgcggatccctgaaaccaaaggaagaaaaacgctgaggctcacggtcactgagttagtcaatgtggggactgaaacccatacctcttactccaggcccctcccctacaccactgctagcctgtccgtcctggaaccccaaaacaacatttgtcatctttggtggaatgaattagttattgatggtg

SEQ ID NO: 407255 - DNA, 1875 bp, Homo sapiens
agcgggcaggcggtgacgtgttgccggcgggggccgggcgggggtgcggctccaggaaaggagcgcggcctccaggaagccggctggccgtgatgctgcccactggtggtcccccgctcccggggtccccggccggccaagcaggagggctctaactccgtgaggaccccagcattatttctataattgtttgtgagaaggactgaatcccagagcattgccttgttgctgacctttcagtatggggaggattggcatctcctgtctttttcctgcttcttggcattttagcatatctccagtagggtgtcctcgaattctgaataccaatttacgccaaattatggtcattagtgtcctggctgctgctgtttcacttttatatttttctgttgtcataatccgaaataagtatgggcgactaaccagagacaagaaatttcaaaggtacctggcacgagttaccgacattgaagctacagacaccaataaccccaatgtgaactatgggatcgtggtggactgtggtagcagtgggtctcgagtatttgtttactgctggccaaggcataatggcaatccacatgatctgttggatatcaggcaaatgagggataaaaaccgaaagccagtggtcatgaagataaaaccgggcatttcagaatttgctacctctccagagaaagtcagtgattacatttctccacttttgaactttgctgcagagcatgtgccacgggcaaaacacaaagagacacctctctacattctctgcacggctggaatgagaatcctccccgaaagccagcagaaagctattctggaagaccttctgaccgatatccccgtgcactttgactttctgttttctgactctcatgcagaagtaatttctgggaaacaagaaggtgtgtatgcttggattggcattaattttgtccttggacgatttgagcatattgaagatgatgatgaggccgttgtggaagttaacattcctggaagtgaaagcagcgaagccattgtccgtaaaaggacagcgggcattctcgacatgggcggcgtgtcgactcagatagcgtacgaagtccccaaaactgaagaagtagctaaaaacttgttagctgaatttaacttgggatgtgatgttcaccaaactgagcatgtgtatcgagtctatgtggccacgtttcttgggtttggtggcaatgctgctcgacagagatacgaagacagaatatttgccaacaccattcaaaagaacaggctcctgggtaaacagactggtctgactcctgatatgccgtacttggacccctgcctacccctagacattaaagatgaaatccagcaaaatggacaaaccatatacctacgagggactggagactttgacctgtgtcgagagactatccagcctttcatgaataaaacaaacgagacccagacttccctcaatggggtctaccagcccccaattcacttccagaacagtgaattctatggcttctccgaattctactactgcaccgaggatgtgttacgaatggggggagactacaatgctgctaaatttactaaagctgcaaaggattattgtgcaacaaagtggtccattttgcgggaacgctttgaccgaggactgtacgcctctcatgctgacctccacaggcttaagtatcagtgcttcaaatcggcctggatgtttgaggtgtttcataggggcttttcgtttcctgtcaactataaaagcttaaagactgccttgcaagtttacgacaaggaggttcagtggacccttggagccatcctctacaggacccgctttctaccattaagaaagctcctgctgcttctgtaccccgcctgtccctc

SEQ ID NO: 407256 - DNA, 1047 bp, Homo sapiens
agcgggcaggcggtgacgtgttgccggcgggggccgggcgggggtgcggctccaggaaaggagcgcggcctccaggaagccggctggccgtgatgctgcccactggtggtcccccgctcccggggtccccggccggccaagcaggagggctctaactccgtgaggaccccagcattatttctataattgtttgtgagaaggactgaatcccagagcattgccttgttgctgacctttcagtatggggaggattggcatctcctgtctttttcctgcttcttggcattttagcatatctccagtagggtgtcctcgaattctgaataccaatttacgccaaattatggtcattagtgtcctggctgctgctgtttcacttttatatttttctgttgtcataatccgaaataagtatgggcgactaaccagagacaagaaatttcaaaggtacctggcacgagttaccgacattgaagctacagacaccaataaccccaatgtgaactatgggatcgtggtggactgtggtagcagtgggtctcgagtatttgtttactgctggccaaggcataatggcaatccacatgatctgttggatatcaggcaaatgagggataaaaaccgaaagccagtggtcatgaagataaaaccgggcatttcagaatttgctacctctccagagaaagtcagtgattacatttctccacttttgaactttgctgcagagcatgtgccacgggcaaaacacaaagagacacctctctacattctctgcacggctggaatgagaatcctccccgaaagccagcagaaagctattctggaagaccttctgaccgatatccccgtgcactttgactttctgttttctgactctcatgcagaagtaatttctgggaaacaagaaggtgtgtatgcttggattggcattaattttgtccttggacgatttgagcatattgaagatgatgatgagccaaacagctatttccagcgaatatataatcatccaccacatccaaccatgtctgttgatgaggtattaca

SEQ ID NO: 407257 - DNA, 6032 bp, Homo sapiens
  misc_feature (3616)..(3616): n is a, c, g, or t
agcgggcaggcggtgacgtgttgccggcgggggccgggcgggggtgcggctccaggaaaggagcgcggcctccaggaagccggctggccgtgatgctgcccactggtggtcccccgctcccggggtccccggccggccaagcaggagggctctaactccgtgaggaccccagcattatttctataattgtttgtgagaaggactgaatcccagagcattgccttgttgctgacctttcagtatggggaggattggcatctcctgtctttttcctgcttcttggcattttagcatatctccagtagggtgtcctcgaattctgaataccaatttacgccaaattatggtcattagtgtcctggctgctgctgtttcacttttatatttttctgttgtcataatccgaaataagtatgggcgactaaccagagacaagaaatttcaaaggtacctggcacgagttaccgacattgaagctacagacaccaataaccccaatgtgaactatgggatcgtggtggactgtggtagcagtgggtctcgagtatttgtttactgctggccaaggcataatggcaatccacatgatctgttggatatcaggcaaatgagggataaaaaccgaaagccagtggtcatgaagataaaaccgggcatttcagaatttgctacctctccagagaaagtcagtgattacatttctccacttttgaactttgctgcagagcatgtgccacgggcaaaacacaaagagacacctctctacattctctgcacggctggaatgagaatcctccccgaaagccagcagaaagctattctggaagaccttctgaccgatatccccgtgcactttgactttctgttttctgactctcatgcagaagtaatttctgggaaacaagaaggtgtgtatgcttggattggcattaattttgtccttggacgatttgagcatattgaagatgatgatgaggccgttgtggaagttaacattcctggaagtgaaagcagcgaagccattgtccgtaaaaggacagcgggcattctcgacatgggcggcgtgtcgactcagatagcgtacgaagtccccaaaactgtaagctttgcgtcctcacagcaggaagaagtagctaaaaacttgttagctgaatttaacttgggatgtgatgttcaccaaactgagcatgtgtatcgagtctatgtggccacgtttcttgggtttggtggcaatgctgctcgacagagatacgaagacagaatatttgccaacaccattcaaaagaacaggctcctgggtaaacagactggtctgactcctgatatgccgtacttggacccctgcctacccctagacattaaagatgaaatccagcaaaatggacaaaccatatacctacgagggactggagactttgacctgtgtcgagagactatccagcctttcatgaataaaacaaacgagacccagacttccctcaatggggtctaccagcccccaattcacttccagaacagtgaattctatggcttctccgaattctactactgcaccgaggatgtgttacgaatggggggagactacaatgctgctaaatttactaaagctgcaaaggattattgtgcaacaaagtggtccattttgcgggaacgctttgaccgaggactgtacgcctctcatgctgacctccacaggcttaagtatcagtgcttcaaatcggcctggatgtttgaggtgtttcataggggcttttcgtttcctgtcaactataaaagcttaaagactgccttgcaagtttacgacaaggaggttcagtggacccttggagccatcctctacaggacccgctttctaccattaagagacatccagcaggaggccttccgagccagtcacacccactggcggggcgtttcctttgtctacaaccactacctgttctctggctgcttcctggtggtgctgctggccatcctgctgtacctgctgcggctgcggcgcatccacaggcgcactccccggagcagctcggccgccgccctctggatggaggagggccttcccgcccagaatgccccggggaccttgtgatccagctcacagctccacgaagactcaaaaggaaaagccatttttgcctcagggtttctcctctttattttcctgtggttttgttttttctttcccttttttgttcctccaaacaaaaacaaaatgcaggccgagcgcggtggctcacgcctgtaatcccagcactttgggaggccgaggcgggcggatcatgaggtcaggagatcgagaccatcctggctaacacggtgaaaccccgtctctactaaaaatacaaaaaattagctgggtgtggtggcgggcgcccgtagtcccagctactcaggaggctgaggcaggagaatggcatgaacctgggaggcagagcttgcagtgagccgagatcacaccactgcactccagcctgggcgacagagtgagactccgtctcaaaaaaaaaaaaaatgcattgtttataagccctgctgtctagaagtattgcgtttagccattttgagtacagcattaaattgaggagtggggaagagggaaattcacttgatttttgctgcacaggatatctgccaaaaataaatgagatttctggggtttctctaaggaatgttaaatttaaacacatgcactttgatactggagggaggtggaaagatgcattctgtcagtggagaggggactgaatagtgatgctttcatagaaccaaaaaacttactgcctgaaatgataatcctcttttttctctatcttgaaagctctaacctgaagagggtgatttttttttttatttattgttcaggtctgttactgtatatgttttctttgcaaatttaaattttttaaaccatttatatccaaaacagagaaacatgggcaccaggagataaccatttataaaagtgatagtgaactatcgactacagctttgtgcgagtgtgtgaaaaatcccaagaaaccagcgtgaggggaggcaatgctggttctttaaaaacacacacttcagaatttactggtacattttatttagaaaaatcctcgttactgttatcttttcctgaccgcaggtaattacgctccttattccatatttcagtggcattagaacactgtggttttgaaagaattggaaattcctagtttcaccagtttcggttttattggaactagagcacatgcccacttcttgctcagtattcctcagtgtttctgcttaatcgtgcctcagtttcttccagcttccaattggtgtttcccccaccccccttaattaaaagtcatctcagcttttaatcgtactgggagaccccatgcacagcctgccgagtcctcttcctaaccgcattgactgaggctgttgctggcagcaccactgtaaatccagaagggaagagtctgcatccaatacaggaaataaattcacattttgaaggaaaaaattcgacaatttaagccaaaatctaaaaaggacaattggattggcatatgtgagattggtgttttttcacctatttatttagttgagaagtttggggaattctcgtacagttttnttaggtggagtttgttttgtgcgagtgtctgtgtgtgctgttccctaactccagaacagttaaattcctgtagttggtagcagattagtacccagaagtggggttgttgctataacagataactgaggatattataaaagtggctttggaactaggtactgggcagaggctgggagagtttggagaaacaggagagaaaaggcctgtattgccatgaactgagcattaggggcagttctgctgagggatcagaagagaagaccaagggaattctgtcccagttgtggctcaaactgcctcaggtgcagcttaacctgcgtctctggaaggtaaaatgcatctgatccttgaggcaagagctgtgggggcatggctccctcacctggatttcaaagcgtgttaccagcagcctggggacccaggctctgcctctggatttacctgcatcgtatttgcgcttcgtggtcaaagttgttaagaaaggggtgagcttctggctacctaataagttggtcttggccacctgcctgcgacacttcctggaggagccatggattattggtggaggctgcagggagctggcgatggagccactggtgtcagcagcagagagggaagaaaggaaaggaaggggccacaaatggttgaagtgggcaggtgggcacccagggagttaggggaccccgccttccagctctgggcatagaagagttagtcacatacctgaggatcctgaaacaagggctgagaaaacctcattgctccagctgagaggtagtagtggatttgccatttttaaacagttgcctaagaaaaaacgttgaagaatatgcagcagacactatatgtggcctgtaaagcctagaatatttactaaaatatttacagaaaaagtttgctggtccttgtgagaacaatgcagttcaaaaaaggatacagacagaagcatcctcttaaatcaggaatgtagtttccatttgtgggcacgaaaagatggacaagagaagtaaccaaacttcaatcttaaaatatttgttgcaccagaatttcacttcggatttttccgtctagattattttcaagatgagttttgaaacaaaccaagaaacctgcccctcacccaaaattgtttaaaaagagaccactcaagggagttcattatgccgtatggagatgtctgcagtcgcagcaaatcacattccagagaaggtctcgcgtaggtgaagacagccaggtgctttctctaagagatacagggtgggtgagagacaagccagggaggatcttaattcaagagaagaattcataccaagagctgaccaagaaggcagtaaattctgtgtacttgtagcagaagaaattggactaggaacttgcccaaagctttatcaaagaaaagcattgtgttcaatcttggtagaaacatgccagcaataagtgcttatgttccatagccatatcatgggcttctcacttttaaacctcctccaggggatgttctcagacatttcacaatccctctggggacattacagtagaagagaaacacatggaactgtaccagtgctttttgcccatgttcatcctaagctccggctttaggcagtgctttctgacctgggcggagtgaagacgctgctggtggctgaggccagtaacatggggcccctgcccagccaccctgaaggctgggtaggtccctcttttcaccaccagttttccacacctgtgtactctagattaacaaactctggataaacagatatttacattttaaactcaggcctacacagagtagttttccttataaggagcatgtatcacttagcaagaaactaaaaatggcaaatgagtttttcatcctttaagaaaaaaatcagctttagaattctctgcggtcagttgtgtgcaatgcaacaaaactacctttcagtaaattacttagttatttatttcagtgttttgtttcttttgatactaagtttccctttcaataatgaatgatgtgaccaaccaaggagaatttgtttgttctgtactaaaattatattttacagttaggaattataaaaagcaagggagcatctttaaatgttttttgtttaagcgatgtcttccatccaaagtaagaataatactctcggaaggtccttttggtgtcatgtcacttgctgtatgtggcagccttacagtgccacacttgggtactgaaaaatcaataaaacgaaagttcatcatcaaaaaaacaacacagcacacaaccaagaaccacaacaccaacaacagcacccccccaccaaccgagcacaacagacaaaaccacaagcagagagacggggcggccaagaaaaacacgcgcgggcccacacagcagacccaacccagcaaaaaaagaagcagccaacggagaacacac

SEQ ID NO: 407258 - DNA, 4809 bp, Homo sapiens
  misc_feature (2570)..(2570): n is a, c, g, or t
ctatttttagacttttctttttagtaggaggctaaagtagcttaagctattaaggtttgttatgcttatgtctgcaggaagaagtagctaaaaacttgttagctgaatttaacttgggatgtgatgttcaccaaactgagcatgtgtatcgagtctatgtggccacgtttcttgggtttggtggcaatgctgctcgacagagatacgaagacagaatatttgccaacaccattcaaaagaacaggctcctgggtaaacagactggtctgactcctgatatgccgtacttggacccctgcctacccctagacattaaagatgaaatccagcaaaatggacaaaccatatacctacgagggactggagactttgacctgtgtcgagagactatccagcctttcatgaataaaacaaacgagacccagacttccctcaatggggtctaccagcccccaattcacttccagaacagtgaattctatggcttctccgaattctactactgcaccgaggatgtgttacgaatggggggagactacaatgctgctaaatttactaaagctgcaaaggattattgtgcaacaaagtggtccattttgcgggaacgctttgaccgaggactgtacgcctctcatgctgacctccacaggcttaagtatcagtgcttcaaatcggcctggatgtttgaggtgtttcataggggcttttcgtttcctgtcaactataaaagcttaaagactgccttgcaagtttacgacaaggaggttcagtggacccttggagccatcctctacaggacccgctttctaccattaagagacatccagcaggaggccttccgagccagtcacacccactggcggggcgtttcctttgtctacaaccactacctgttctctggctgcttcctggtggtgctgctggccatcctgctgtacctgctgcggctgcggcgcatccacaggcgcactccccggagcagctcggccgccgccctctggatggaggagggccttcccgcccagaatgccccggggaccttgtgatccagctcacagctccacgaagactcaaaaggaaaagccatttttgcctcagggtttctcctctttattttcctgtggttttgttttttctttcccttttttgttcctccaaacaaaaacaaaatgcaggccgagcgcggtggctcacgcctgtaatcccagcactttgggaggccgaggcgggcggatcatgaggtcaggagatcgagaccatcctggctaacacggtgaaaccccgtctctactaaaaatacaaaaaattagctgggtgtggtggcgggcgcccgtagtcccagctactcaggaggctgaggcaggagaatggcatgaacctgggaggcagagcttgcagtgagccgagatcacaccactgcactccagcctgggcgacagagtgagactccgtctcaaaaaaaaaaaaaatgcattgtttataagccctgctgtctagaagtattgcgtttagccattttgagtacagcattaaattgaggagtggggaagagggaaattcacttgatttttgctgcacaggatatctgccaaaaataaatgagatttctggggtttctctaaggaatgttaaatttaaacacatgcactttgatactggagggaggtggaaagatgcattctgtcagtggagaggggactgaatagtgatgctttcatagaaccaaaaaacttactgcctgaaatgataatcctcttttttctctatcttgaaagctctaacctgaagagggtgatttttttttttatttattgttcaggtctgttactgtatatgttttctttgcaaatttaaattttttaaaccatttatatccaaaacagagaaacatgggcaccaggagataaccatttataaaagtgatagtgaactatcgactacagctttgtgcgagtgtgtgaaaaatcccaagaaaccagcgtgaggggaggcaatgctggttctttaaaaacacacacttcagaatttactggtacattttatttagaaaaatcctcgttactgttatcttttcctgaccgcaggtaattacgctccttattccatatttcagtggcattagaacactgtggttttgaaagaattggaaattcctagtttcaccagtttcggttttattggaactagagcacatgcccacttcttgctcagtattcctcagtgtttctgcttaatcgtgcctcagtttcttccagcttccaattggtgtttcccccaccccccttaattaaaagtcatctcagcttttaatcgtactgggagaccccatgcacagcctgccgagtcctcttcctaaccgcattgactgaggctgttgctggcagcaccactgtaaatccagaagggaagagtctgcatccaatacaggaaataaattcacattttgaaggaaaaaattcgacaatttaagccaaaatctaaaaaggacaattggattggcatatgtgagattggtgttttttcacctatttatttagttgagaagtttggggaattctcgtacagttttnttaggtggagtttgttttgtgcgagtgtctgtgtgtgctgttccctaactccagaacagttaaattcctgtagttggtagcagattagtacccagaagtggggttgttgctataacagataactgaggatattataaaagtggctttggaactaggtactgggcagaggctgggagagtttggagaaacaggagagaaaaggcctgtattgccatgaactgagcattaggggcagttctgctgagggatcagaagagaagaccaagggaattctgtcccagttgtggctcaaactgcctcaggtgcagcttaacctgcgtctctggaaggtaaaatgcatctgatccttgaggcaagagctgtgggggcatggctccctcacctggatttcaaagcgtgttaccagcagcctggggacccaggctctgcctctggatttacctgcatcgtatttgcgcttcgtggtcaaagttgttaagaaaggggtgagcttctggctacctaataagttggtcttggccacctgcctgcgacacttcctggaggagccatggattattggtggaggctgcagggagctggcgatggagccactggtgtcagcagcagagagggaagaaaggaaaggaaggggccacaaatggttgaagtgggcaggtgggcacccagggagttaggggaccccgccttccagctctgggcatagaagagttagtcacatacctgaggatcctgaaacaagggctgagaaaacctcattgctccagctgagaggtagtagtggatttgccatttttaaacagttgcctaagaaaaaacgttgaagaatatgcagcagacactatatgtggcctgtaaagcctagaatatttactaaaatatttacagaaaaagtttgctggtccttgtgagaacaatgcagttcaaaaaaggatacagacagaagcatcctcttaaatcaggaatgtagtttccatttgtgggcacgaaaagatggacaagagaagtaaccaaacttcaatcttaaaatatttgttgcaccagaatttcacttcggatttttccgtctagattattttcaagatgagttttgaaacaaaccaagaaacctgcccctcacccaaaattgtttaaaaagagaccactcaagggagttcattatgccgtatggagatgtctgcagtcgcagcaaatcacattccagagaaggtctcgcgtaggtgaagacagccaggtgctttctctaagagatacagggtgggtgagagacaagccagggaggatcttaattcaagagaagaattcataccaagagctgaccaagaaggcagtaaattctgtgtacttgtagcagaagaaattggactaggaacttgcccaaagctttatcaaagaaaagcattgtgttcaatcttggtagaaacatgccagcaataagtgcttatgttccatagccatatcatgggcttctcacttttaaacctcctccaggggatgttctcagacatttcacaatccctctggggacattacagtagaagagaaacacatggaactgtaccagtgctttttgcccatgttcatcctaagctccggctttaggcagtgctttctgacctgggcggagtgaagacgctgctggtggctgaggccagtaacatggggcccctgcccagccaccctgaaggctgggtaggtccctcttttcaccaccagttttccacacctgtgtactctagattaacaaactctggataaacagatatttacattttaaactcaggcctacacagagtagttttccttataaggagcatgtatcacttagcaagaaactaaaaatggcaaatgagtttttcatcctttaagaaaaaaatcagctttagaattctctgcggtcagttgtgtgcaatgcaacaaaactacctttcagtaaattacttagttatttatttcagtgttttgtttcttttgatactaagtttccctttcaataatgaatgatgtgaccaaccaaggagaatttgtttgttctgtactaaaattatattttacagttaggaattataaaaagcaagggagcatctttaaatgttttttgtttaagcgatgtcttccatccaaagtaagaataatactctcggaaggtccttttggtgtcatgtcacttgctgtatgtggcagccttacagtgccacacttgggtactgaaaaatcaataaaacgaaagttcatcatc

SEQ ID NO: 407259 - DNA, 2225 bp, Homo sapiens
agcgggcaggcggtgacgtgttgccggcgggggccgggcgggggtgcggctccaggaaaggagcgcggcctccaggaagccggctggccgtgatgctgcccactggtggtcccccgctcccggggtccccggccggccaagcaggagggctctaactccgtgaggaccccagcattatttctataattgtttgtgagaaggactgaatcccagagcattgccttgttgctgacctttcagtatggggaggattggcatctcctgtctttttcctgcttcttggcattttagcatatctccagtagggtgtcctcgaattctgaataccaatttacgccaaattatggtcattagtgtcctggctgctgctgtttcacttttatatttttctgttgtcataatccgaaataagtatgggcgactaaccagagacaagaaatttcaaaggtacctggcacgagttaccgacattgaagctacagacaccaataaccccaatgtgaactatgggatcgtggtggactgtggtagcagtgggtctcgagtatttgtttactgctggccaaggcataatggcaatccacatgatctgttggatatcaggcaaatgagggataaaaaccgaaagccagtggtcatgaagataaaaccgggcatttcagaatttgctacctctccagagaaagtcagtgattacatttctccacttttgaactttgctgcagagcatgtgccacgggcaaaacacaaagagacacctctctacattctctgcacggctggaatgagaatcctccccgaaagccagcagaaagctattctggaagaccttctgaccgatatccccgtgcactttgactttctgttttctgactctcatgcagaagtaatttctgggaaacaagaaggtgtgtatgcttggattggcattaattttgtccttggacgatttgagcatattgaagatgatgatgaggccgttgtggaagttaacattcctggaagtgaaagcagcgaagccattgtccgtaaaaggacagcgggcattctcgacatgggcggcgtgtcgactcagatagcgtacgaagtccccaaaactgaagaagtagctaaaaacttgttagctgaatttaacttgggatgtgatgttcaccaaactgagcatgtgtatcgagtctatgtggccacgtttcttgggtttggtggcaatgctgctcgacagagatacgaagacagaatatttgccaacaccattcaaaagaacaggctcctgggtaaacagactggtctgactcctgatatgccgtacttggacccctgcctacccctagacattaaagatgaaatccagcaaaatggacaaaccatatacctacgagggactggagactttgacctgtgtcgagagactatccagcctttcatgaataaaacaaacgagacccagacttccctcaatggggtctaccagcccccaattcacttccagaacagtgaattctatggcttctccgaattctactactgcaccgaggatgtgttacgaatggggggagactacaatgctgctaaatttactaaagctgcaaaggattattgtgcaacaaagtggtccattttgcgggaacgctttgaccgaggactgtacgcctctcatgctgacctccacaggcttaagtatcagtgcttcaaatcggcctggatgtttgaggtgtttcataggggcttttcgtttcctgtcaactataaaagcttaaagactgccttgcaagtttacgacaaggaggttcagtggacccttggagccatcctctacaggacccgctttctaccattaagccatcggagaccagagccgccccctctgctcgagaaaggggctcagcggcggcggaagcggagggggaccaccgtggagagcgcggtcccagcccggccactgcggatccctgaaaccaagaaaatagggatgctgataataccttgctcagggggttgtccaaagctgtgttgtgcagtatggcagccaccaccatatggggccaccaaacacttgcaatgtgctgcttggaattgagatgcgctgcaaacgcaaagtacgtgctggatttcaaagacttagtacaaaaagaaaaaagaacgcaaaacatctcattaataatttttgtattgattccatattgaaatatattgcatcaaataaaatatatctttaacattgaaat

SEQ ID NO: 407260 - DNA, 1278 bp, Homo sapiens
agcgggcaggcggtgacgtgttgccggcgggggccgggcgggggtgcggctccaggaaaggagcgcggcctccaggaagccggctggccgtgatgctgcccactggtggtcccccgctcccggggtccccggccggccaagcaggagggctctaactccgtgaggaccccagcattatttctataattgtttgtgagaaggactgaatcccagagcattgccttgttgctgacctttcagtatggggaggattggcatctcctgtctttttcctgcttcttggcattttagcatatctccagtagggtgtcctcgaattctgaataccaatttacgccaaattatggtcattagtgtcctggctgctgctgtttcacttttatatttttctgttgtcataatccgaaataagtatgggcgactaaccagagacaagaaatttcaaaggtacctggcacgagttaccgacattgaagctacagacaccaataaccccaatgtgaactatgggatcgtggtggactgtggtagcagtgggtctcgagtatttgtttactgctggccaaggcataatggcaatccacatgatctgttggatatcaggcaaatgagggataaaaaccgaaagccagtggtcatgaagataaaaccgggcatttcagaatttgctacctctccagagaaagtcagtgattacatttctccacttttgaactttgctgcagagcatgtgccacgggcaaaacacaaagagacacctctctacattctctgcacggctggaatgagaatcctccccgaaagccagcagaaagctattctggaagaccttctgaccgatatccccgtgcactttgactttctgttttctgactctcatgcagaagtaatttctgggaaacaagaaggtgtgtatgcttggattggcattaattttgtccttggacgatttgagcatattgaagatgatgatgaggccgttgtggaagttaacattcctggaagtgaaagcagcgaagccattgtccgtaaaaggacagcgggcattctcgacatgggcggcgtgtcgactcagatagcgtacgaagtccccaaaactgaagaagtagctaaaaacttgttagctgaatttaacttgggatgtgatgttcaccaaactgagcatgtgtatcgagtctatgtggccacgtttcttgggtttggtggcaatgctatgctcaaatcgtccaaggacaaaattaatgccaatccaagcatacacacattcttgtttcccag

SEQ ID NO: 407261 - DNA, 339 bp, Homo sapiens
cctacgagggactggagactttgacctgtgtcgagagactatccagcctttcatgaataaaacaaacgagacccagacttccctcaatggggtctaccagcccccaattcacttccagaacagtgaattctatggcttctccgaattctactactgcaccgaggatgtgttacgaatggggggagactacaatgctgctaaatttactaaagctgcaaaggtacccttgagagacgccgtctgctctgcatgcttttgagagaccagtgtggacggtgacgggttatgtcctcctttcacattgacagggaaagacggagtatagaaggctgcactgca

SEQ ID NO: 407262 - DNA, 2043 bp, Homo sapiens
agggcccgggcccaccagctgcctgtcccctcagtgtccgacttcttggaggagttcccgggtgagggtcgtgagtgtgtcaactgcggggccctgtccacaccgctgtggcgccgagacggcaccggccactacctgtgcaatgcctgcggcctctaccacaagatgaatggcgtcaaccggccgctcgttcggcctcagaagcgcctgtcctcgtcccgccgcgccggcctctgctgcaccaactgccacacgaccaacaccacgctgtggcggcggaactcggagggggagcccgtgtgcaatgcctgcggcctctacatgaagctgcacggggtgccgcggcctctggctatgaagaaggaaagcatccagacacggaagcggaagccaaagaccatcgccaaggccaggggctcctcaggatccacaaggaatgcctcggcctccccatctgctgtcgccagcactgacagctcagcagccacttccaaagccaagcccagcctggcgtccccagtgtgccctgggcccagcatggccccccaggcctctggccaggaggatgactctcttgcccccggccacttggagttcaagttcgagcctgaggactttgccttcccctccacggccccgagcccccaggctggcctcaggggggctctgcgccaagaggcctggtgtgcgctggccttggcctaggtccccaggccagcccatgtcaggggaacagcctggaacagaccacccactgagtcacctccgtgcctgctttgctccagcacagcagagaccagcaggccccccaacccagagactgggtctgctggagtctccacacagtggtggggaggccttctggacagacggcagtcgggccccagagcaagaaggctggtgagggaagggctcagcttcccaccccacgtacagcaagggactccccaggtgcggcccaaggctccggaccacactggccccctgcggcggaggccaacgcagggcaccaccaccaccaacttgaattccgtcatcaatgctcaccgtcaatatgtttacaagttgtagcagttgggggaaaacagtcaacctcccagtgtaaaaccaagattcccagtgaagcacctgaggccaagcaggggagaggaatgaggggagcagctggacatgggcctcctgaggcctcggggctgtccttcattgcccacatggatagacggagctgtggtgcagagaacttttcccgcaacaggtgcaggactgccagggatcggagtgcgggccgcgcacggtgccaggattccgccgaggggaagccgctcacattgcagtcatcacagacttacgcacttgtttggacagtttttccagaggggatgggaaagggccttgttctagctgaatctgtgtatcatgaccatttctgacaggcagaatgaattgtctggtagccctgtcctgacccatccaagcgctgttggggctggtggtgacgtggtcacatgtcctggcatatctggggccacgcagtttagtctcttgtcccaggagaattgttagtgacccctctttctcttgcaagccccctccacactgggttggatgataccttaatgagtgacgctggcgagaggcaccctacccgacgcagctgtgaatggccggtgatgtatgtcaggaggccacagggagcggaggagcggggcaggcagccacagggccctgcggggagcacatcctcgcctccgtccggctgctgcccttcaacaacaagccctgatttttccagcaatgccagaaacctggattttaagtcttccaatttgattcaaaaatatttttaacattgtgagccagctagacccccagtgcaccaccccatattgaaaaacagttgtctggcatcagcttcaggagcggtccggtcattctgaaactgtccctccagaggttcttccagccccacttctatgcgatgtcatcttttctaaaagagacaaatgaagccacagggaaagtgaaataaagccttgaacctca

SEQ ID NO: 407263 - DNA, 556 bp, Homo sapiens
agggaaccggtcagaaatcccgggtcggactactataactaaattcggggccgggtcgcctcttgcaagccccctccacactgggttggatgataccttaatgagtgacgctggcgagaggcaccctacccgacgcagctgtgaatggccggtgatgtatgtcaggaggccacagggagcggaggagcggggcaggcagccacagggccctgcggggagcacatcctcgcctccgtccggctgctgcccttcaacaacaagccctgatttttccagcaatgccagaaacctggattttaagtcttccaatttgattcaaaaatatttttaacattgtgagccagctagacccccagtgcaccaccccatattgaaaaacagttgtctggcatcagcttcaggagcggtccggtcattctgaaactgtccctccagaggttcttccagccccacttctatgcgatgtcatcttttctaaaagagacaaatgaagccacagggaaagtgaaataaagccttgaacctcaaaaaaaaaaaagtcgacgcggccgcgaat

SEQ ID NO: 407264 - DNA, 1781 bp, Homo sapiens
  misc_feature (57)..(57): n is a, c, g, or t
ggccaaagaagccacgcccggccacaccacccacgcctgcggtgtgaccgtgagagntctccaaacctctctgggccggggcagaggagacccgctacatggcaggaaggggaagtgaggccacacctgacccctctgtaaacaccccctcttcgcttccaggatccacaaggaatgcctcggcctccccatctgctgtcgccagcactgacagctcagcagccacttccaaagccaagcccagcctggcgtccccagtgtgccctgggcccagcatggccccccaggcctctggccaggaggatgactctcttgcccccggccacttggagttcaagttcgagcctgaggactttgccttcccctccacggccccgagcccccaggctggcctcaggggggctctgcgccaagaggcctggtgtgcgctggccttggcctaggtccccaggccagcccatgtcaggggaacagcctggaacagaccacccactgagtcacctccgtgcctgctttgctccagcacagcagagaccagcaggccccccaacccagagactgggtctgctggagtctccacacagtggtggggaggccttctggacagacggcagtcgggccccagagcaagaaggctggtgagggaagggctcagcttcccaccccacgtacagcaagggactccccaggtgcggcccaaggctccggaccacactggccccctgcggcggaggccaacgcagggcaccaccaccaccaacttgaattccgtcatcaatgctcaccgtcaatatgtttacaagttgtagcagttgggggaaaacagtcaacctcccagtgtaaaaccaagattcccagtgaagcacctgaggccaagcaggggagaggaatgaggggagcagctggacatgggcctcctgaggcctcggggctgtccttcattgcccacatggatagacggagctgtggtgcagagaacttttcccgcaacaggtgcaggactgccagggatcggagtgcgggccgcgcacggtgccaggattccgccgaggggaagccgctcacattgcagtcatcacagacttacgcacttgtttggacagtttttccagaggggatgggaaagggccttgttctagctgaatctgtgtatcatgaccatttctgacaggcagaatgaattgtctggtagccctgtcctgacccatccaagcgctgttggggctggtggtgacgtggtcacatgtcctggcatatctggggccacgcagtttagtctcttgtcccaggagaattgttagtgacccctctttctcttgcaagccccctccacactgggttggatgataccttaatgagtgacgctggcgagaggcaccctacccgacgcagctgtgaatggccggtgatgtatgtcaggaggccacagggagcggaggagcggggcaggcagccacagggccctgcggggagcacatcctcgcctccgtccggctgctgcccttcaacaacaagccctgatttttccagcaatgccagaaacctggattttaagtcttccaatttgattcaaaaatatttttaacattgtgagccagctagacccccagtgcaccaccccatattgaaaaacagttgtctggcatcagcttcaggagcggtccggtcattctgaaactgtccctccagaggttcttccagccccacttctatgcgatgtcatcttttctaaaagagacaaatgaagccacagggaaagtgaaataaagccttgaacctca

SEQ ID NO: 407265 - DNA, 415 bp, Homo sapiens
ccacagaactgcccagctgaggcagcctaaattgctaacccactgaaccgtgagcatataaaatggtggttgatttatgcttctatctctgtctttaaggtttggtgtagcagtatataaatgatcctggcactaacccagcctgggcattttttcatgttcaaggaagttcttataacttaccccacacaagtttttagaatatttccaataaggctataatcagctaacttaaaactcttgcaggtcacatgataaacaatgctactatttatacaaatatgaagtcaaacaattttgaaaatttcatgttgaatgtatttcaaatatgaatttcaagcagatttatatttgaaagtattttgtttaattttacccattttattttgttgagacatttaaatcttacatgatt

SEQ ID NO: 407266 - DNA, 439 bp, Homo sapiens
ctgagtcgatctccacattcatctacatgaacgtgggggcgttggttttggcggccaggctgtaaaatgtagggcttgtctcagtttgctatttaatcaacatgtggacattttagcagagaaaccccagagcaaataggaatgagaagctacctgattaaaatgatgaaatgatagagaatgttttttggctgggacattttaaccaaagttgcacaactgatgctgattgccttccttgtagtttagtagaatttgtcatttgtttagctccttttcgttccagtgaaaatagataagctttactgagtggcttactttgaggtgtggactcctttgtaagtagctatagggtctcttcttgaacactgaccaaagaatccacctttaatcctattcagttaagttgaagcccctctaaaaaattttgttgttaata

SEQ ID NO: 407267 - DNA, 355 bp, Homo sapiens
taaggctgtttcagagtctgagttgacttctctttaatctacctatagaacttttaggtttcaaaaaatactttttaaatgactttttgggtttggaaagtacctttaatacatttaagctagttttcctcctggaaatatttagaatttcttccttaattggcaacctttatagaagtctggtaagatttgtcgcaaagatgtgccacagatggacacaaatttcccattcgggagcaatatcttaccacagtggtggctaaatgctagggacaaaatacaaggccggaactttccttccctcagataccttgtgctgtggtgttttgttgccactttctccctctcattttca

SEQ ID NO: 407268 - DNA, 287 bp, Homo sapiens
ctgagtcgatctccacattcatctacatgaacgtgggggcgttggttttggcggccaggctgtaaaatgtagggcttgtctcagtttgctatttaatcaacatgtggacattttagcagagaaaccccagagcaaataggaatgagaagctacctgattaaaatgatgaaatgatagagaatgttttttggctgggacattttaaccaaagttgcacaactgatgctgattgccttccttgtagtttagtagaatttgtcatttgtttagctccttttcgttccagt

SEQ ID NO: 407269 - DNA, 690 bp, Homo sapiens
cgcgcctggccagatccttattttttcaattgcaatacagcagtatgcaaggcacttactgtatgccaaagcttatgccgagagctggctgccagcagctcctcctgcctcgaggcctttgtccatgtcatcatttcccctttggctgtaacagctgcagttctctcataattttaggtttcatcttaaatgtcacttcttcagaggcttcttgacagcacaagtcagggcccttgttagtttcatcacatccattacctttccttgatcacttgtaccatcatctgtaatttatttttatgtttaatacgggtgtgggatttctgatttttttttttgctagactggaagctctcagagggcaggaaccatttgtttccctgccacagagatgttcaataaatattgtcaattgaatgtgcaaataatctcacttaaccacagctatgagggatgctattttatccccattttagagatgactaaactgaggcttagaacaattaacccaaggtcacagtgaattagtggatccatgtgtctgcctccacacagcctgtgtgttcttaattattgatcactaagcaacagctgcctctcacaaactggcaggaaacttcaacttttcccttttatcaatatattgtgaacgccttttcttgctaataaatatacatttgtgtgcgtaat

SEQ ID NO: 407270 - DNA, 485 bp, Homo sapiens
aggacaagccagaaaaggcgttcaccatatattgataaaagggaaaagttgaagtttcctgcccgtttgtgagaggcagctgtaatttatttttatgtttaatacgggtgtgggatttctgatttttttttttgctagactggaagctctcagagggcaggaaccatttgtttccctgccacagagatgttcaataaatattgtcaattgaatgtgcaaataatctcacttaaccacagctatgagggatgctattttatccccattttagagatgactaaactgaggcttagaacaattaacccaaggtcacagtgaattagtggatccatgtgtctgcctccacacagcctgtgtgttcttaattattgatcactaagcaacagctgcctctcacaaactggcaggaaacttcaacttttcccttttatcaatatattgtgaacgccttttcttgctaataaatatacatttgtgtgcgtaat

SEQ ID NO: 407271 - DNA, 1197 bp, Homo sapiens
agaagagctaaattgcctccccaaaatctctcctttactgtgtagttcatgacatgctccatccttgtgttttcctaaaagcctttaagtgcccctctcatttaagaaagtacaggaataatgaaccttagtgtctgagactaaaagttattgtactcttcctgagcacagtacaatctcaaatcctgaagaaagttgtgtttctgtcctttcactgctttgttctttggggtatattcactggattttggaattataagacaaaatttattgattacaccattctgttcagaaattcaaatattaaattatagacttcaaggcttttcttttctgatttaaaaagcaatgaagctgggtttcctctgaaaaaagtctcgtttgtttattacaaggcacactgtatcatggttccctggtttatatatcaccattactctgtaatgcctgcctctgtgtagatgtgacggaaagactgaccagtgattctttacacattgggaacctttgaagacctctttggtttgtagctgaaggaactttgcacagtagaattgcaaatcactgttgttctgagagtgacttgctctgccctaattggtctgtttgctgctgttgcttcttaatatttcaaagctatgcaaaatgatgtttccatgtgtctttatagcatttcttcacttcagcttacattagaacatctgcttaacccttttgctcttacctagcgtatgcccgcagagctgtcttgcctccaaatgtcatttttatttttgttaattaatggcatgctcttatctcactggtgatcttggggatcatagaattttagagttggatggcaccttaaaataggtaggatataaatacatttgtcagaaaaaaaaaagaaaatgaattcggggacacagttccaacaggtctaatatttcagtataatgaattatctttccaagaagattcaattaattatagagattgtgattgtatcagatgtcgcaaactatggcccactactgtatttgtttttgtaaataacatgttattggaacacagtcatgcccatttgtgtacatattgttatggctgcttttgtgcaatgatagagttgagtagttgcaatagagatcatatgtcctgaaaagcctaaaatattttgttgtctggtccttcacaaaaaacggttgctaatcccta

SEQ ID NO: 407272 - DNA, 514 bp, Homo sapiens
tccaccttatatgtgctgagagctgttctgctgccattttctctccctgcctcaagagcacatttaagtgcaagtgaatggggtgggattgtgattgttacactgagtgattgcttagaatctgccctaccgtatctgccggtgtataaaactctaccgatgttaccaaactctgagaggatgtgaagctctagttttcactgtgctgagctgattacctcatgtcgtcaccagggggcagcaccttcccatgcctttggacttaggagcctcggggcggtgggaagcccacaccaaaccccatgccttagctggtcacctcttaccttccaagcctgatccaagtttgggcaaaacggatgtaaatgtgtttttaattttttttttcttatttgagaggggggcaattggagggaggaaatacagcttatatgttggcatacacatttgaaatatttggtactttctaagcaggagttttatgtgtattctgtgttcttttctctactgagaa

SEQ ID NO: 407273 - DNA, 356 bp, Homo sapiens
caaacctatagatggcatttggaaagaagtacacgcataggcttcaaaaaaccctgaacaccagaaacctaattagcactttcattttaggggcacgggctttcccttatccttttctacagccaaccttaatggggtccaattaaggcaacaatgaaaggttacaaaagtctacaaaaaggtcccattacagcatttaaacagggttcattttttttaatcaaatagtttacactgtttttttgttgttgttgtttgttgttgttgttgtgtttgttttcttttttgagcctgttgcccaggctagagtgcaatggagtgatctcggctcactgcaactccagcctgggccacac

SEQ ID NO: 407274 - DNA, 384 bp, Homo sapiens
agaaaagggcaggctttggagtagctcagttgtattataaccttggcttctttactcacctaggacatacattctctctttagctgtagcttcctcccttctgagatggaaattataagccatctcacagtgttgtgaggattggagctcaagtgtgtaaaatgcctcctctgtgggctctccttggagagttcttgtatcctattgattgtcatcaaaggaaaaaagtggcaggatgatggcataagtgggaagaaccttgagtttaatagtctgaaaaagtggttacaggttcttgctatgcttttcctctctgtggttttctgaacccatcgcctaacctgaagccttaaacttcatctgcaaaaatgttttgtggcaggt

SEQ ID NO: 407275 - DNA, 632 bp, Homo sapiens
taccaaaaagagagagagagagagattagtaatctaagcctgagtacaaaagaacagtgaaaaaaaattaataaataaaagaatagtgacaaagaggaatttggcctctcagagtcagaaggatcataccctttaaaatggctataatggtaaattctgtattatgcatatttttccacaattttaaaaacaaaacacaactagccttttttggaaaaccacactcacactgtcttcttgggaaagaaattcaaaccatactccaaatcgaagctctcatgtgggttaaaaccacttttgttcctgtaagttgtttatttttatactattgtataaataactagtagaattctcttttataaatttaggtcactgttacttagcaggacattccaaggttttaaagaatatactaaaaggtcttctaagacataataaaatatttttccatgatatggataagcatcttggtgatttttgtaaattaaaattattcctaagcctttccttcctcccaaaataaggaaaatgcctatagaagatactgattttcctaagtgctatcaaataagtgatctcaatgtattatttaccaagaataaaaataggtaagctattatgcccttatggaa

SEQ ID NO: 407276 - DNA, 1506 bp, Homo sapiens
agcgggtccggggcggggctgtaccgggcgctgggcggaggagccttggctggggactgcctggaaacgggctgggcctgcctcggacgccgccggtgtcgcggattctctttccgcccgctccatggcggtggatgcctgactggaagcccgagtgggatgcggctgacgcggaagcggctctgctcgtttcttatcgccctgtactgcctattctccctctacgctgcctaccacgtcttcttcgggcgccgccgccaggcgccggccgggtccccgcggggcctcaggaagggggcggcccccgcgcgggagagacgcggccgagaacagtccactttggaaagtgaagaatggaatccttgggaaggagatgaaaaaaatgagcaacaacacagatttaaaactagccttcaaatattagataaatccacgaaaggaaaaacagatctcagtgtacaaatctggggcaaagctgccattggcttgtatctctgggagcatatttttgaaggcttacttgatcccagcgatgtgactgctcaatggagagaaggaaagtcaatcgtaggaagaacacagtacagcttcatcactggtccagctgtaataccagggtacttctccgttgatgtgaataatgtggtactcattttaaatggaagagaaaaagcaaagatcttttatgccacccagtggttactttatgcacaaaatttagtgcaaattcaaaaactccagcatcttgctgttgttttgctcggaaatgaacattgtgataatgagtggataaacccattcctcaaaagaaatggaggcttcgtggagctgcttttcataatatatgacagcccctggattaatgacgtggatgtttttcagtggcctttaggagtagcaacatacaggaattttcctgtggtggaggcaagttggtcaatgctgcatgatgagaggccatatttatgtaatttcttaggaacgatttatgaaaattcatccagacaggcactaatgaacattttgaaaaaagatgggaacgataagctttgttgggtttcagcaagagaacactggcagcctcaggaaacaaatgaaagtcttaagaattaccaagatgccttgcttcagagtgatctcacattgtgcccggtcggagtaaacacagaatgctatcgaatctatgaggcttgctcctatggctccattcctgtggtggaagacgtgatgacagctggcaactgtgggaatacatctgtgcaccacggtgctcctctgcagttactcaagtccatgggtgctccctttatctttatcaagaactggaaggaactccctgctgttttagaaaaagagaaaactataattttacaagaaaaaattgaaagaagaaaaatgttacttcagtggtatcagcacttcaagacagagcttaaaatgaaatttactaatattttagaaagctcatttttaatgaataataaaagttaattatctttttgagct

SEQ ID NO: 407277 - DNA, 2510 bp, Homo sapiens
ggactgggtcggcggcttccttccggctctgcgctcctggctggggctgctgggcggctggggccgggtccccgcacccggctctcaagtccgggattacccgcagggcctgagaagcgctttgccccctacagcctctcgagccagcccttggctcggaattggagaatggtcctcattcttacccagatctcacacgccgtccccgctcccgatcccagggggtgacaggcgcgcacgcctttcaaacacgtgttaaaatccaagacgtcgtctcaaatgccagagatttgcgggaatgctcctggaaggcctcaaaatcgccgcaagaacagtccactttggaaagtgaagaatggaatccttgggaaggagatgaaaaaaatgagcaacaacacagatttaaaactagccttcaaatattagataaatccacgaaaggaaaaacagatctcagtgtacaaatctggggcaaagctgccattggcttgtatctctgggagcatatttttgaaggcttacttgatcccagcgatgtgactgctcaatggagagaaggaaagtcaatcgtaggaagaacacagtacagcttcatcactggtccagctgtaataccagggtacttctccgttgatgtgaataatgtggtactcattttaaatggaagagaaaaagcaaagatcttttatgccacccagtggttactttatgcacaaaatttagtgcaaattcaaaaactccagcatcttgctgttgttttgctcggaaatgaacattgtgataatgagtggataaacccattcctcaaaagaaatggaggcttcgtggagctgcttttcataatatatgacagcccctggattaatgacgtggatgtttttcagtggcctttaggagtagcaacatacaggaattttcctgtggtggaggcaagttggtcaatgctgcatgatgagaggccatatttatgtaatttcttaggaacgatttatgaaaattcatccagacaggcactaatgaacattttgaaaaaagatgggaacgataagctttgttgggtttcagcaagagaacactggcagcctcaggaaacaaatgaaagtcttaagaattaccaagatgccttgcttcagagtgatctcacattgtgcccggtcggagtaaacacagaatgctatcgaatctatgaggcttgctcctatggctccattcctgtggtggaagacgtgatgacagctggcaactgtgggaatacatctgtgcaccacggtgctcctctgcagttactcaagtccatgggtgctccctttatctttatcaagaactggaaggaactccctgctgttttagaaaaagagaaaactataattttacaagaaaaaattgaaagaagaaaaatgttacttcagtggtatcagcacttcaagacagagcttaaaatgaaatttactaatattttagaaagctcatttttaatgaataataaaagttaattatctttttgagctaacatgtgatttttaaaatcattttgactactgggtgtataaatgtgtttgtgtgtgtatgtatttatagatgttctttaaggtacccttgaaaactctacattatgtatgccacataatgacatttcagtcagtggtagactacatatatgatagtggtcccataagattataatggagctgaaaaatttctatcgcctagtgatgtcatagcctagtgatgacatatgtattgcaatacatcactcacgtgtttgtggtgatactggtgtaaacaaatctattgcactgccagtcaagtaaaagtacagcaattatgtcctgtacataatatttaataatgacaataaatgactatgttactggtttatgtatttactatactatactttttacaatttgtattagttcttgcattgctatgaataaatgcctgagattgagtaatttaaaaaaaagaaaaaaaaaaaaaaaaaaaaaaaaaaaaaaaaaaaaaaaaaaaaaaaaaaaaaaaaaaaaaaaaaaaaaaaaaaaaaaaaaaaaaaaaaaaaaaaaaaaaaaaaaaaaagaaaaaaaaaaagaaaaaaaaaaaaaaaaagaaaggaagcgggcgggggggcgcttattatcatatgtttcttagtcatcggggagagccgaatattattagtcacaaccatccttttattgttattatgtgaacgaggaggggtctatgagatgtaggtgttattttgaaagaaagagaaagacatgtgggagatatataaaagttaataaagcatgttgagtggcaaaaaaattgtacttgtagtattaattgataaggaaaagattactaatttgattgaggagagggataaagaagaaaaaggagaaaaacacgatatttgtagaataatatgatagattagatgatggatatattaaataaaggataatggtggggcgaagtatatcgagtgatgcacagctacaccagtgatactatatagttaagag

SEQ ID NO: 407278 - DNA, 2674 bp, Homo sapiens
ggactgggtcggcggcttccttccggctctgcgctcctggctggggctgctgggcggctggggccgggtccccgcacccggctctcaagtccgggattacccgcagggcctgagaagcgctttgccccctacagcctctcgagccagcccttggctcggaattggagaatggtcctcattcttacccagatctcacacgccgtccccgctcccgatcccagggggtgacaggcgcgcacgcctttcaaacacgtgttaaaatccaagacgtcgtctcaaatgccagagatttgcgggaatgctcctggaaggcctcaaaatcgccgcaagaacagtccactttggaaagtgaagaatggaatccttgggaaggagatgaaaaaaatgagcaacaacacagatttaaaactagccttcaaatattagataaatccacgaaaggaaaaacagatctcagtgtacaaatctggggcaaagctgccattgtccaagctggcagcgtttctgctcataaaacattctgaagaaccttgtgggccctctgtgtatgtcacaggattcactccattagatgggaagctcctctgcagatcttttctgagtaatcccatctccatttctggcttctgctgagatggctgaggagacctgcttgtatctctgggagcatatttttgaaggcttacttgatcccagcgatgtgactgctcaatggagagaaggaaagtcaatcgtaggaagaacacagtacagcttcatcactggtccagctgtaataccagggtacttctccgttgatgtgaataatgtggtactcattttaaatggaagagaaaaagcaaagatcttttatgccacccagtggttactttatgcacaaaatttagtgcaaattcaaaaactccagcatcttgctgttgttttgctcggaaatgaacattgtgataatgagtggataaacccattcctcaaaagaaatggaggcttcgtggagctgcttttcataatatatgacagcccctggattaatgacgtggatgtttttcagtggcctttaggagtagcaacatacaggaattttcctgtggtggaggcaagttggtcaatgctgcatgatgagaggccatatttatgtaatttcttaggaacgatttatgaaaattcatccagacaggcactaatgaacattttgaaaaaagatgggaacgataagctttgttgggtttcagcaagagaacactggcagcctcaggaaacaaatgaaagtcttaagaattaccaagatgccttgcttcagagtgatctcacattgtgcccggtcggagtaaacacagaatgctatcgaatctatgaggcttgctcctatggctccattcctgtggtggaagacgtgatgacagctggcaactgtgggaatacatctgtgcaccacggtgctcctctgcagttactcaagtccatgggtgctccctttatctttatcaagaactggaaggaactccctgctgttttagaaaaagagaaaactataattttacaagaaaaaattgaaagaagaaaaatgttacttcagtggtatcagcacttcaagacagagcttaaaatgaaatttactaatattttagaaagctcatttttaatgaataataaaagttaattatctttttgagctaacatgtgatttttaaaatcattttgactactgggtgtataaatgtgtttgtgtgtgtatgtatttatagatgttctttaaggtacccttgaaaactctacattatgtatgccacataatgacatttcagtcagtggtagactacatatatgatagtggtcccataagattataatggagctgaaaaatttctatcgcctagtgatgtcatagcctagtgatgacatatgtattgcaatacatcactcacgtgtttgtggtgatactggtgtaaacaaatctattgcactgccagtcaagtaaaagtacagcaattatgtcctgtacataatatttaataatgacaataaatgactatgttactggtttatgtatttactatactatactttttacaatttgtattagttcttgcattgctatgaataaatgcctgagattgagtaatttaaaaaaaagaaaaaaaaaaaaaaaaaaaaaaaaaaaaaaaaaaaaaaaaaaaaaaaaaaaaaaaaaaaaaaaaaaaaaaaaaaaaaaaaaaaaaaaaaaaaaaaaaaaaaaaaaaaaagaaaaaaaaaaagaaaaaaaaaaaaaaaaagaaaggaagcgggcgggggggcgcttattatcatatgtttcttagtcatcggggagagccgaatattattagtcacaaccatccttttattgttattatgtgaacgaggaggggtctatgagatgtaggtgttattttgaaagaaagagaaagacatgtgggagatatataaaagttaataaagcatgttgagtggcaaaaaaattgtacttgtagtattaattgataaggaaaagattactaatttgattgaggagagggataaagaagaaaaaggagaaaaacacgatatttgtagaataatatgatagattagatgatggatatattaaataaaggataatggtggggcgaagtatatcgagtgatgcacagctacaccagtgatactatatagttaagag

SEQ ID NO: 407279 - DNA, 2454 bp, Homo sapiens
agcgggtccggggcggggctgtaccgggcgctgggcggaggagccttggctggggactgcctggaaacgggctgggcctgcctcggacgccgccggtgtcgcggattctctttccgcccgctccatggcggtggatgcctgactggaagcccgagtgggatgcggctgacgcggaagcggctctgctcgtttcttatcgccctgtactgcctattctccctctacgctgcctaccacgtcttcttcgggcgccgccgccaggcgccggccgggtccccgcggggcctcaggaagggggcggcccccgcgcgggagagacgcggccgagaacagtccactttggaaagtgaagaatggaatccttgggaaggagatgaaaaaaatgagcaacaacacagatttaaaactagccttcaaatattagataaatccacgaaaggaaaaacagatctcagtgtacaaatctggggcaaagctgccattggcttgtatctctgggagcatatttttgaaggcttacttgatcccagcgatgtgactgctcaatggagagaaggaaagtcaatcgtaggaagaacacagtacagcttcatcactggtccagctgtaataccagggtacttctccgttgatgtgaataatgtggtactcattttaaatggaagagaaaaagcaaagatcttttatgccacccagtggttactttatgcacaaaatttagtgcaaattcaaaaactccagcatcttgctgttgttttgctcggaaatgaacattgtgataatgagtggataaacccattcctcattaatgacgtggatgtttttcagtggcctttaggagtagcaacatacaggaattttcctgtggtggaggcaagttggtcaatgctgcatgatgagaggccatatttatgtaatttcttaggaacgatttatgaaaattcatccagacaggcactaatgaacattttgaaaaaagatgggaacgataagctttgttgggtttcagcaagagaacactggcagcctcaggaaacaaatgaaagtcttaagaattaccaagatgccttgcttcagagtgatctcacattgtgcccggtcggagtaaacacagaatgctatcgaatctatgaggcttgctcctatggctccattcctgtggtggaagacgtgatgacagctggcaactgtgggaatacatctgtgcaccacggtgctcctctgcagttactcaagtccatgggtgctccctttatctttatcaagaactggaaggaactccctgctgttttagaaaaagagaaaactataattttacaagaaaaaattgaaagaagaaaaatgttacttcagtggtatcagcacttcaagacagagcttaaaatgaaatttactaatattttagaaagctcatttttaatgaataataaaagttaattatctttttgagctaacatgtgatttttaaaatcattttgactactgggtgtataaatgtgtttgtgtgtgtatgtatttatagatgttctttaaggtacccttgaaaactctacattatgtatgccacataatgacatttcagtcagtggtagactacatatatgatagtggtcccataagattataatggagctgaaaaatttctatcgcctagtgatgtcatagcctagtgatgacatatgtattgcaatacatcactcacgtgtttgtggtgatactggtgtaaacaaatctattgcactgccagtcaagtaaaagtacagcaattatgtcctgtacataatatttaataatgacaataaatgactatgttactggtttatgtatttactatactatactttttacaatttgtattagttcttgcattgctatgaataaatgcctgagattgagtaatttaaaaaaaagaaaaaaaaaaaaaaaaaaaaaaaaaaaaaaaaaaaaaaaaaaaaaaaaaaaaaaaaaaaaaaaaaaaaaaaaaaaaaaaaaaaaaaaaaaaaaaaaaaaaaaaaaaaaagaaaaaaaaaaagaaaaaaaaaaaaaaaaagaaaggaagcgggcgggggggcgcttattatcatatgtttcttagtcatcggggagagccgaatattattagtcacaaccatccttttattgttattatgtgaacgaggaggggtctatgagatgtaggtgttattttgaaagaaagagaaagacatgtgggagatatataaaagttaataaagcatgttgagtggcaaaaaaattgtacttgtagtattaattgataaggaaaagattactaatttgattgaggagagggataaagaagaaaaaggagaaaaacacgatatttgtagaataatatgatagattagatgatggatatattaaataaaggataatggtggggcgaagtatatcgagtgatgcacagctacaccagtgatactatatagttaagag

SEQ ID NO: 407280 - DNA, 873 bp, Homo sapiens
ggcttccttccggctctgcgctcctggctggggctgctgggcggctggggccgggtccccgcacccggctctcaagtccgggattacccgcagggcctgagaagcgctttgccccctacagcctctcgagccagcccttggctcggaattggagaatggtcctcattcttacccagatctcacacgccgtccccgctcccgatcccagggggtgacaggcgcgcacgcctttcaaacacgtgttaaaatccaagacgtcgtctcaaatgccagagatttgcgggaatgctcctggaaggcctcaaaatcgccgcaaggtttaagacatccgtttccatgttgaaacaaagccctctctaatcctgcagtgaccataaggcagactttacctccaaattctggtcccctgtcctgtgttttaacttgtgttaagatcagactcggctttctctttccctttattcagaattttgcacgatagtatctaagactggtgaacactacactctgaagtcagttttttgtgcataggttacctgtatacaatggataaaaataattgcaaaagttaagcttgtaacttgatacatattatcctgttatttttaaaggttttgtgttggggaagagaattttcctgtctcaaggtagcattttatttctaagacttttcagagtaaaaaaagttcagtaaaaaaattgctgattttcttttttgttttcattgtgtattaccagtttaaattcagttgctgtacctctcagaaattaaagttaggatgaaattagaactaacacttaatttaaatgatttgaatttacctacaactgcaataataccttactggtaaacacttactctttttaaaacag

SEQ ID NO: 407281 - DNA, 2508 bp, Homo sapiens
agcgggtccggggcggggctgtaccgggcgctgggcggaggagccttggctggggactgcctggaaacgggctgggcctgcctcggacgccgccggtgtcgcggattctctttccgcccgctccatggcggtggatgcctgactggaagcccgagtgggatgcggctgacgcggaagcggctctgctcgtttcttatcgccctgtactgcctattctccctctacgctgcctaccacgtcttcttcgggcgccgccgccaggcgccggccgggtccccgcggggcctcaggaagggggcggcccccgcgcgggagagacgcggccgagaacagtccactttggaaagtgaagaatggaatccttgggaaggagatgaaaaaaatgagcaacaacacagatttaaaactagccttcaaatattagataaatccacgaaaggaaaaacagatctcagtgtacaaatctggggcaaagctgccattggcttgtatctctgggagcatatttttgaaggcttacttgatcccagcgatgtgactgctcaatggagagaaggaaagtcaatcgtaggaagaacacagtacagcttcatcactggtccagctgtaataccagggtacttctccgttgatgtgaataatgtggtactcattttaaatggaagagaaaaagcaaagatcttttatgccacccagtggttactttatgcacaaaatttagtgcaaattcaaaaactccagcatcttgctgttgttttgctcggaaatgaacattgtgataatgagtggataaacccattcctcaaaagaaatggaggcttcgtggagctgcttttcataatatatgacagcccctggattaatgacgtggatgtttttcagtggcctttaggagtagcaacatacaggaattttcctgtggtggaggcaagttggtcaatgctgcatgatgagaggccatatttatgtaatttcttaggaacgatttatgaaaattcatccagacaggcactaatgaacattttgaaaaaagatgggaacgataagctttgttgggtttcagcaagagaacactggcagcctcaggaaacaaatgaaagtcttaagaattaccaagatgccttgcttcagagtgatctcacattgtgcccggtcggagtaaacacagaatgctatcgaatctatgaggcttgctcctatggctccattcctgtggtggaagacgtgatgacagctggcaactgtgggaatacatctgtgcaccacggtgctcctctgcagttactcaagtccatgggtgctccctttatctttatcaagaactggaaggaactccctgctgttttagaaaaagagaaaactataattttacaagaaaaaattgaaagaagaaaaatgttacttcagtggtatcagcacttcaagacagagcttaaaatgaaatttactaatattttagaaagctcatttttaatgaataataaaagttaattatctttttgagctaacatgtgatttttaaaatcattttgactactgggtgtataaatgtgtttgtgtgtgtatgtatttatagatgttctttaaggtacccttgaaaactctacattatgtatgccacataatgacatttcagtcagtggtagactacatatatgatagtggtcccataagattataatggagctgaaaaatttctatcgcctagtgatgtcatagcctagtgatgacatatgtattgcaatacatcactcacgtgtttgtggtgatactggtgtaaacaaatctattgcactgccagtcaagtaaaagtacagcaattatgtcctgtacataatatttaataatgacaataaatgactatgttactggtttatgtatttactatactatactttttacaatttgtattagttcttgcattgctatgaataaatgcctgagattgagtaatttaaaaaaaagaaaaaaaaaaaaaaaaaaaaaaaaaaaaaaaaaaaaaaaaaaaaaaaaaaaaaaaaaaaaaaaaaaaaaaaaaaaaaaaaaaaaaaaaaaaaaaaaaaaaaaaaaaaaagaaaaaaaaaaagaaaaaaaaaaaaaaaaagaaaggaagcgggcgggggggcgcttattatcatatgtttcttagtcatcggggagagccgaatattattagtcacaaccatccttttattgttattatgtgaacgaggaggggtctatgagatgtaggtgttattttgaaagaaagagaaagacatgtgggagatatataaaagttaataaagcatgttgagtggcaaaaaaattgtacttgtagtattaattgataaggaaaagattactaatttgattgaggagagggataaagaagaaaaaggagaaaaacacgatatttgtagaataatatgatagattagatgatggatatattaaataaaggataatggtggggcgaagtatatcgagtgatgcacagctacaccagtgatactatatagttaagag

SEQ ID NO: 407282 - DNA, 2672 bp, Homo sapiens
agcgggtccggggcggggctgtaccgggcgctgggcggaggagccttggctggggactgcctggaaacgggctgggcctgcctcggacgccgccggtgtcgcggattctctttccgcccgctccatggcggtggatgcctgactggaagcccgagtgggatgcggctgacgcggaagcggctctgctcgtttcttatcgccctgtactgcctattctccctctacgctgcctaccacgtcttcttcgggcgccgccgccaggcgccggccgggtccccgcggggcctcaggaagggggcggcccccgcgcgggagagacgcggccgagaacagtccactttggaaagtgaagaatggaatccttgggaaggagatgaaaaaaatgagcaacaacacagatttaaaactagccttcaaatattagataaatccacgaaaggaaaaacagatctcagtgtacaaatctggggcaaagctgccattgtccaagctggcagcgtttctgctcataaaacattctgaagaaccttgtgggccctctgtgtatgtcacaggattcactccattagatgggaagctcctctgcagatcttttctgagtaatcccatctccatttctggcttctgctgagatggctgaggagacctgcttgtatctctgggagcatatttttgaaggcttacttgatcccagcgatgtgactgctcaatggagagaaggaaagtcaatcgtaggaagaacacagtacagcttcatcactggtccagctgtaataccagggtacttctccgttgatgtgaataatgtggtactcattttaaatggaagagaaaaagcaaagatcttttatgccacccagtggttactttatgcacaaaatttagtgcaaattcaaaaactccagcatcttgctgttgttttgctcggaaatgaacattgtgataatgagtggataaacccattcctcaaaagaaatggaggcttcgtggagctgcttttcataatatatgacagcccctggattaatgacgtggatgtttttcagtggcctttaggagtagcaacatacaggaattttcctgtggtggaggcaagttggtcaatgctgcatgatgagaggccatatttatgtaatttcttaggaacgatttatgaaaattcatccagacaggcactaatgaacattttgaaaaaagatgggaacgataagctttgttgggtttcagcaagagaacactggcagcctcaggaaacaaatgaaagtcttaagaattaccaagatgccttgcttcagagtgatctcacattgtgcccggtcggagtaaacacagaatgctatcgaatctatgaggcttgctcctatggctccattcctgtggtggaagacgtgatgacagctggcaactgtgggaatacatctgtgcaccacggtgctcctctgcagttactcaagtccatgggtgctccctttatctttatcaagaactggaaggaactccctgctgttttagaaaaagagaaaactataattttacaagaaaaaattgaaagaagaaaaatgttacttcagtggtatcagcacttcaagacagagcttaaaatgaaatttactaatattttagaaagctcatttttaatgaataataaaagttaattatctttttgagctaacatgtgatttttaaaatcattttgactactgggtgtataaatgtgtttgtgtgtgtatgtatttatagatgttctttaaggtacccttgaaaactctacattatgtatgccacataatgacatttcagtcagtggtagactacatatatgatagtggtcccataagattataatggagctgaaaaatttctatcgcctagtgatgtcatagcctagtgatgacatatgtattgcaatacatcactcacgtgtttgtggtgatactggtgtaaacaaatctattgcactgccagtcaagtaaaagtacagcaattatgtcctgtacataatatttaataatgacaataaatgactatgttactggtttatgtatttactatactatactttttacaatttgtattagttcttgcattgctatgaataaatgcctgagattgagtaatttaaaaaaaagaaaaaaaaaaaaaaaaaaaaaaaaaaaaaaaaaaaaaaaaaaaaaaaaaaaaaaaaaaaaaaaaaaaaaaaaaaaaaaaaaaaaaaaaaaaaaaaaaaaaaaaaaaaaagaaaaaaaaaaagaaaaaaaaaaaaaaaaagaaaggaagcgggcgggggggcgcttattatcatatgtttcttagtcatcggggagagccgaatattattagtcacaaccatccttttattgttattatgtgaacgaggaggggtctatgagatgtaggtgttattttgaaagaaagagaaagacatgtgggagatatataaaagttaataaagcatgttgagtggcaaaaaaattgtacttgtagtattaattgataaggaaaagattactaatttgattgaggagagggataaagaagaaaaaggagaaaaacacgatatttgtagaataatatgatagattagatgatggatatattaaataaaggataatggtggggcgaagtatatcgagtgatgcacagctacaccagtgatactatatagttaagag

SEQ ID NO: 407283 - DNA, 1960 bp, Homo sapiens
accacattattcacatcaacggagaagtaccctggtattacagctggaccagtgatgaagctgtactgtgttcttctccgttgatgtgaataatgtggtactcattttaaatggaagagaaaaagcaaagatcttttatgccacccagtggttactttatgcacaaaatttagtgcaaattcaaaaactccagcatcttgctgttgttttgctcggaaatgaacattgtgataatgagtggataaacccattcctcaaaagaaatggaggcttcgtggagctgcttttcataatatatgacagcccctggattaatgacgtggatgtttttcagtggcctttaggagtagcaacatacaggaattttcctgtggtggaggcaagttggtcaatgctgcatgatgagaggccatatttatgtaatttcttaggaacgatttatgaaaattcatccagacaggcactaatgaacattttgaaaaaagatgggaacgataagctttgttgggtttcagcaagagaacactggcagcctcaggaaacaaatgaaagtcttaagaattaccaagatgccttgcttcagagtgatctcacattgtgcccggtcggagtaaacacagaatgctatcgaatctatgaggcttgctcctatggctccattcctgtggtggaagacgtgatgacagctggcaactgtgggaatacatctgtgcaccacggtgctcctctgcagttactcaagtccatgggtgctccctttatctttatcaagaactggaaggaactccctgctgttttagaaaaagagaaaactataattttacaagaaaaaattgaaagaagaaaaatgttacttcagtggtatcagcacttcaagacagagcttaaaatgaaatttactaatattttagaaagctcatttttaatgaataataaaagttaattatctttttgagctaacatgtgatttttaaaatcattttgactactgggtgtataaatgtgtttgtgtgtgtatgtatttatagatgttctttaaggtacccttgaaaactctacattatgtatgccacataatgacatttcagtcagtggtagactacatatatgatagtggtcccataagattataatggagctgaaaaatttctatcgcctagtgatgtcatagcctagtgatgacatatgtattgcaatacatcactcacgtgtttgtggtgatactggtgtaaacaaatctattgcactgccagtcaagtaaaagtacagcaattatgtcctgtacataatatttaataatgacaataaatgactatgttactggtttatgtatttactatactatactttttacaatttgtattagttcttgcattgctatgaataaatgcctgagattgagtaatttaaaaaaaagaaaaaaaaaaaaaaaaaaaaaaaaaaaaaaaaaaaaaaaaaaaaaaaaaaaaaaaaaaaaaaaaaaaaaaaaaaaaaaaaaaaaaaaaaaaaaaaaaaaaaaaaaaaaagaaaaaaaaaaagaaaaaaaaaaaaaaaaagaaaggaagcgggcgggggggcgcttattatcatatgtttcttagtcatcggggagagccgaatattattagtcacaaccatccttttattgttattatgtgaacgaggaggggtctatgagatgtaggtgttattttgaaagaaagagaaagacatgtgggagatatataaaagttaataaagcatgttgagtggcaaaaaaattgtacttgtagtattaattgataaggaaaagattactaatttgattgaggagagggataaagaagaaaaaggagaaaaacacgatatttgtagaataatatgatagattagatgatggatatattaaataaaggataatggtggggcgaagtatatcgagtgatgcacagctacaccagtgatactatatagttaagag

SEQ ID NO: 407284 - DNA, 245 bp, Homo sapiens
ctgtaatgccattgcttttaacctttttctattatttctctgtagaaacattcaaaattgtagtcaacatcaacattcacatgttatgaatgcctgtttaattataagtatttttccaggtagttgcttttcttgatagtcatactttttaatggcttcaccatttttctgtcataaataccataatttacttgacattttttattgtcagaaatttagattcttttctattttcctacaataaa

SEQ ID NO: 407285 - DNA, 391 bp, Homo sapiens
atccttctcaaactttaatgtgtattaatatttgaatcacctagggaatttcgttagaatgcagattctaattcagtagatctggagtagggcctgagattctggagtcctaacatgcacccaggccaggagcagtggctcacacctacaatcccagcactttgggagggcaagtcaggaggaccactcgaggtctggagtttgagaccatcctgggaaacatagcaaaaccctgcttctattaaagaaaattatttttaataaaaataaaatgtacccgggtgatgccaataccgctggctaaggtttgagatcacatttgccctgagatgcagcaatacttcaaaatccctatatttattttaactaattaggaagactttaattttac

SEQ ID NO: 407286 - DNA, 949 bp, Homo sapiens
atttttgagttaccactaaaaatggaaggaaatatgcaatgttattttggtagctctaagaaaatatcttgcaagctccaccttcactttgcatcttagttttgaacaatcctattcaattttctcattctctagtgattaccttcatacttttatgcaggaaaaagtccgtatcatctggcattttatcaagactcagcaactggaatgttaaactaaagagggggatatttcactttaccaagtagatagatggtatagagcttaaggcattttcatgctcataaatctgataggcaacagtagctcctactgaaatttcttaggtagggaatgtttattaatatttggaaaatatacttccatcattgcaatgtggagcttcattcataagttgtaatgattctttagcaagtacacttaaaagcctttgcaggtagaatgtcaagatttgattataaataaagtgacccagggaatttagaaaaaaattattttaaaaaatatgtttgatgctattttgtatttttacagttttgattgggtaatgtttctgttcttctgaaaacagacccttggcttcacacattttaaaaatgtttgctacttgttaagggagtcagattaacttccattgggctaatgaatgctcaaatttctaatgagaaactaacactttaaaatttatcatacaacagaaaatggccaattaatggtcctgtataagtggaaaactgttaaggaggtctcaggttttgaaatataactcaacagtatattaaccattgacaagaatggatttttggaattgagaagggtagacaaacttcaggatactaggcaagaatatataaagaatatttcccatgcgttttaaatccgtatgacccagtgttctagagttctgtataaaatgataccaacaacaaataaagatgcttcccaagta

SEQ ID NO: 407287 - DNA, 3626 bp, Homo sapiens
ctcggcagcgtcatagcggcgggcatcccatctgcacgtcacacctctttctcacctggacacgcatcccttcctaccctgccagccacgacgtttcctctttcccctctccaatgcccagccccagatctggcggaagaagatggagaacgggggtgggacagagttgtggacaacctctcaggagagggtcgcaaggtgggaccctgaacagtggtagaaacaaaatgagattgtccctgaagtttgcccttcagctgagacacaaggagtagaggaagaggaaggactaacgcagaggcactcaaggtctcactatgactgtagttgagagtcctctcccttcttccctaaccctttccccatttctctcaccacttctttgccagtctagatccgtcctggtgccttactgtgcatacagttctactcgtctcagattcctttcttgtctgttagaaacgtatgtcaaacgaggatacagtgtctggaactattggttctaagatataagtggaatgagcctggatcaggagaagtatgctgagctagagttgaaggaagcttctctttctaacaagagaaagcagagttaaattatggcagagacaagtctgttagaggctggggcctctgcagcctctacagctgcggctttggagaacttacaggtggaggcgagctgctctgtgtgcctggagtatctgaaggaacctgtcatcattgagtgtgggcacaacttctgcaaagcttgcatcacccgctggtgggaggacctagagagggacttcccttgtcctgtctgtcgaaagacatcccgctaccgcagtctccgacctaatcggcaactaggcagtatggtggaaattgccaagcagctccaggccgtcaagcggaagatccgggatgagagcctctgcccccaacaccatgaggccctcagccttttctgttatgaggaccaggaggctgtatgcttgatatgtgcaatttcccacacccaccgggcccacaccgttgtgccactggacgatgctacacaggagtacaaggaaaaactgcagaagtgtctggagcccctggaacagaagctgcaggagatcactcgctgcaagtcctctgaggagaagaagcctggtgagctcaagagactagtggaaagtcgccgacagcagatcttgagggagtttgaagagcttcataggcggctggatgaagagcagcaggtgttgctttcacgactggaagaagaggaacaggacattctgcagcgactccgagaaaatgctgctcaccttggggacaagcgccgggacctggcccacttggctgccgaggtggagggcaagtgcttacagtcaggcttcgagatgcttaaggatgtcaaaagtaccctggaaaagaatattcctagaaagttcggaggctcactctcaacgatctgtccacgggatcataaggctctccttggattagtaaaagaaatcaacagatgtgaaaaggtgaagaccatggaggtgacttcagtatccatagagctggaaaagaacttcagcaattttccccgacagtactttgccctaaggaaaatccttaaacagctaattgcggatgtgaccctggaccctgagacagctcatcctaacctagtcctgtcagaggatcgtaagagcgtcaagttcgtggagacaagactccgggatctccctgacacaccaaggcgtttcaccttctacccttgcgtcctggctactgagggtttcacctcaggtcgacactactgggaggtggaggtgggcgacaagacccactgggcagtgggtgtatgccgggactccgtgagccgaaagggcgagttgactccactccctgagactggctactggcgggtgcggctatggaatggggacaaatatgcagccaccaccacaccttttacccctttgcacatcaaggtgaaacccaagcgggtaggcatattcctagactatgaggccggcacactgtctttctacaatgtcacagaccgctctcatatctacaccttcactgatacttttactgagaaactttggcccctcttctacccaggcatccgggctggacggaagaatgctgcaccacttaccatcaggcccccaacagattgggagtgacaggttgggatgtgggaatgactggggtgaggcagggtcaagtgctacgggcctccttcccgtgtcctgctggaacgtcttcgtgtccacctgggtccagtcctgaatcatcttggagaaacaccttggtttctaggatggttttgtgtggagggggaggtaggactgggctggatgagagagcacagctgtgacttcctcctaactgtcagggtggggagctggttcccagaggattgtctaccctgaagtccatcaggttttctgttgcacaaggacgggtcaggaaggaaggagaggcttttccagaaacaaaaaatctgtgagggtctgacttgctcaaaccagaggaggaaacagaaacccctgcacatctttttagggggttctttgacccaggatagtcttgcttcttgaggtagatcacaggggtctgtgtacctctgaattcatgagagatgaatgacagatgctctcatgggtctagatattgaggagtttttctgagggcagagattggacatcaacaaggctagaagggtcagggaagtgggctaaaggaacagattcctagagattaatgaagaggagggaggtttctttggtcttctattccaagggtaaggttgcgattatgggtaagattggccagaggtaggaatgtggggagaaggagaggctgaaaagaaagcagaggagaacccaggtccctgcctcagccttcagcagagttggcttattgcctgcctctataccaataagtcagtcaccttgctcctctccagaggcaaagtggaagagatcctgcaagacacatctatcctttcacagtgttcccaagggaacttggaaaggagagtcaggtattagaggaaagagaagggtatttgtatacaaagccctggccttaaagaatgttacttagtagctactcccaaattgtcagccttcttacctggccaaggtgtccaagccagaaaggaaaaaaggttatggagtctttctcaccctaaggacagggtggaagagggtggtatatagggaagggccagataggcaacttcatttggcttgtgtgcatctggcctggaactggtgttaagccaggcttttgcttgtttgttgccatccctcaccctttgccatttcccttttcagagaatgtaaatgattttcatgttaggccaaaataaacaacttatagggtacatatgttgtcataaaaggtaaaagtgatgcatgccaaaccaaactaaaccaatttggattatctgctattcgggtaatcttcacagaaatgactgagagaagaatctgcagtttactgagggcatttcagttcctcctaccacctcaacaggactttgtccagactctcctcctcttacctttgtgccttgactgtggttctttgtggcaagatactttggttggttaaaataatatggaacaaaggatccactgaagtga

SEQ ID NO: 407288 - DNA, 3742 bp, Homo sapiens
aaggctaaaaactccactagtcggaagtgacgtgccagcttagccccgcaggtccgccacgtaatttgccgccgccacagctagccaccctctccccagactggcccgaagagaggaaaagtgtggaagtccacaagccgcccccgccccgccctcttcgtcgactttcagctgcaccgggaggcggcggcgcctggccagagccggggcctggagcctggactagacacctcgccggccggggcgccagtccagcgcctgcgggcaatgggcttcagcgctcgagcagcgcatgcgcgggcctgtatctccagaggattcctcgggtcacctggacgccagcatctcagccacctgccctctgggtcccttcttgcccttgattccccctgctgcttctcatcgccagccctcctcctccttcttccgcaggcaccgctagacccggccgcggccgcccgccgacaccccagcttccactgacacgagcctcggcgcggcttccgcttccggcgagtattgtgtgtcgcgccgcggggcgggggcgaggggaggaggaaggagggaggcagcgctccggcggctccgcgccccgcactcccggacccgaagccgggaagatccgtcctggtgccttactgtgcatacagttctactcgtctcagaaacgtatgtcaaacgaggatacagtgtctggaactattggttctaagatataagtggaatgagcctggatcaggagaagtatgctgagctagagttgaaggaagcttctctttctaacaagagaaagcagagttaaattatggcagagacaagtctgttagaggctggggcctctgcagcctctacagctgcggctttggagaacttacaggtggaggcgagctgctctgtgtgcctggagtatctgaaggaacctgtcatcattgagtgtgggcacaacttctgcaaagcttgcatcacccgctggtgggaggacctagagagggacttcccttgtcctgtctgtcgaaagacatcccgctaccgcagtctccgacctaatcggcaactaggcagtatggtggaaattgccaagcagctccaggccgtcaagcggaagatccgggatgagagcctctgcccccaacaccatgaggccctcagccttttctgttatgaggaccaggaggctgtatgcttgatatgtgcaatttcccacacccaccgggcccacaccgttgtgccactggacgatgctacacaggagtacaaggaaaaactgcagaagtgtctggagcccctggaacagaagctgcaggagatcactcgctgcaagtcctctgaggagaagaagcctggtgagctcaagagactagtggaaagtcgccgacagcagatcttgagggagtttgaagagcttcataggcggctggatgaagagcagcaggtgttgctttcacgactggaagaagaggaacaggacattctgcagcgactccgagaaaatgctgctcaccttggggacaagcgccgggacctggcccacttggctgccgaggtggagggcaagtgcttacagtcaggcttcgagatgcttaaggatgtcaaaagtaccctggaaaaatgtgaaaaggtgaagaccatggaggtgacttcagtatccatagagctggaaaagaacttcagcaattttccccgacagtactttgccctaaggaaaatccttaaacagctaattgcggatgtgaccctggaccctgagacagctcatcctaacctagtcctgtcagaggatcgtaagagcgtcaagttcgtggagacaagactccgggatctccctgacacaccaaggcgtttcaccttctacccttgcgtcctggctactgagggtttcacctcaggtcgacactactgggaggtggaggtgggcgacaagacccactgggcagtgggtgtatgccgggactccgtgagccgaaagggcgagttgactccactccctgagactggctactggcgggtgcggctatggaatggggacaaatatgcagccaccaccacaccttttacccctttgcacatcaaggtgaaacccaagcgggtaggcatattcctagactatgaggccggcacactgtctttctacaatgtcacagaccgctctcatatctacaccttcactgatacttttactgagaaactttggcccctcttctacccaggcatccgggctggacggaagaatgctgcaccacttaccatcaggcccccaacagattgggagtgacaggttgggatgtgggaatgactggggtgaggcagggtcaagtgctacgggcctccttcccgtgtcctgctggaacgtcttcgtgtccacctgggtccagtcctgaatcatcttggagaaacaccttggtttctaggatggttttgtgtggagggggaggtaggactgggctggatgagagagcacagctgtgacttcctcctaactgtcagggtggggagctggttcccagaggattgtctaccctgaagtccatcaggttttctgttgcacaaggacgggtcaggaaggaaggagaggcttttccagaaacaaaaaatctgtgagggtctgacttgctcaaaccagaggaggaaacagaaacccctgcacatctttttagggggttctttgacccaggatagtcttgcttcttgaggtagatcacaggggtctgtgtacctctgaattcatgagagatgaatgacagatgctctcatgggtctagatattgaggagtttttctgagggcagagattggacatcaacaaggctagaagggtcagggaagtgggctaaaggaacagattcctagagattaatgaagaggagggaggtttctttggtcttctattccaagggtaaggttgcgattatgggtaagattggccagaggtaggaatgtggggagaaggagaggctgaaaagaaagcagaggagaacccaggtccctgcctcagccttcagcagagttggcttattgcctgcctctataccaataagtcagtcaccttgctcctctccagaggcaaagtggaagagatcctgcaagacacatctatcctttcacagtgttcccaagggaacttggaaaggagagtcaggtattagaggaaagagaagggtatttgtatacaaagccctggccttaaagaatgttacttagtagctactcccaaattgtcagccttcttacctggccaaggtgtccaagccagaaaggaaaaaaggttatggagtctttctcaccctaaggacagggtggaagagggtggtatatagggaagggccagataggcaacttcatttggcttgtgtgcatctggcctggaactggtgttaagccaggcttttgcttgtttgttgccatccctcaccctttgccatttcccttttcagagaatgtaaatgattttcatgttaggccaaaataaacaacttatagggtacatatgttgtcataaaaggtaaaagtgatgcatgccaaaccaaactaaaccaatttggattatctgctattcgggtaatcttcacagaaatgactgagagaagaatctgcagtttactgagggcatttcagttcctcctaccacctcaacaggactttgtccagactctcctcctcttacctttgtgccttgactgtggttctttgtggcaagatactttggttggttaaaataatatggaacaaaggatccactgaagtga

SEQ ID NO: 407289 - DNA, 3717 bp, Homo sapiens
aaggctaaaaactccactagtcggaagtgacgtgccagcttagccccgcaggtccgccacgtaatttgccgccgccacagctagccaccctctccccagactggcccgaagagaggaaaagtgtggaagtccacaagccgcccccgccccgccctcttcgtcgactttcagctgcaccgggaggcggcggcgcctggccagagccggggcctggagcctggactagacacctcgccggccggggcgccagtccagcgcctgcgggcaatgggcttcagcgctcgagcagcgcatgcgcgggcctgtatctccagaggattcctcgggtcacctggacgccagcatctcagccacctgccctctgggtcccttcttgcccttgattccccctgctgcttctcatcgccagccctcctcctccttcttccgcaggcaccgctagacccggccgcggccgcccgccgacaccccagcttccactgacacgagcctcggcgcggcttccgcttccggcgagtattgtgtgtcgcgccgcggggcgggggcgaggggaggaggaaggagggaggcagcgctccggcggctccgcgccccgcactcccggacccgaagccgggaagattcctttcttgtctgttagaaacgtatgtcaaacgaggatacagtgtctggaactattggttctaagatataagtggaatgagcctggatcaggagaagtatgctgagctagagttgaaggaagcttctctttctaacaagagaaagcagagttaaattatggcagagacaagtctgttagaggctggggcctctgcagcctctacagctgcggctttggagaacttacaggtggaggcgagctgctctgtgtgcctggagtatctgaaggaacctgtcatcattgagtgtgggcacaacttctgcaaagcttgcatcacccgctggtgggaggacctagagagggacttcccttgtcctgtctgtcgaaagacatcccgctaccgcagtctccgacctaatcggcaactaggcagtatggtggaaattgccaagcagctccaggccgtcaagcggaagatccgggatgagagcctctgcccccaacaccatgaggccctcagccttttctgttatgaggaccaggaggctgtatgcttgatatgtgcaatttcccacacccaccgggcccacaccgttgtgccactggacgatgctacacaggagtacaaggaaaaactgcagaagtgtctggagcccctggaacagaagctgcaggagatcactcgctgcaagtcctctgaggagaagaagcctggtgagctcaagagactagtggaaagtcgccgacagcagatcttgagggagtttgaagagcttcataggcggctggatgaagagcagcaggtgttgctttcacgactggaagaagaggaacaggacattctgcagcgactccgagaaaatgctgctcaccttggggacaagcgccgggacctggcccacttggctgccgaggtggagggcaagtgcttacagtcaggcttcgagatgcttaaggatgtcaaaagtaccctggaaaaatgtgaaaaggtgaagaccatggaggtgacttcagtatccatagagctggaaaagaacttcagcaattttccccgacagtactttgccctaaggaaaatccttaaacagctaattgcggatgtgaccctggaccctgagacagctcatcctaacctagtcctgtcagaggatcgtaagagcgtcaagttcgtggagacaagactccgggatctccctgacacaccaaggcgtttcaccttctacccttgcgtcctggctactgagggtttcacctcaggtcgacactactgggaggtggaggtgggcgacaagacccactgggcagtgggtgtatgccgggactccgtgagccgaaagggcgagttgactccactccctgagactggctactggcgggtgcggctatggaatggggacaaatatgcagccaccaccacaccttttacccctttgcacatcaaggtgaaacccaagcgggtaggcatattcctagactatgaggccggcacactgtctttctacaatgtcacagaccgctctcatatctacaccttcactgatacttttactgagaaactttggcccctcttctacccaggcatccgggctggacggaagaatgctgcaccacttaccatcaggcccccaacagattgggagtgacaggttgggatgtgggaatgactggggtgaggcagggtcaagtgctacgggcctccttcccgtgtcctgctggaacgtcttcgtgtccacctgggtccagtcctgaatcatcttggagaaacaccttggtttctaggatggttttgtgtggagggggaggtaggactgggctggatgagagagcacagctgtgacttcctcctaactgtcagggtggggagctggttcccagaggattgtctaccctgaagtccatcaggttttctgttgcacaaggacgggtcaggaaggaaggagaggcttttccagaaacaaaaaatctgtgagggtctgacttgctcaaaccagaggaggaaacagaaacccctgcacatctttttagggggttctttgacccaggatagtcttgcttcttgaggtagatcacaggggtctgtgtacctctgaattcatgagagatgaatgacagatgctctcatgggtctagatattgaggagtttttctgagggcagagattggacatcaacaaggctagaagggtcagggaagtgggctaaaggaacagattcctagagattaatgaagaggagggaggtttctttggtcttctattccaagggtaaggttgcgattatgggtaagattggccagaggtaggaatgtggggagaaggagaggctgaaaagaaagcagaggagaacccaggtccctgcctcagccttcagcagagttggcttattgcctgcctctataccaataagtcagtcaccttgctcctctccagaggcaaagtggaagagatcctgcaagacacatctatcctttcacagtgttcccaagggaacttggaaaggagagtcaggtattagaggaaagagaagggtatttgtatacaaagccctggccttaaagaatgttacttagtagctactcccaaattgtcagccttcttacctggccaaggtgtccaagccagaaaggaaaaaaggttatggagtctttctcaccctaaggacagggtggaagagggtggtatatagggaagggccagataggcaacttcatttggcttgtgtgcatctggcctggaactggtgttaagccaggcttttgcttgtttgttgccatccctcaccctttgccatttcccttttcagagaatgtaaatgattttcatgttaggccaaaataaacaacttatagggtacatatgttgtcataaaaggtaaaagtgatgcatgccaaaccaaactaaaccaatttggattatctgctattcgggtaatcttcacagaaatgactgagagaagaatctgcagtttactgagggcatttcagttcctcctaccacctcaacaggactttgtccagactctcctcctcttacctttgtgccttgactgtggttctttgtggcaagatactttggttggttaaaataatatggaacaaaggatccactgaagtga

SEQ ID NO: 407290 - DNA, 3334 bp, Homo sapiens
aagcttatcagctgtcattagtgtcaatgtattttatgtctggcccaagacacttcttccagtgggcccagggaagccaaaaggttggatattgtgatttagaagaatgagagaacagtgtcagagaatcaagcttagactccagtggattaatcataaagctcttataacattaaactttaaaatatggttaatttaagaaatgttaatatttttatgacattttttacttctcagattcctttcttgtctgttagaaacgtatgtcaaacgaggatacagtgtctggaactattggttctaagatataagtggaatgagcctggatcaggagaagtatgctgagctagagttgaaggaagcttctctttctaacaagagaaagcagagttaaattatggcagagacaagtctgttagaggctggggcctctgcagcctctacagctgcggctttggagaacttacaggtggaggcgagctgctctgtgtgcctggagtatctgaaggaacctgtcatcattgagtgtgggcacaacttctgcaaagcttgcatcacccgctggtgggaggacctagagagggacttcccttgtcctgtctgtcgaaagacatcccgctaccgcagtctccgacctaatcggcaactaggcagtatggtggaaattgccaagcagctccaggccgtcaagcggaagatccgggatgagagcctctgcccccaacaccatgaggccctcagccttttctgttatgaggaccaggaggctgtatgcttgatatgtgcaatttcccacacccaccgggcccacaccgttgtgccactggacgatgctacacaggagtacaaggaaaaactgcagaagtgtctggagcccctggaacagaagctgcaggagatcactcgctgcaagtcctctgaggagaagaagcctggtgagctcaagagactagtggaaagtcgccgacagcagatcttgagggagtttgaagagcttcataggcggctggatgaagagcagcaggtgttgctttcacgactggaagaagaggaacaggacattctgcagcgactccgagaaaatgctgctcaccttggggacaagcgccgggacctggcccacttggctgccgaggtggagggcaagtgcttacagtcaggcttcgagatgcttaaggatgtcaaaagtaccctggaaaaatgtgaaaaggtgaagaccatggaggtgacttcagtatccatagagctggaaaagaacttcagcaattttccccgacagtactttgccctaaggaaaatccttaaacagctaattgcggatgtgaccctggaccctgagacagctcatcctaacctagtcctgtcagaggatcgtaagagcgtcaagttcgtggagacaagactccgggatctccctgacacaccaaggcgtttcaccttctacccttgcgtcctggctactgagggtttcacctcaggtcgacactactgggaggtggaggtgggcgacaagacccactgggcagtgggtgtatgccgggactccgtgagccgaaagggcgagttgactccactccctgagactggctactggcgggtgcggctatggaatggggacaaatatgcagccaccaccacaccttttacccctttgcacatcaaggtgaaacccaagcgggtaggcatattcctagactatgaggccggcacactgtctttctacaatgtcacagaccgctctcatatctacaccttcactgatacttttactgagaaactttggcccctcttctacccaggcatccgggctggacggaagaatgctgcaccacttaccatcaggcccccaacagattgggagtgacaggttgggatgtgggaatgactggggtgaggcagggtcaagtgctacgggcctccttcccgtgtcctgctggaacgtcttcgtgtccacctgggtccagtcctgaatcatcttggagaaacaccttggtttctaggatggttttgtgtggagggggaggtaggactgggctggatgagagagcacagctgtgacttcctcctaactgtcagggtggggagctggttcccagaggattgtctaccctgaagtccatcaggttttctgttgcacaaggacgggtcaggaaggaaggagaggcttttccagaaacaaaaaatctgtgagggtctgacttgctcaaaccagaggaggaaacagaaacccctgcacatctttttagggggttctttgacccaggatagtcttgcttcttgaggtagatcacaggggtctgtgtacctctgaattcatgagagatgaatgacagatgctctcatgggtctagatattgaggagtttttctgagggcagagattggacatcaacaaggctagaagggtcagggaagtgggctaaaggaacagattcctagagattaatgaagaggagggaggtttctttggtcttctattccaagggtaaggttgcgattatgggtaagattggccagaggtaggaatgtggggagaaggagaggctgaaaagaaagcagaggagaacccaggtccctgcctcagccttcagcagagttggcttattgcctgcctctataccaataagtcagtcaccttgctcctctccagaggcaaagtggaagagatcctgcaagacacatctatcctttcacagtgttcccaagggaacttggaaaggagagtcaggtattagaggaaagagaagggtatttgtatacaaagccctggccttaaagaatgttacttagtagctactcccaaattgtcagccttcttacctggccaaggtgtccaagccagaaaggaaaaaaggttatggagtctttctcaccctaaggacagggtggaagagggtggtatatagggaagggccagataggcaacttcatttggcttgtgtgcatctggcctggaactggtgttaagccaggcttttgcttgtttgttgccatccctcaccctttgccatttcccttttcagagaatgtaaatgattttcatgttaggccaaaataaacaacttatagggtacatatgttgtcataaaaggtaaaagtgatgcatgccaaaccaaactaaaccaatttggattatctgctattcgggtaatcttcacagaaatgactgagagaagaatctgcagtttactgagggcatttcagttcctcctaccacctcaacaggactttgtccagactctcctcctcttacctttgtgccttgactgtggttctttgtggcaagatactttggttggttaaaataatatggaacaaaggatccactgaagtga

SEQ ID NO: 407291 - DNA, 2054 bp, Homo sapiens
cctcatctagctccccactctggcttctcccgccagcggatgtgaccctggaccctgagacagctcatcctaacctagtcctgtcagaggatcgtaagagcgtcaagttcgtggagacaagactccgggatctccctgacacaccaaggcgtttcaccttctacccttgcgtcctggctactgagggtttcacctcaggtcgacactactgggaggtggaggtgggcgacaagacccactgggcagtgggtgtatgccgggactccgtgagccgaaagggcgagttgactccactccctgagactggctactggcgggtgcggctatggaatggggacaaatatgcagccaccaccacaccttttacccctttgcacatcaaggtgaaacccaagcgggtaggcatattcctagactatgaggccggcacactgtctttctacaatgtcacagaccgctctcatatctacaccttcactgatacttttactgagaaactttggcccctcttctacccaggcatccgggctggacggaagaatgctgcaccacttaccatcaggcccccaacagattgggagtgacaggttgggatgtgggaatgactggggtgaggcagggtcaagtgctacgggcctccttcccgtgtcctgctggaacgtcttcgtgtccacctgggtccagtcctgaatcatcttggagaaacaccttggtttctaggatggttttgtgtggagggggaggtaggactgggctggatgagagagcacagctgtgacttcctcctaactgtcagggtggggagctggttcccagaggattgtctaccctgaagtccatcaggttttctgttgcacaaggacgggtcaggaaggaaggagaggcttttccagaaacaaaaaatctgtgagggtctgacttgctcaaaccagaggaggaaacagaaacccctgcacatctttttagggggttctttgacccaggatagtcttgcttcttgaggtagatcacaggggtctgtgtacctctgaattcatgagagatgaatgacagatgctctcatgggtctagatattgaggagtttttctgagggcagagattggacatcaacaaggctagaagggtcagggaagtgggctaaaggaacagattcctagagattaatgaagaggagggaggtttctttggtcttctattccaagggtaaggttgcgattatgggtaagattggccagaggtaggaatgtggggagaaggagaggctgaaaagaaagcagaggagaacccaggtccctgcctcagccttcagcagagttggcttattgcctgcctctataccaataagtcagtcaccttgctcctctccagaggcaaagtggaagagatcctgcaagacacatctatcctttcacagtgttcccaagggaacttggaaaggagagtcaggtattagaggaaagagaagggtatttgtatacaaagccctggccttaaagaatgttacttagtagctactcccaaattgtcagccttcttacctggccaaggtgtccaagccagaaaggaaaaaaggttatggagtctttctcaccctaaggacagggtggaagagggtggtatatagggaagggccagataggcaacttcatttggcttgtgtgcatctggcctggaactggtgttaagccaggcttttgcttgtttgttgccatccctcaccctttgccatttcccttttcagagaatgtaaatgattttcatgttaggccaaaataaacaacttatagggtacatatgttgtcataaaaggtaaaagtgatgcatgccaaaccaaactaaaccaatttggattatctgctattcgggtaatcttcacagaaatgactgagagaagaatctgcagtttactgagggcatttcagttcctcctaccacctcaacaggactttgtccagactctcctcctcttacctttgtgccttgactgtggttctttgtggcaagatactttggttggttaaaataatatggaacaaaggatccactgaagtga

SEQ ID NO: 407292 - DNA, 1806 bp, Homo sapiens
aaggctaaaaactccactagtcggaagtgacgtgccagcttagccccgcaggtccgccacgtaatttgccgccgccacagctagccaccctctccccagactggcccgaagagaggaaaagtgtggaagtccacaagccgcccccgccccgccctcttcgtcgactttcagctgcaccgggaggcggcggcgcctggccagagccggggcctggagcctggactagacacctcgccggccggggcgccagtccagcgcctgcgggcaatgggcttcagcgctcgagcagcgcatgcgcgggcctgtatctccagaggattcctcgggtcacctggacgccagcatctcagccacctgccctctgggtcccttcttgcccttgattccccctgctgcttctcatcgccagccctcctcctccttcttccgcaggcaccgctagacccggccgcggccgcccgccgacaccccagcttccactgacacgagcctcggcgcggcttccgcttccggcgagtattgtgtgtcgcgccgcggggcgggggcgaggggaggaggaaggagggaggcagcgctccggcggctccgcgccccgcactcccggacccgaagccgggaagattcctttcttgtctgttagaaacgtatgtcaaacgaggatacagtgtctggaactattggttctaagatataagtggaatgagcctggatcaggagaagtatgctgagctagagttgaaggaagcttctctttctaacaagagaaagcagagttaaattatggcagagacaagtctgttagaggctggggcctctgcagcctctacagctgcggctttggagaacttacaggtggaggcgagctgctctgtgtgcctggagtatctgaaggaacctgtcatcattgagtgtgggcacaacttctgcaaagcttgcatcacccgctggtgggaggacctagagagggacttcccttgtcctgtctgtcgaaagacatcccgctaccgcagtctccgacctaatcggcaactaggcagtatggtggaaattgccaagcagctccaggccgtcaagcggaagatccgggatgagagcctctgcccccaacaccatgaggccctcagccttttctgttatgaggaccaggaggctgtatgcttgatatgtgcaatttcccacacccaccgggcccacaccgttgtgccactggacgatgctacacaggagtacaaggaaaaactgcagaagtgtctggagcccctggaacagaagctgcaggagatcactcgctgcaagtcctctgaggagaagaagcctggtgagctcaagagactagtggaaagtcgccgacagcagatcttgagggagtttgaagagcttcataggcggctggatgaagagcagcaggtgttgctttcacgactggaagaagaggaacaggacattctgcagcgactccgagaaaatgctgctcaccttggggacaagcgccgggacctggcccacttggctgccgaggtggagggcaagtgcttacagtcaggcttcgagatgcttaaggttcgacctttgcccctgcatagcccctcaggctgagtgcagcgtagctttgcgtagcctgggatttgtcagcctgggatactcattcttctgctctccttctctaaatccagttctttctgccaggtgtactcaaagggtctttgctacggaaaagtgatttctcccatccccttctaaccatttttgtgttcttatctctggtcagcaattatgtgcttaatctgttccaaagaaaagattcat

SEQ ID NO: 407293 - DNA, 1721 bp, Homo sapiens
aaggctaaaaactccactagtcggaagtgacgtgccagcttagccccgcaggtccgccacgtaatttgccgccgccacagctagccaccctctccccagactggcccgaagagaggaaaagtgtggaagtccacaagccgcccccgccccgccctcttcgtcgactttcagctgcaccgggaggcggcggcgcctggccagagccggggcctggagcctggactagacacctcgccggccggggcgccagtccagcgcctgcgggcaatgggcttcagcgctcgagcagcgcatgcgcgggcctgtatctccagaggattcctcgggtcacctggacgccagcatctcagccacctgccctctgggtcccttcttgcccttgattccccctgctgcttctcatcgccagccctcctcctccttcttccgcaggcaccgctagacccggccgcggccgcccgccgacaccccagcttccactgacacgagcctcggcgcggcttccgcttccggcgagtattgtgtgtcgcgccgcggggcgggggcgaggggaggaggaaggagggaggcagcgctccggcggctccgcgccccgcactcccggacccgaagccgggaagattcctttcttgtctgttagaaacgtatgtcaaacgaggatacagtgtctggaactattggttctaagatataagtggaatgagcctggatcaggagaagtatgctgagctagagttgaaggaagcttctctttctaacaagagaaagcagagttaaattatggcagagacaagtctgttagaggctggggcctctgcagcctctacagctgcggctttggagaacttacaggtggaggcgagctgctctgtgtgcctggagtatctgaaggaacctgtcatcattgagtgtgggcacaacttctgcaaagcttgcatcacccgctggtgggaggacctagagagggacttcccttgtcctgtctgtcgaaagacatcccgctaccgcagtctccgacctaatcggcaactaggcagtatggtggaaattgccaagcagctccaggccgtcaagcggaagatccgggatgagagcctctgcccccaacaccatgaggccctcagccttttctgttatgaggaccaggaggctgtatgcttgatatgtgcaatttcccacacccaccgggcccacaccgttgtgccactggacgatgctacacaggagtacaaggaaaaactgcagaagtgtctggagcccctggaacagaagctgcaggagatcactcgctgcaagtcctctgaggagaagaagcctggtgagctcaagagactagtggaaagtcgccgacagcagatcttgagggagtttgaagagcttcataggcggctggatgaagagcagcaggtgttgctttcacgactggaagaagaggaacaggggacagcgctggaccgtacagacctgcctaacatgccagcgcagccaacgcttcctcaatgatcccgggcatttactctggggagacaggcctgaggcccagctcgggagccaagcaggtgagagattccaaaccactacaacccttgccaaacacagcccactccatttcagaccgccttcctgaggagaaaatgcagactcagggttccagtaaccagtgatggattcaccccatctcccaaataaagtttacttgttttacattccatgattctgtt

SEQ ID NO: 407294 - DNA, 585 bp, Homo sapiens
cagctgtcattagtgtcaatgtattttatgtctggcccaagacacttcttccagtgggcccagggaagccaaaaggttggatattgtgatttagaagaatgagagaacagtgtcagagaatcaagcttagactccagtggattaatcataaagctcttataacattaaactttaaaatatggttaatttaagaaatgttaatatttttatgacattttttacttctcagattcctttcttgtctgttagaaacgtatgtcaaacgaggatacagtgtctggaactattggttctaagatataagtggaatgagcctggatcaggagaagtatgctgagctagagttgaaggaagcttctctttctaacaagagaaagcagaggtaagagacaagatagatcaattgggggttgtgtgtcagtttactaacaagaaaaaaaaggttgatggctgggagtcacaagttttgaaaatggagaaacaaagaggttgaattgattggaagagaagatggagaataacaagaaggggcaaatctggagttaggacttaacatagggataaatgtcgggtcagggatgcaaa

SEQ ID NO: 407295 - DNA, 3852 bp, Homo sapiens
aaggctaaaaactccactagtcggaagtgacgtgccagcttagccccgcaggtccgccacgtaatttgccgccgccacagctagccaccctctccccagactggcccgaagagaggaaaagtgtggaagtccacaagccgcccccgccccgccctcttcgtcgactttcagctgcaccgggaggcggcggcgcctggccagagccggggcctggagcctggactagacacctcgccggccggggcgccagtccagcgcctgcgggcaatgggcttcagcgctcgagcagcgcatgcgcgggcctgtatctccagaggattcctcgggtcacctggacgccagcatctcagccacctgccctctgggtcccttcttgcccttgattccccctgctgcttctcatcgccagccctcctcctccttcttccgcaggcaccgctagacccggccgcggccgcccgccgacaccccagcttccactgacacgagcctcggcgcggcttccgcttccggcgagtattgtgtgtcgcgccgcggggcgggggcgaggggaggaggaaggagggaggcagcgctccggcggctccgcgccccgcactcccggacccgaagccgggaagatccgtcctggtgccttactgtgcatacagttctactcgtctcagattcctttcttgtctgttagaaacgtatgtcaaacgaggatacagtgtctggaactattggttctaagatataagtggaatgagcctggatcaggagaagtatgctgagctagagttgaaggaagcttctctttctaacaagagaaagcagagttaaattatggcagagacaagtctgttagaggctggggcctctgcagcctctacagctgcggctttggagaacttacaggtggaggcgagctgctctgtgtgcctggagtatctgaaggaacctgtcatcattgagtgtgggcacaacttctgcaaagcttgcatcacccgctggtgggaggacctagagagggacttcccttgtcctgtctgtcgaaagacatcccgctaccgcagtctccgacctaatcggcaactaggcagtatggtggaaattgccaagcagctccaggccgtcaagcggaagatccgggatgagagcctctgcccccaacaccatgaggccctcagccttttctgttatgaggaccaggaggctgtatgcttgatatgtgcaatttcccacacccaccgggcccacaccgttgtgccactggacgatgctacacaggagtacaaggaaaaactgcagaagtgtctggagcccctggaacagaagctgcaggagatcactcgctgcaagtcctctgaggagaagaagcctggtgagctcaagagactagtggaaagtcgccgacagcagatcttgagggagtttgaagagcttcataggcggctggatgaagagcagcaggtgttgctttcacgactggaagaagaggaacaggacattctgcagcgactccgagaaaatgctgctcaccttggggacaagcgccgggacctggcccacttggctgccgaggtggagggcaagtgcttacagtcaggcttcgagatgcttaaggatgtcaaaagtaccctggaaaagaatattcctagaaagttcggaggctcactctcaacgatctgtccacgggatcataaggctctccttggattagtaaaagaaatcaacagatgtgaaaaggtgaagaccatggaggtgacttcagtatccatagagctggaaaagaacttcagcaattttccccgacagtactttgccctaaggaaaatccttaaacagctaattgcggatgtgaccctggaccctgagacagctcatcctaacctagtcctgtcagaggatcgtaagagcgtcaagttcgtggagacaagactccgggatctccctgacacaccaaggcgtttcaccttctacccttgcgtcctggctactgagggtttcacctcaggtcgacactactgggaggtggaggtgggcgacaagacccactgggcagtgggtgtatgccgggactccgtgagccgaaagggcgagttgactccactccctgagactggctactggcgggtgcggctatggaatggggacaaatatgcagccaccaccacaccttttacccctttgcacatcaaggtgaaacccaagcgggtaggcatattcctagactatgaggccggcacactgtctttctacaatgtcacagaccgctctcatatctacaccttcactgatacttttactgagaaactttggcccctcttctacccaggcatccgggctggacggaagaatgctgcaccacttaccatcaggcccccaacagattgggagtgacaggttgggatgtgggaatgactggggtgaggcagggtcaagtgctacgggcctccttcccgtgtcctgctggaacgtcttcgtgtccacctgggtccagtcctgaatcatcttggagaaacaccttggtttctaggatggttttgtgtggagggggaggtaggactgggctggatgagagagcacagctgtgacttcctcctaactgtcagggtggggagctggttcccagaggattgtctaccctgaagtccatcaggttttctgttgcacaaggacgggtcaggaaggaaggagaggcttttccagaaacaaaaaatctgtgagggtctgacttgctcaaaccagaggaggaaacagaaacccctgcacatctttttagggggttctttgacccaggatagtcttgcttcttgaggtagatcacaggggtctgtgtacctctgaattcatgagagatgaatgacagatgctctcatgggtctagatattgaggagtttttctgagggcagagattggacatcaacaaggctagaagggtcagggaagtgggctaaaggaacagattcctagagattaatgaagaggagggaggtttctttggtcttctattccaagggtaaggttgcgattatgggtaagattggccagaggtaggaatgtggggagaaggagaggctgaaaagaaagcagaggagaacccaggtccctgcctcagccttcagcagagttggcttattgcctgcctctataccaataagtcagtcaccttgctcctctccagaggcaaagtggaagagatcctgcaagacacatctatcctttcacagtgttcccaagggaacttggaaaggagagtcaggtattagaggaaagagaagggtatttgtatacaaagccctggccttaaagaatgttacttagtagctactcccaaattgtcagccttcttacctggccaaggtgtccaagccagaaaggaaaaaaggttatggagtctttctcaccctaaggacagggtggaagagggtggtatatagggaagggccagataggcaacttcatttggcttgtgtgcatctggcctggaactggtgttaagccaggcttttgcttgtttgttgccatccctcaccctttgccatttcccttttcagagaatgtaaatgattttcatgttaggccaaaataaacaacttatagggtacatatgttgtcataaaaggtaaaagtgatgcatgccaaaccaaactaaaccaatttggattatctgctattcgggtaatcttcacagaaatgactgagagaagaatctgcagtttactgagggcatttcagttcctcctaccacctcaacaggactttgtccagactctcctcctcttacctttgtgccttgactgtggttctttgtggcaagatactttggttggttaaaataatatggaacaaaggatccactgaagtga

SEQ ID NO: 407296 - DNA, 3553 bp, Homo sapiens
  misc_feature (3495)..(3495): n is a, c, g, or t
aaggctaaaaactccactagtcggaagtgacgtgccagcttagccccgcaggtccgccacgtaatttgccgccgccacagctagccaccctctccccagactggcccgaagagaggaaaagtgtggaagtccacaagccgcccccgccccgccctcttcgtcgactttcagctgcaccgggaggcggcggcgcctggccagagccggggcctggagcctggactagacacctcgccggccggggcgccagtccagcgcctgcgggcaatgggcttcagcgctcgagcagcgcatgcgcgggcctgtatctccagaggattcctcgggtcacctggacgccagcatctcagccacctgccctctgggtcccttcttgcccttgattccccctgctgcttctcatcgccagccctcctcctccttcttccgcaggcaccgctagacccggccgcggccgcccgccgacaccccagcttccactgacacgagcctcggcgcggcttccgcttccggcgagtattgtgtgtcgcgccgcggggcgggggcgaggggaggaggaaggagggaggcagcgctccggcggctccgcgccccgcactcccggacccgaagccgggaagatccgtcctggtgccttactgtgcatacagttctactcgtctcagattcctttcttgtctgttagaaacgtatgtcaaacgaggatacagtgtctggaactattggttctaagatataagtggaatgagcctggatcaggagaagtatgctgagctagagttgaaggaagcttctctttctaacaagagaaagcagagttaaattatggcagagacaagtctgttagaggctggggcctctgcagcctctacagctgcggctttggagaacttacaggtggaggcgagctgctctgtgtgcctggagtatctgaaggaacctgtcatcattgagtgtgggcacaacttctgcaaagcttgcatcacccgctggtgggaggacctagagagggacttcccttgtcctgtctgtcgaaagacatcccgctaccgcagtctccgacctaatcggcaactaggcagtatggtggaaattgccaagcagctccaggccgtcaagcggaagatccgggatgagagcctctgcccccaacaccatgaggccctcagccttttctgttatgaggaccaggaggctgtatgcttgatatgtgcaatttcccacacccaccgggcccacaccgttgtgccactggacgatgctacacaggagtacaaggaaaaactgcagaagtgtctggagcccctggaacagaagctgcaggagatcactcgctgcaagtcctctgaggagaagaagcctggtgagctcaagagactagtggaaagtcgccgacagcagatcttgagggagtttgaagagcttcataggcggctggatgaagagcagcaggtgttgctttcacgactggaagaagaggaacaggacattctgcagcgactccgagaaaatgctgctcaccttggggacaagcgccgggacctggcccacttggctgccgaggtggagggcaagtgcttacagtcaggcttcgagatgcttaaggatgtcaaaagtaccctggaaaagaatattcctagaaagttcggaggctcactctcaacgatctgtccacgggatcataaggctctccttggattagtaaaagaaatcaacagatgtgaaaaggtgaagaccatggaggtgacttcagtatccatagagctggaaaagaacttcagcaattttccccgacagtactttgccctaaggaaaatccttaaacagctaattgcggatgtgaccctggaccctgagacagctcatcctaacctagtcctgtcagaggatcgtaagagcgtcaagttcgtggagacaagactccgggatctccctgacacaccaaggcgtttcaccttctacccttgcgtcctggctactgagggtttcacctcaggtcgacactactgggaggtggaggtgggcgacaagacccactgggcagtgggtgtatgccgggactccgtgagccgaaagggcgagttgactccactccctgagactggctactggcgggtgcggctatggaatggggacaaatatgcagccaccaccacaccttttacccctttgcacatcaaggtgaaacccaagcgggtaggcatattcctagactatgaggccggcacactgtctttctacaatgtcacagaccgctctcatatctacaccttcactgatacttttactgagaaactttggcccctcttctacccaggcatccgggctggacggaagaatgctgcaccacttaccatcaggcccccaacagattgggagtgacaggttgggatgtgggaatgactggggtgaggcagggtcaagtgctacgggcctccttcccgtgtcctgctggaacgtcttcgtgtccacctgggtccagtcctgaatcatcttggagaaacaccttggtttctaggatggttttgtgtggagggggaggtaggactgggctggatgagagagcacagctgtgacttcctcctaactgtcagggtggggagctggttcccagaggattgtctaccctgaagtccatcaggttttctgttgcacaaggacgggtcaggaaggaaggagaggcttttccagaaacaaaaaatctgtgagggtctgacttgctcaaaccagaggaggaaacagaaacccctgcacatctttttagggggttctttgacccaggatagtcttgcttcttgaggtagatcacaggggtctgtgtacctctgaattcatgagagatgaatgacagatgctctcatgggtctagatattgaggagtttttctgagggcagagattggacatcaacaaggctagaagggtcagggaagtgggctaaaggaacagattcctagagattaatgaagaggagggaggtttctttggtcttctattccaagggtaaggttgcgattatgggtaagattggccagaggtaggaatgtggggagaaggagaggctgaaaagaaagcagaggagaacccaggtccctgcctcagccttcagcagagttggcttattgcctgcctctataccaataagtcagtcaccttgctcctctccagaggcaaagtggaagagatcctgcaagacacatctatcctttcacagtgttcccaagggaacttggaaaggagagtcaggtattagaggaaagagaagggtatttgtatacaaagccctggccttaaagaatgttacttagtagctactcccaaattgtcagccttcttacctggccaaggtgtccaagccagaaaggaaaaaaggttatggagtctttctcaccctaaggacagggtggaagagggtggtatatagggaagggccagataggcaacttcatttggcttgtgtgcatctggcctggaactggtgttaagccaggcttgntgttgtggcacccacttgcttcctttcggaaggtagatcggtgcgccaaatttggctt

SEQ ID NO: 407297 - DNA, 3697 bp, Homo sapiens
aaggctaaaaactccactagtcggaagtgacgtgccagcttagccccgcaggtccgccacgtaatttgccgccgccacagctagccaccctctccccagactggcccgaagagaggaaaagtgtggaagtccacaagccgcccccgccccgccctcttcgtcgactttcagctgcaccgggaggcggcggcgcctggccagagccggggcctggagcctggactagacacctcgccggccggggcgccagtccagcgcctgcgggcaatgggcttcagcgctcgagcagcgcatgcgcgggcctgtatctccagaggattcctcgggtcacctggacgccagcatctcagccacctgccctctgggtcccttcttgcccttgattccccctgctgcttctcatcgccagccctcctcctccttcttccgcaggcaccgctagacccggccgcggccgcccgccgacaccccagcttccactgacacgagcctcggcgcggcttccgcttccggcgagtattgtgtgtcgcgccgcggggcgggggcgaggggaggaggaaggagggaggcagcgctccggcggctccgcgccccgcactcccggacccgaagccgggaagaaacgtatgtcaaacgaggatacagtgtctggaactattggttctaagatataagtggaatgagcctggatcaggagaagtatgctgagctagagttgaaggaagcttctctttctaacaagagaaagcagagttaaattatggcagagacaagtctgttagaggctggggcctctgcagcctctacagctgcggctttggagaacttacaggtggaggcgagctgctctgtgtgcctggagtatctgaaggaacctgtcatcattgagtgtgggcacaacttctgcaaagcttgcatcacccgctggtgggaggacctagagagggacttcccttgtcctgtctgtcgaaagacatcccgctaccgcagtctccgacctaatcggcaactaggcagtatggtggaaattgccaagcagctccaggccgtcaagcggaagatccgggatgagagcctctgcccccaacaccatgaggccctcagccttttctgttatgaggaccaggaggctgtatgcttgatatgtgcaatttcccacacccaccgggcccacaccgttgtgccactggacgatgctacacaggagtacaaggaaaaactgcagaagtgtctggagcccctggaacagaagctgcaggagatcactcgctgcaagtcctctgaggagaagaagcctggtgagctcaagagactagtggaaagtcgccgacagcagatcttgagggagtttgaagagcttcataggcggctggatgaagagcagcaggtgttgctttcacgactggaagaagaggaacaggacattctgcagcgactccgagaaaatgctgctcaccttggggacaagcgccgggacctggcccacttggctgccgaggtggagggcaagtgcttacagtcaggcttcgagatgcttaaggatgtcaaaagtaccctggaaaaatgtgaaaaggtgaagaccatggaggtgacttcagtatccatagagctggaaaagaacttcagcaattttccccgacagtactttgccctaaggaaaatccttaaacagctaattgcggatgtgaccctggaccctgagacagctcatcctaacctagtcctgtcagaggatcgtaagagcgtcaagttcgtggagacaagactccgggatctccctgacacaccaaggcgtttcaccttctacccttgcgtcctggctactgagggtttcacctcaggtcgacactactgggaggtggaggtgggcgacaagacccactgggcagtgggtgtatgccgggactccgtgagccgaaagggcgagttgactccactccctgagactggctactggcgggtgcggctatggaatggggacaaatatgcagccaccaccacaccttttacccctttgcacatcaaggtgaaacccaagcgggtaggcatattcctagactatgaggccggcacactgtctttctacaatgtcacagaccgctctcatatctacaccttcactgatacttttactgagaaactttggcccctcttctacccaggcatccgggctggacggaagaatgctgcaccacttaccatcaggcccccaacagattgggagtgacaggttgggatgtgggaatgactggggtgaggcagggtcaagtgctacgggcctccttcccgtgtcctgctggaacgtcttcgtgtccacctgggtccagtcctgaatcatcttggagaaacaccttggtttctaggatggttttgtgtggagggggaggtaggactgggctggatgagagagcacagctgtgacttcctcctaactgtcagggtggggagctggttcccagaggattgtctaccctgaagtccatcaggttttctgttgcacaaggacgggtcaggaaggaaggagaggcttttccagaaacaaaaaatctgtgagggtctgacttgctcaaaccagaggaggaaacagaaacccctgcacatctttttagggggttctttgacccaggatagtcttgcttcttgaggtagatcacaggggtctgtgtacctctgaattcatgagagatgaatgacagatgctctcatgggtctagatattgaggagtttttctgagggcagagattggacatcaacaaggctagaagggtcagggaagtgggctaaaggaacagattcctagagattaatgaagaggagggaggtttctttggtcttctattccaagggtaaggttgcgattatgggtaagattggccagaggtaggaatgtggggagaaggagaggctgaaaagaaagcagaggagaacccaggtccctgcctcagccttcagcagagttggcttattgcctgcctctataccaataagtcagtcaccttgctcctctccagaggcaaagtggaagagatcctgcaagacacatctatcctttcacagtgttcccaagggaacttggaaaggagagtcaggtattagaggaaagagaagggtatttgtatacaaagccctggccttaaagaatgttacttagtagctactcccaaattgtcagccttcttacctggccaaggtgtccaagccagaaaggaaaaaaggttatggagtctttctcaccctaaggacagggtggaagagggtggtatatagggaagggccagataggcaacttcatttggcttgtgtgcatctggcctggaactggtgttaagccaggcttttgcttgtttgttgccatccctcaccctttgccatttcccttttcagagaatgtaaatgattttcatgttaggccaaaataaacaacttatagggtacatatgttgtcataaaaggtaaaagtgatgcatgccaaaccaaactaaaccaatttggattatctgctattcgggtaatcttcacagaaatgactgagagaagaatctgcagtttactgagggcatttcagttcctcctaccacctcaacaggactttgtccagactctcctcctcttacctttgtgccttgactgtggttctttgtggcaagatactttggttggttaaaataatatggaacaaaggatccactgaagtga

SEQ ID NO: 407298 - DNA, 3167 bp, Homo sapiens
tacctcccagcaccggaagccgggaacgatgccttgtcttgtctgtgagaatcgtatgtcaagctgaggatacagagtcctggacctatcgattctaagatatcactgcaatgagcctggctcgaggagaagttagtgctgatgctaaagcattgatcgcgaagttgcgtatctccttgtactaatcaatgagaggagcacgtagtctataaacagtggtatgtgccagagcaagacgttctgattccgaggtcagggccccgtctgtggcctctacagctgcggctttggagaacttacaggtggaggcgagctgctctgtgtgcctggagtatctgaaggaacctgtcatcattgagtgtgggcacaacttctgcaaagcttgcatcacccgctggtgggaggacctagagagggacttcccttgtcctgtctgtcgaaagacatcccgctaccgcagtctccgacctaatcggcaactaggcagtatggtggaaattgccaagcagctccaggccgtcaagcggaagatccgggatgagagcctctgcccccaacaccatgaggccctcagccttttctgttatgaggaccaggaggctgtatgcttgatatgtgcaatttcccacacccaccgggcccacaccgttgtgccactggacgatgctacacaggagtacaaggaaaaactgcagaagtgtctggagcccctggaacagaagctgcaggagatcactcgctgcaagtcctctgaggagaagaagcctggtgagctcaagagactagtggaaagtcgccgacagcagatcttgagggagtttgaagagcttcataggcggctggatgaagagcagcaggtgttgctttcacgactggaagaagaggaacaggacattctgcagcgactccgagaaaatgctgctcaccttggggacaagcgccgggacctggcccacttggctgccgaggtggagggcaagtgcttacagtcaggcttcgagatgcttaaggatgtcaaaagtaccctggaaaaatgtgaaaaggtgaagaccatggaggtgacttcagtatccatagagctggaaaagaacttcagcaattttccccgacagtactttgccctaaggaaaatccttaaacagctaattgcggatgtgaccctggaccctgagacagctcatcctaacctagtcctgtcagaggatcgtaagagcgtcaagttcgtggagacaagactccgggatctccctgacacaccaaggcgtttcaccttctacccttgcgtcctggctactgagggtttcacctcaggtcgacactactgggaggtggaggtgggcgacaagacccactgggcagtgggtgtatgccgggactccgtgagccgaaagggcgagttgactccactccctgagactggctactggcgggtgcggctatggaatggggacaaatatgcagccaccaccacaccttttacccctttgcacatcaaggtgaaacccaagcgggtaggcatattcctagactatgaggccggcacactgtctttctacaatgtcacagaccgctctcatatctacaccttcactgatacttttactgagaaactttggcccctcttctacccaggcatccgggctggacggaagaatgctgcaccacttaccatcaggcccccaacagattgggagtgacaggttgggatgtgggaatgactggggtgaggcagggtcaagtgctacgggcctccttcccgtgtcctgctggaacgtcttcgtgtccacctgggtccagtcctgaatcatcttggagaaacaccttggtttctaggatggttttgtgtggagggggaggtaggactgggctggatgagagagcacagctgtgacttcctcctaactgtcagggtggggagctggttcccagaggattgtctaccctgaagtccatcaggttttctgttgcacaaggacgggtcaggaaggaaggagaggcttttccagaaacaaaaaatctgtgagggtctgacttgctcaaaccagaggaggaaacagaaacccctgcacatctttttagggggttctttgacccaggatagtcttgcttcttgaggtagatcacaggggtctgtgtacctctgaattcatgagagatgaatgacagatgctctcatgggtctagatattgaggagtttttctgagggcagagattggacatcaacaaggctagaagggtcagggaagtgggctaaaggaacagattcctagagattaatgaagaggagggaggtttctttggtcttctattccaagggtaaggttgcgattatgggtaagattggccagaggtaggaatgtggggagaaggagaggctgaaaagaaagcagaggagaacccaggtccctgcctcagccttcagcagagttggcttattgcctgcctctataccaataagtcagtcaccttgctcctctccagaggcaaagtggaagagatcctgcaagacacatctatcctttcacagtgttcccaagggaacttggaaaggagagtcaggtattagaggaaagagaagggtatttgtatacaaagccctggccttaaagaatgttacttagtagctactcccaaattgtcagccttcttacctggccaaggtgtccaagccagaaaggaaaaaaggttatggagtctttctcaccctaaggacagggtggaagagggtggtatatagggaagggccagataggcaacttcatttggcttgtgtgcatctggcctggaactggtgttaagccaggcttttgcttgtttgttgccatccctcaccctttgccatttcccttttcagagaatgtaaatgattttcatgttaggccaaaataaacaacttatagggtacatatgttgtcataaaaggtaaaagtgatgcatgccaaaccaaactaaaccaatttggattatctgctattcgggtaatcttcacagaaatgactgagagaagaatctgcagtttactgagggcatttcagttcctcctaccacctcaacaggactttgtccagactctcctcctcttacctttgtgccttgactgtggttctttgtggcaagatactttggttggttaaaataatatggaacaaaggatccactgaagtga

SEQ ID NO: 407299 - DNA, 1700 bp, Homo sapiens
aaggctaaaaactccactagtcggaagtgacgtgccagcttagccccgcaggtccgccacgtaatttgccgccgccacagctagccaccctctccccagactggcccgaagagaggaaaagtgtggaagtccacaagccgcccccgccccgccctcttcgtcgactttcagctgcaccgggaggcggcggcgcctggccagagccggggcctggagcctggactagacacctcgccggccggggcgccagtccagcgcctgcgggcaatgggcttcagcgctcgagcagcgcatgcgcgggcctgtatctccagaggattcctcgggtcacctggacgccagcatctcagccacctgccctctgggtcccttcttgcccttgattccccctgctgcttctcatcgccagccctcctcctccttcttccgcaggcaccgctagacccggccgcggccgcccgccgacaccccagcttccactgacacgagcctcggcgcggcttccgcttccggcgagtattgtgtgtcgcgccgcggggcgggggcgaggggaggaggaaggagggaggcagcgctccggcggctccgcgccccgcactcccggacccgaagccgggaagattcctttcttgtctgttagaaacgtatgtcaaacgaggatacagtgtctggaactattggttctaagatataagtggaatgagcctggatcaggagaagtatgctgagctagagttgaaggaagcttctctttctaacaagagaaagcagagttaaattatggcagagacaagtctgttagaggctggggcctctgcagcctctacagctgcggctttggagaacttacaggtggaggcgagctgctctgtgtgcctggagtatctgaaggaacctgtcatcattgagtgtgggcacaacttctgcaaagcttgcatcacccgctggtgggaggacctagagagggacttcccttgtcctgtctgtcgaaagacatcccgctaccgcagtctccgacctaatcggcaactaggcagtatggtggaaattgccaagcagctccaggccgtcaagcggaagatccgggatgagagcctctgcccccaacaccatgaggccctcagccttttctgttatgaggaccaggaggctgtatgcttgatatgtgcaatttcccacacccaccgggcccacaccgttgtgccactggacgatgctacacaggagtacaaggaaaaactgcagaagtgtctggagcccctggaacagaagctgcaggagatcactcgctgcaagtcctctgaggagaagaagcctggtgagctcaagagactagtggaaagtcgccgacagcagatcttgagggagtttgaagagcttcataggcggctggatgaagagcagcaggtgttgctttcacgactggaagaagaggaacaggacattctgcagcgactccgagaaaatgctgctcaccttggggacaagcgccgggacctggcccacttggctgccgaggtggagggcaagtgcttacagtcaggcttcgagatgcttaaggatgtcaaaagtaccctggaaaaatgtgaaaaggtgaagaccatggaggtgacttcaactacaccttgtacttctctacatagtgagataaatgataatgtcagagggagatgaagagaggaccaggcgggaacctagat

SEQ ID NO: 407300 - DNA, 1103 bp, Homo sapiens
gcatgtgcggtgaggctcgcggccggagtgcggcgctgggcggaacctaccatggcggccgagagaaagacaaagttgtccaagaatctgctgcgcatgaagtttatgcaaaggggactggactcagaaaccaagaaacaactagaagaagaagaaaagaaaatcattagtgaagagcactggtacttggatttgccagagcttaaagagaaagagagtttcataatagaagagcagagtttcttactatgtgaagatcttctctatggaagaatgtcattcagaggatttaatcctgaggttgagaaattgatgcttcagatgaatgctaagcacaaagcagaagaagttgaagatgaaacagtagagcttgatgtgtcagatgaagagatggctagaagatatgagaccttggtggggacaattgggaaaaagtttgccagaaagagagaccatgccaattatgaagaagatgaaaatggagacataacaccaattaaagcaaagaagatgttcttaaagccccaggattaagatggatgccttaagcgatggcccaggggtgcttggtggaagtcagcagggcatctggagctcatcccaatggtgtctctatagttattaatactgtaacgtttacttgtaaagagattatcattttagaaacatgctgtttttgaaacagatgtgtgatggatgttgtacatcctttgcttcttggtattcattcagagtggatttttagcccctgatctacaaatgtacattgttacagggctgcttcctaaagattttttttacctcaggtttctcttaatatagttctccagtcactgaccttgaattgacttacataaactactgccaatgtttaaattgcccttatgtttatgtttattatgtcaagccaattcgtacatacaatttggaatcaagtgtcataagaatttattatataaatttatcaagaataaaaatgcctctccagccttaagtatttacatgctcccaggtcattgtcagtttatggtattatgttgttttatttaaagcattgaattgatagaaaaatttgctctgtaataaaaatctactttcacata

SEQ ID NO: 407301 - DNA, 590 bp, Homo sapiens
gggacgggtgttagaaaatggccctaattactggattctgaaacactgaatacactccccctaggaaaaggttttaaactattatcactcttttaagccttagaaaaactagttaagactgatttctcatcttttattccttctcctcttgctaaaaagaagagattacacatttaaaaaaaaaaaggtcagaggataattatcacaaaaaggtttatgtgaaagagttggaggagagaccctgtggtgcatggatgttacatgggatgcattatccactctaaagttttaggagggtaaggctgaggtgcagattccctccattaaacagggccagccttccacttctcccacctcctccactcaccaccaccaccaccaagagatgcatttaaaattattgctgacgactagtgtttcttccatatggcttaaagatgggtgggggaagttcagggaaaatctgaaagtttattatttcttcccccactcaccggaatgtgtcagcagtatgcctgctttaaatatgagtaactaatactaagatttatgatcttaaatacactttaaattcaccctaagtataattc

SEQ ID NO: 407302 - DNA, 752 bp, Homo sapiens
gcatgtgcggtgaggctcgcggccggagtgcggcgctgggcggaacctaccatggcggccgagagaaagacaaagttgtccaagaatctgctgcgcatgaagtttatgcaaaggggactggactcagaaaccaagaaacaactagaagaagaagaaaagaaaatcattagtgaagagcactggtacttggatttgccagagcttaaagagaaagagtaggtttattaaaattgatactgatgatgcttgtggcattcagaaggaaactcctggtaaatttaactcatcattccggtgacataaagcccatgaaattgtttctgttcagtttattgatttagtagcacaactaaaaaatattaaacctatagaagaaaaaaaaaaaaaaaaaaaaaaaaaaaaaaaaaaaaaaaaaaaaaaaaaaaaaaaaaaaagcggggggggcgcgcctaagaaaaattccccgcggaggggggccccatttttatggcgctcacacccccggttctgtgtgtcaccacagaggtggtgccgccaaaaaggggacgtcgctaatatactagccagagagacggggccgcgtttttacaacaccagcgcgcgcgtcgggcaacaaacgtgtctctctgcgcttctcggggagaggacaccccaactcggtggggcgggcgcctgtgggggccacctccctcgtcgatttgcgcgcgcggccataaaaactgcggggttcggtgtgaacccgcgttttgtcg

SEQ ID NO: 407303 - DNA, 155 bp, Homo sapiens
tggggctttgccttactatttttttgactcagagcttacttctcttacaccattgtggtatcaagtattacagagagtcccttatcaattttgactagttctctagattatttgacttcagtttctctgccttcaggtaagtttgacatcagttc

SEQ ID NO: 407304 - DNA, 997 bp, Homo sapiens
gcatgtgcggtgaggctcgcggccggagtgcggcgctgggcggaacctaccatggcggccgagagaaagacaaagttgtccaagaatctgctgcgcatgaagtttatgcaaaggggactggactcagaaaccaagaaacaactagaagaagaagaaaagaaaatcattagtgaagagcactggtacttggatttgccagagcttaaagagaaagagagtttcataatagaagagcagagtttcttactatgtgaagatcttctctatggaagaatgtcattcagaggatttaatcctgaggttgagaaattgatgcttcagatgaatgctaagcacaaagcagaagaagttgaagatgaaacagtagagcttgatgtgtcagatgaagagatggctagaagatatgagaccttggtggggacaattgggaaaaagtttgccagaaagagagaccatgccaattatgaagaagatgaaaatggagacataacaccaattaaagcaaagaagatgttcttaaagccccaggattaagatggatgccttaagcgatggcccaggggtgcttggtggaagtcagcagggcatctggagctcatcccaatggtgtctctatagttattaatactgtaacgtttacttgtaaagagattatcattttagaaacatgctgtttttgaaacagatgtgtgatggatgttgtacatcctttgcttcttggtattcattcagagtggatttttagcccctgatctacaaatgtacattgttacagggctgcttcctaaagattttttttacctcaggtttctcttaatatagttctccagtcactgaccttgaattgacttacataaactactgccaatgtttaaattgcccttatgtttatgtttattatgtcaagccaattcgtacatacaatttggaatcaagtgtcataagaatttattatataaatttatcaagaataaaaatgcctctccagccttaagta

SEQ ID NO: 407305 - DNA, 1135 bp, Homo sapiens
gcatgtgcggtgaggctcgcggccggagtgcggcgctgggcggaacctaccatggcggccgagagaaagacaaagttgtccaagaatctgctgcgcatgaaggtgcggggacgctgagagagccacgccgggcgtttatgcaaaggggactggactcagaaaccaagaaacaactagaagaagaagaaaagaaaatcattagtgaagagcactggtacttggatttgccagagcttaaagagaaagagagtttcataatagaagagcagagtttcttactatgtgaagatcttctctatggaagaatgtcattcagaggatttaatcctgaggttgagaaattgatgcttcagatgaatgctaagcacaaagcagaagaagttgaagatgaaacagtagagcttgatgtgtcagatgaagagatggctagaagatatgagaccttggtggggacaattgggaaaaagtttgccagaaagagagaccatgccaattatgaagaagatgaaaatggagacataacaccaattaaagcaaagaagatgttcttaaagccccaggattaagatggatgccttaagcgatggcccaggggtgcttggtggaagtcagcagggcatctggagctcatcccaatggtgtctctatagttattaatactgtaacgtttacttgtaaagagattatcattttagaaacatgctgtttttgaaacagatgtgtgatggatgttgtacatcctttgcttcttggtattcattcagagtggatttttagcccctgatctacaaatgtacattgttacagggctgcttcctaaagattttttttacctcaggtttctcttaatatagttctccagtcactgaccttgaattgacttacataaactactgccaatgtttaaattgcccttatgtttatgtttattatgtcaagccaattcgtacatacaatttggaatcaagtgtcataagaatttattatataaatttatcaagaataaaaatgcctctccagccttaagtatttacatgctcccaggtcattgtcagtttatggtattatgttgttttatttaaagcattgaattgatagaaaaatttgctctgtaataaaaatctactttcacata

SEQ ID NO: 407306 - DNA, 1049 bp, Homo sapiens
gcatgtgcggtgaggctcgcggccggagtgcggcgctgggcggaacctaccatggcggccgagagaaagacaaagttgtccaagaatctgctgcgcatgaagtttatgcaaaggggactggactcagaaaccaagaaacaactagaagaagaagaaaagaaaatcattagtgaagagcactggtacttggatttgccagagcttaaagagaaagagagtttcataatagaagagcagagtttcttactatgtgaagatcttctctatggaagaatgtcattcagaggatttaatcctgaggttgagaaattgatgcttcagatgaatgctaagcacaaagcagaagaagttgaagatgaaacagtagagcttgatgtgtcagatgaagagatggctagaagatatgagaccttggtggggacaattgggaaaaagtttgccagaaagagagaccatgccaattatgaagaagatgattaagatggatgccttaagcgatggcccaggggtgcttggtggaagtcagcagggcatctggagctcatcccaatggtgtctctatagttattaatactgtaacgtttacttgtaaagagattatcattttagaaacatgctgtttttgaaacagatgtgtgatggatgttgtacatcctttgcttcttggtattcattcagagtggatttttagcccctgatctacaaatgtacattgttacagggctgcttcctaaagattttttttacctcaggtttctcttaatatagttctccagtcactgaccttgaattgacttacataaactactgccaatgtttaaattgcccttatgtttatgtttattatgtcaagccaattcgtacatacaatttggaatcaagtgtcataagaatttattatataaatttatcaagaataaaaatgcctctccagccttaagtatttacatgctcccaggtcattgtcagtttatggtattatgttgttttatttaaagcattgaattgatagaaaaatttgctctgtaataaaaatctactttcacata

SEQ ID NO: 407307 - DNA, 384 bp, Homo sapiens
tttactgccatattttgagtcaactttctgcagatttgataagagcagctcaagagtttagcagcatttcagaggaaaaataaaaacgaagagcagacttatagatgtacctttgcttctgcctacatttatcgggctcttactgtgcttcagtcatcatattgggacagatgaaggagatgacccagacacccagtccttaaggtctccagaaaagatagatgctcagaaagttcagatgtggtgagtctattggagggagccatggaagcatttaggacagaggcactgattttactggcactcatagaagtctagtagctttacctatgtcagacgggcgaggagttggccaggtggaagaggataagaagggcatttcaa

SEQ ID NO: 407308 - DNA, 507 bp, Homo sapiens
ctaagatttatgatcttaaatacactttaaattcaccctaagtataattcagtggggctttgccttactatttttttgactcagagcttacttctcttacaccattgtggtatcaagtattacagagagtcccttatcaattttgactagttctctagattatttgacttcagtttctctgccttcaggtaagtttgacatcagttcctttcacaagcgttttctagcctgaaggtcagcactggtgtatttttcagaaattgatgcttcagatgaatgctaagcacaaagcagaagaagttgaagatgaaacagtagagcttgatgtgtcagatgaagagatggctagaaggtaaccgtgctgcgcagcagccttctaatctggacctagcattcattggctctcccaggaatgctcctcttaccccacagtccacggcagctttcaagggagtcccccagtaggacgatgactgtgatcggccttctcttaatggcctacggggg

SEQ ID NO: 407309 - DNA, 476 bp, Homo sapiens
gccccaggattaagatggatgccttaagcgatggcccaggggtgcttggtggaagtcagcagggcatctggagctcatcccaatggtgtctctatagttattaatactgtaacgtttacttgtaaagagattatcattttagaaacatgctgtttttgaaacagatgtgtgatggatgttgtacatcctttgcttcttggtattcattcagagtggatttttagcccctgatctacaaatgtacattgttacagggctgcttcctaaagattttttttacctcaggtttctcttaatatagttctccagtcactgaccttgaattgacttacataaactactgccaatgtttaaattgcccttatgtttatgtttattatgtcaagccaattcgtacatacaatttggaatcaagtgtcataagaatttattatataaatttatcaagaataaaaatgcctctccagccttaagta

SEQ ID NO: 407310 - DNA, 1491 bp, Homo sapiens
gcatgtgcggtgaggctcgcggccggagtgcggcgctgggcggaacctaccatggcggccgagagaaagacaaagttgtccaagaatctgctgcgcatgaagtttatgcaaaggggactggactcagaaaccaagaaacaactagaagaagaagaaaagaaaatcattagtgaagagcactggtacttggatttgccagagcttaaagagaaagagagtttcataatagaagagcagagtttcttactatgtgaagatcttctctatggaagaatgtcattcagaggatttaatcctgaggttgagaaattgatgcttcagatgaatgctaagcacaaagcagaagaagttgaagatgaaacagtagagcttgatgtgtcagatgaagagatggctagaagatatgagaccttggtggggacaattgggaaaaagtttgccagaaagagagaccatgccaattatgaagaagatgaaaatggagacataacaccaattaaagcaaagaagatgttcttaaagccccaggattaagatggatgccttaagcgatggcccaggggtgcttggtggaagtcagcagggcatctggagctcatcccaatggtgtctctatagttattaatactgtaacgtttacttgtaaagagattatcattttagaaacatgctgtttttgaaacagatgtgtgatggatgttgtacatcctttgcttcttggtattcattcagagtggatttttagcccctgatctacaaatgtacattgttacagggctgcttcctaaagattttttttacctcaggtttctcttaatatagttctccagtcactgaccttgaattgacttacataaactactgccaatgtttaaattgcccttatgtttatgtttattatgtcaagccaattcgtacatacaatttggaatcaagtgtcataagaatttattatataaatttatcaagaataaaaatgcctctccagccttaagtatttacatgctcccaggtcattgtcagtttatggtattatgttgttttatttaaagcattgaattgatagaaaaatttgctctgtaataaaaatctactttcacataacacccgaggaacgacgcacaacagagacaagaaagacaaaaaaaaaaaccgcggcgggcgggagcggagcaacaggagccaccaaggggagccacaggcacaagagagcaaccccagcggcccctggacgcaaacggggggccccactacatagggagacaaacataaagaggaaggagacagcaggtcgacgaggtaacaacaggagcgatcggacacgggggaaaaaacgcgtgagaacaaccaggagaaacctagggagaacaccgcaccgcctacacactacggggagagagacaaacacgagccaacaaaaagagcacagaggagacataaagaccgcccaacaaaggaacatacatacaaacgtgagcagtgataaaggcg

SEQ ID NO: 407311 - DNA, 1375 bp, Homo sapiens
gcatgtgcggtgaggctcgcggccggagtgcggcgctgggcggaacctaccatggcggccgagagaaagacaaagttgtccaagaatctgctgcgcatgaagtttatgcaaaggggactggactcagaaaccaagaaacaactagaagaagaagaaaagaaaatcattagtgaagagcactggtacttggatttgccagagcttaaagagaaagagagtttcataatagaagagcagagtttcttactatgtgaagatcttctctatggaagaatgtcattcagaggatttaatcctgaggttgagaaattgatgcttcagatgaatgctaagcacaaagcagaagaagttgaagatgaaacagtagagcttgatgtgtcagatgaagagatggctagaagatatgagaccttggtggggacaattgggaaaaagtttgccagaaagagagaccatgccaattatgaagaagatgaaaatggagacataacaccaattaaagcaaagaagatgttcttaaagccccaggattaagatggatgccttaagcgatggcccaggggtgcttggtggaagtcagcagggcatctggagctcatcccaatggtgtctctatagttattaatactgtaacgtttacttgtaaagagattatcattttagaaacatgctgtttttgaaacagatgtgtgatggatgttgtacatcctttgcttcttggtattcattcagagtggatttttagcccctgatctacaaatgtacattgttacagggctgcttcctaaagattttttttacctcaggtttctcttaatatagttctccagtcactgaccttgaattgacttacataaactactgccaatgtttaaattgcccttatgtttatgtttattatgtcaagccaattcgtacatacaatttggaatcaagtgtcataagaatttattatataaatttatcaagaataaaaatgcctctccagccttaagtaaaaaaaaaaaaaaaaaaaaaaaaaaaaaaaaaaaaaaaaaaaaaaaaaaaaaaaaaaaaagcggggggggcgcgcctaagaaaaattccccgcggaggggggccccatttttatggcgctcacacccccggttctgtgtgtcaccacagaggtggtgccgccaaaaaggggacgtcgctaatatactagccagagagacggggccgcgtttttacaacaccagcgcgcgcgtcgggcaacaaacgtgtctctctgcgcttctcggggagaggacaccccaactcggtggggcgggcgcctgtgggggccacctccctcgtcgatttgcgcgcgcggccataaaaactgcggggttcggtgtgaacccgcgttttgtcg

SEQ ID NO: 407312 - DNA, 1193 bp, Homo sapiens
gcatgtgcggtgaggctcgcggccggagtgcggcgctgggcggaacctaccatggcggccgagagaaagacaaagttgtccaagaatctgctgcgcatgaagtcatcatattgggacagatgaaggagatgacccagacacccagtccttaaggtctccagaaaagatagatgctcagaaagttcagatgtgtttatgcaaaggggactggactcagaaaccaagaaacaactagaagaagaagaaaagaaaatcattagtgaagagcactggtacttggatttgccagagcttaaagagaaagagagtttcataatagaagagcagagtttcttactatgtgaagatcttctctatggaagaatgtcattcagaggatttaatcctgaggttgagaaattgatgcttcagatgaatgctaagcacaaagcagaagaagttgaagatgaaacagtagagcttgatgtgtcagatgaagagatggctagaagatatgagaccttggtggggacaattgggaaaaagtttgccagaaagagagaccatgccaattatgaagaagatgaaaatggagacataacaccaattaaagcaaagaagatgttcttaaagccccaggattaagatggatgccttaagcgatggcccaggggtgcttggtggaagtcagcagggcatctggagctcatcccaatggtgtctctatagttattaatactgtaacgtttacttgtaaagagattatcattttagaaacatgctgtttttgaaacagatgtgtgatggatgttgtacatcctttgcttcttggtattcattcagagtggatttttagcccctgatctacaaatgtacattgttacagggctgcttcctaaagattttttttacctcaggtttctcttaatatagttctccagtcactgaccttgaattgacttacataaactactgccaatgtttaaattgcccttatgtttatgtttattatgtcaagccaattcgtacatacaatttggaatcaagtgtcataagaatttattatataaatttatcaagaataaaaatgcctctccagccttaagtatttacatgctcccaggtcattgtcagtttatggtattatgttgttttatttaaagcattgaattgatagaaaaatttgctctgtaataaaaatctactttcacata

SEQ ID NO: 407313 - DNA, 5612 bp, Homo sapiens
  misc_feature (2086)..(2086): n is a, c, g, or t
  misc_feature (2693)..(2693): n is a, c, g, or t
ggggaaagggaggtggagtttccaacagggaacttgacccgttagcagccgcagccatggcggcgcgttcgcctccctcaccgcacccttcgcccccagcgcgacagctgggccccaggtccccacgtgttgggcggggagctgaagtacacgcaatgcgcagcgaggcctcgggttttgccggcgcagcgcgggaggtggtcgcggacgaaagtgatactccggctcatgctcccctcctcagcgcgcccatggggtccagacggctagagggcatctcggtagaggaggcgatggtgacccggacgcagctgctggaggaagagctgagcagcctaaaggaggagttggccctgtgtcaggctgataaagaatttgtatggtctttgtggaaacgtctccaggttacaaacccagatctcacacaagtggtcagtttggttgtggaaagagaaaaacagaaatctgaagctaaagacagaaaagttctagaaattctgcaagtcaaggatgccaaaatacaagaatttgaacagagagagtcagtactgaaacaggaaataaatgaccttgtaaaacggaaaattgcagtagatgaagaaaatgctttcttaaggaaagaattcagtgacttggagaagaaatttaaagataaaagtcaagaaattaaggacactaaggagtgtgtacagaacaaagaagagcaaaacagactagttataaaaaatctggaggaggaaaacaagaaattaagtacccgctgcactgacctgctaaatgacctggagaaattgaggaagcaggaagcacatttgagaaaagaaaaatatagcactgatgcaaaaataaagacctttgaagacaatttaattgaagcaaggaaagaagttgaagtatcacagagtaaatacaatgctctatcattacagttgagtaataaacagactgaacttatccagaaggatatggatattaccctggtcaggaaggaactgcaggagctgcagaatctttacaaacagaacagtacacatacagcccagcaagcagagctgatccagcagcttcaggttctcaatatggacacacaaaaagtactgagaaatcaggaagatgttcacacagctgaaagtatatcatatcaaaaactttacaatgagttacatatttgttttgaaaccacaaaatcaaatgaagctatgctccggcaaagtgttactaatcttcaggatcagctattacaaaaagagcaagaaaatgctaagttaaaagaaaaacttcaggaatcacagggagcacctcttcctttacctcaagaaagtgatccagactactcagcacaggtacctcatcgcccatccttatcaagcttagaaacgttaatggtttcacagaagtctgaaattgagtatttacaggagaaactaaagatagcaaatgaaaaactgtcagaaaacatatctgccaacaagggtttctcccgaaagagcatcatgacaagtgctgaaggaaaacataaggaaccacctgtgaaacgttcaaggtctttgtccccaaagagctctttcacagactcagaagagctacagaagctgagaaaagctgaaagaaagattgaaaacttagagaaggcactacaactaaagagccaagaaaatgatgagctaagagatgcccatgaaaaacgcaaggaacggctacagatgttacagaccaactacagagcagtaaaagagcaattaaaacagtgggaagaaggcagtggcatgactgaaatcaggaaaataaagagagcagatccccaacaacttcgacaagaagattctgatgctgtgtggaatgaactggcatatttcaaaagggaaaaccaggagctaatgattcaaaagatgaatcttgaagaagaattagatgaacttaaagtacatatatctattgataaggcagcaatacaagaattgaatagatgtgtggcagagagaagagaagaacagctctttagatctggtgaagatgatgaggtcaagaggagtactccagagaagaatggaaaagaaatgttggagcagacattacagaaggtcantgagttggaaaatcggctgaaatcttttgagaaaaggtcgagaaaattaaaagaagggaataaaaaattaatgaaagaaaatgattttctgaaatccctcttaaaacagcaacaagaagatacagagaccagagaaaaagagctagaacagataataaaggggagtaaagatgtagaaaaagaaaatactgaacttcaagtaaaaatcagtgagctggagacagaagtcacttccctgaggagacaagtggcagaagctaatgcattgagaaatgaaaatgaagagctgatcaacccaatggagaaatcacaccagtcagcagacagagctaaatccgagatggccaccatgaaagtgagatctggacgatatgattgtaagacaactatgaccaaggttaaatttaaagctgcgaagaaaaattgctctgtgggtcgtcaccacactgttctcaatcattccatcaaggttatgagcaatgtgtttgagaacctcagcaaggacggctgggaggatgtgagtgaaagcagcagtgattctgaagcacagacctctcaaactttgggaacaattattgtagaaacatcccagaaaataagtcctacngaagatggaaaagaccagaaagaaagtgatccaacagaagacagccaaacacaaggaaaagaaatagtacagacatatttaaatatagatggcaagaccccaaaggactattttcatgataagaatgccaaaaaaccaacttttcaaaagaagaattgcaagatgcaaaagagttcacatacagcagttcctactagagtcaacagagaaaagtacaaaaatataactgcccagaaatcaagtagcaatattattttattacgagaacggattatatccttgcaacaacaaaacagtgtacttcagaatgccaagaaaacagcagaattgtctgttaaagaatataaagaagttaatgaaaagctcctccatcaacagcaagtatccgatcaacgatttcagacaagcaggcagacaataaagaagctaaatttggatttggctgggcttcggaaagaaaaagaagatttactaaagaaattggagtcctcatctgaaatcacaagtttggcagaagaaaattcccaggtaacatttccacggatacaagttacatcacttagtccttcaaggagcatggatttggaaatgaagcaattgcagtataaactaaagaatgctactaatgaactcactaaacagtcatcaaatgtgaagactttgaaatttgaactcctagcaaaagaagaacacataaaggaaatgcatgaaaagatatctcgaatggagagggatataactatgaaaagacatttgatagaggacttgaaatttcgacagaaagtaaatttggaaagtaacaagagttttagtgaaatgttacaaaatcttgataaaaaggtaaagacattaactgaagaatgttccaacaagaaggtatcaattgattcactaaagcaaagacttaacgttgctgtaaaagaaaagtcacagtatgaacagatgtatcagaaatctaaagaggagttagaaaaaaaggatctcaagcttactctcctagtatcaagaataagtgagactgaatctgcaatggcagaaattgaaacagcagcatctaagcagcttcaagaattagcattgcaaagtgaacaggtcctagaaggtgcacagaagacattgctgttagccaatgaaaaagtagaagagttcaccacatttgtgaaggctttggccaaagagttgcaaaatgatgtccatgtggtaaggcgacaaataagagagcttaaaaaaatgaagaaaaacagggacgcctgtaaaacctcaacccataaagcccagaccttggcagcttctatcctgaacatttcacggtcagatttagaggaaatattagacacagaagatcaagtggaaattgaaaaaacaaaaattgatgctgaaaatgacaaggaatggatgttgtacattcagaaacttcttgaaggacagagtcttactctgtctcccaggctgaagtgcaatggcgcaatcatggctcaccaaaacctccgcctgccagactcgagcagttctgcctcagcctcctgagtagctgggactacagcttccttttgcctcatatttactagaagcagtactggaaaaaataaatgaaaaaaagaaactagttgaaggatatttcacaattatgaaagatattagatgatattaaaatggagagctttattgcaaatgtgaaaactttttatgtggtgtgattggaatacatgcattgcaatcctgacacggtatctgctccaactatcaatagtcaggttcaataccaaaataagaagtctctgaaaataattaattgctgaacaagtgaaactaattaagtacatagccatttaaaaggaaatagtgtagcatctgatggtcgaatacaaatattgccacaaatcagtgcaaacttaaaaatgattttccttctagtgcattaaaagaaactgagcaggcttggtacacacaaattggcctgagcataagaagaaaaagtatcaactaaggatttaatgttttacgtttcatgaagaaactagactttttacataaaactgctatagatggccataagtggtccagggagcaacagatttgtagtatgagcaaatataaaatgaagcatcataacttgagcatttattgaaataaattgtgtggtccaattgaatctgttctcattgatgtgctggtttatgtaggagatactgtgtatttctacaactctttggcaaaaacaaaaacattttcttcttctctctcttaacttcacaatactatacgttgtgtagtcatataaatttgcagggaaccacaaacccaatgtataaaattaggctctatttaacagaactactactgtggtcagctaattaaagttacattcttaaccatgatgtcatccttatttagattcctgaacattcccacctcatttcacctcttcaccgtgttcctgccataccctttttggttcctctaattcaccatactggtgcctgcctcccacatttgcccttggtcttctctctttctagaatactctgcactcaactttcctcatggctggctccttgtcatcattcagctccaccttccccggtccctcagagacacattctctgaccagcttactattttatttcctcatagcacaaaattatctatctgttcatgtatttgttttcttgtttattttcttcttttccctctttagtatgtaggtcccatgagattaaggcaagggttggcagattatagcctgcagggcgaatctggcctgccacctgttttgtatggcccacaagctaagaatggtttttgccttattaaatggtttttaaaaaatcaaaaggagaataatattttgtagcatgtgaaaattatataaaattcaaattttggtgtctgttaataaagttttattggaacacagtg

SEQ ID NO: 407314 - DNA, 5514 bp, Homo sapiens
  misc_feature (2140)..(2140): n is a, c, g, or t
  misc_feature (2747)..(2747): n is a, c, g, or t
ggggaaagggaggtggagtttccaacagggaacttgacccgttagcagccgcagccatggcggcgcgttcgcctccctcaccgcacccttcgcccccagcgcgacagctgggccccaggtccccacgtgttgggcggggagctgaagtacacgcaatgcgcagcgaggcctcgggttttgccggcgcagcgcgggaggtggtcgcggacgaaagtgataaaatctgggtgggtgaagaagggtcagggggccggcgagggcctgggggggcagctccggctcatgctcccctcctcagcgcgcccatggggtccagacggctagagggcatctcggtagaggaggcgatggtgacccggacgcagctgctggaggaagagctgagcagcctaaaggaggagttggccctgtgtcaggctgataaagaatttgtatggtctttgtggaaacgtctccaggttacaaacccagatctcacacaagtggtcagtttggttgtggaaagagaaaaacagaaatctgaagctaaagacagaaaagttctagaaattctgcaagtcaaggatgccaaaatacaagaatttgaacagagagagtcagtactgaaacaggaaataaatgaccttgtaaaacggaaaattgcagtagatgaagaaaatgctttcttaaggaaagaattcagtgacttggagaagaaatttaaagataaaagtcaagaaattaaggacactaaggagtgtgtacagaacaaagaagagcaaaacagactagttataaaaaatctggaggaggaaaacaagaaattaagtacccgctgcactgacctgctaaatgacctggagaaattgaggaagcaggaagcacatttgagaaaagaaaaatatagcactgatgcaaaaataaagacctttgaagacaatttaattgaagcaaggaaagaagttgaagtatcacagagtaaatacaatgctctatcattacagttgagtaataaacagactgaacttatccagaaggatatggatattaccctggtcaggaaggaactgcaggagctgcagaatctttacaaacagaacagtacacatacagcccagcaagcagagctgatccagcagcttcaggttctcaatatggacacacaaaaagtactgagaaatcaggaagatgttcacacagctgaaagtatatcatatcaaaaactttacaatgagttacatatttgttttgaaaccacaaaatcaaatgaagctatgctccggcaaagtgttactaatcttcaggatcagctattacaaaaagagcaagaaaatgctaagttaaaagaaaaacttcaggaatcacagggagcacctcttcctttacctcaagaaagtgatccagactactcagcacaggtacctcatcgcccatccttatcaagcttagaaacgttaatggtttcacagaagtctgaaattgagtatttacaggagaaactaaagatagcaaatgaaaaactgtcagaaaacatatctgccaacaagggtttctcccgaaagagcatcatgacaagtgctgaaggaaaacataaggaaccacctgtgaaacgttcaaggtctttgtccccaaagagctctttcacagactcagaagagctacagaagctgagaaaagctgaaagaaagattgaaaacttagagaaggcactacaactaaagagccaagaaaatgatgagctaagagatgcccatgaaaaacgcaaggaacggctacagatgttacagaccaactacagagcagtaaaagagcaattaaaacagtgggaagaaggcagtggcatgactgaaatcaggaaaataaagagagcagatccccaacaacttcgacaagaagattctgatgctgtgtggaatgaactggcatatttcaaaagggaaaaccaggagctaatgattcaaaagatgaatcttgaagaagaattagatgaacttaaagtacatatatctattgataaggcagcaatacaagaattgaatagatgtgtggcagagagaagagaagaacagctctttagatctggtgaagatgatgaggtcaagaggagtactccagagaagaatggaaaagaaatgttggagcagacattacagaaggtcantgagttggaaaatcggctgaaatcttttgagaaaaggtcgagaaaattaaaagaagggaataaaaaattaatgaaagaaaatgattttctgaaatccctcttaaaacagcaacaagaagatacagagaccagagaaaaagagctagaacagataataaaggggagtaaagatgtagaaaaagaaaatactgaacttcaagtaaaaatcagtgagctggagacagaagtcacttccctgaggagacaagtggcagaagctaatgcattgagaaatgaaaatgaagagctgatcaacccaatggagaaatcacaccagtcagcagacagagctaaatccgagatggccaccatgaaagtgagatctggacgatatgattgtaagacaactatgaccaaggttaaatttaaagctgcgaagaaaaattgctctgtgggtcgtcaccacactgttctcaatcattccatcaaggttatgagcaatgtgtttgagaacctcagcaaggacggctgggaggatgtgagtgaaagcagcagtgattctgaagcacagacctctcaaactttgggaacaattattgtagaaacatcccagaaaataagtcctacngaagatggaaaagaccagaaagaaagtgatccaacagaagacagccaaacacaaggaaaagaaatagtacagacatatttaaatatagatggcaagaccccaaaggactattttcatgataagaatgccaaaaaaccaacttttcaaaagaagaattgcaagatgcaaaagagttcacatacagcagttcctactagagtcaacagagaaaagtacaaaaatataactgcccagaaatcaagtagcaatattattttattacgagaacggattatatccttgcaacaacaaaacagtgtacttcagaatgccaagaaaacagcagaattgtctgttaaagaatataaagaagttaatgaaaagctcctccatcaacagcaagtatccgatcaacgatttcagacaagcaggcagacaataaagaccagaccagctttctccatgcagctctggccatgcgtattggccatgtgaagctaaatttggatttggctgggcttcggaaagaaaaagaagatttactaaagaaattggagtcctcatctgaaatcacaagtttggcagaagaaaattcccagaatgctactaatgaactcactaaacagtcatcaaatgtgaagactttgaaatttgaactcctagcaaaagaagaacacataaaggaaatgcatgaaaagatatctcgaatggagagggatataactatgaaaagacatttgatagaggacttgaaatttcgacagaaagtaaatttggaaagtaacaagagttttagtgaaatgttacaaaatcttgataaaaaggtaaagacattaactgaagaatgttccaacaagaaggtatcaattgattcactaaagcaaagacttaacgttgctgtaaaagaaaagtcacagtatgaacagatgtatcagaaatctaaagaggagttagaaaaaaaggatctcaagcttactctcctagtatcaagaataagtgagactgaatctgcaatggcagaaattgaaacagcagcatctaagcagcttcaagaattagcattgcaaagtgaacaggtcctagaaggtgcacagaagacattgctgttagccaatgaaaaagtagaagagttcaccacatttgtgaaggctttggccaaagagttgcaaaatgatgtccatgtggtaaggcgacaaataagagagcttaaaaaaatgaagaaaaacagggacgcctgtaaaacctcaacccataaagcccagaccttggcagcttctatcctgaacatttcacggtcagatttagaggaaatattagacacagaagatcaagtggaaattgaaaaaacaaaaattgatgctgaaaatgacaaggaatggatgttgtacattcagaaacttcttgaaggacagcttccttttgcctcatatttactagaagcagtactggaaaaaataaatgaaaaaaagaaactagttgaaggatatttcacaattatgaaagatattagatgatattaaaatggagagctttattgcaaatgtgaaaactttttatgtggtgtgattggaatacatgcattgcaatcctgacacggtatctgctccaactatcaatagtcaggttcaataccaaaataagaagtctctgaaaataattaattgctgaacaagtgaaactaattaagtacatagccatttaaaaggaaatagtgtagcatctgatggtcgaatacaaatattgccacaaatcagtgcaaacttaaaaatgattttccttctagtgcattaaaagaaactgagcaggcttggtacacacaaattggcctgagcataagaagaaaaagtatcaactaaggatttaatgttttacgtttcatgaagaaactagactttttacataaaactgctatagatggccataagtggtccagggagcaacagatttgtagtatgagcaaatataaaatgaagcatcataacttgagcatttattgaaataaattgtgtggtccaattgaatctgttctcattgatgtgctggtttatgtaggagatactgtgtatttctacaactctttggcaaaaacaaaaacattttcttcttctctctcttaacttcacaatactatacgttgtgtagtcatataaatttgcagggaaccacaaacccaatgtataaaattaggctctatttaacagaactactactgtggtcagctaattaaagttacattcttaaccatgatgtcatccttatttagattcctgaacattcccacctcatttcacctcttcaccgtgttcctgccataccctttttggttcctctaattcaccatactggtgcctgcctcccacatttgcccttggtcttctctctttctagaatactctgcactcaactttcctcatggctggctccttgtcatcattcagctccaccttccccggtccctcagagacacattctctgaccagcttactattttatttcctcatagcacaaaattatctatctgttcatgtatttgttttcttgtttattttcttcttttccctctttagtatgtaggtcccatgagattaaggcaagggttggcagattatagcctgcagggcgaatctggcctgccacctgttttgtatggcccacaagctaagaatggtttttgccttattaaatggtttttaaaaaatcaaaaggagaataatattttgtagcatgtgaaaattatataaaattcaaattttggtgtctgttaataaagttttattggaacacagtg

SEQ ID NO: 407315 - DNA, 3622 bp, Homo sapiens
  misc_feature (39)..(39): n is a, c, g, or t
  misc_feature (147)..(147): n is a, c, g, or t
  misc_feature (211)..(211): n is a, c, g, or t
  misc_feature (818)..(818): n is a, c, g, or t
agaagaattagatgaacttaaagtacatatatctatgtnggaattcgaagaaaggggaggggcacccaaaaaggcaatacaagaattgaatagatgtgggcaaacaggagaaggggggaagtcaaagggggtggggaatgggtcatntgaaaagaaatactccagagaagaatggaaaagaaatgttggagcagacattacagaaggtcantgagttggaaaatcggctgaaatcttttgagaaaaggtcgagaaaattaaaagaagggaataaaaaattaatgaaagaaaatgattttctgaaatccctcttaaaacagcaacaagaagatacagagaccagagaaaaagagctagaacagataataaaggggagtaaagatgtagaaaaagaaaatactgaacttcaagtaaaaatcagtgagctggagacagaagtcacttccctgaggagacaagtggcagaagctaatgcattgagaaatgaaaatgaagagctgatcaacccaatggagaaatcacaccagtcagcagacagagctaaatccgagatggccaccatgaaagtgagatctggacgatatgattgtaagacaactatgaccaaggttaaatttaaagctgcgaagaaaaattgctctgtgggtcgtcaccacactgttctcaatcattccatcaaggttatgagcaatgtgtttgagaacctcagcaaggacggctgggaggatgtgagtgaaagcagcagtgattctgaagcacagacctctcaaactttgggaacaattattgtagaaacatcccagaaaataagtcctacngaagatggaaaagaccagaaagaaagtgatccaacagaagacagccaaacacaaggaaaagaaatagtacagacatatttaaatatagatggcaagaccccaaaggactattttcatgataagaatgccaaaaaaccaacttttcaaaagaagaattgcaagatgcaaaagagttcacatacagcagttcctactagagtcaacagagaaaagtacaaaaatataactgcccagaaatcaagtagcaatattattttattacgagaacggattatatccttgcaacaacaaaacagtgtacttcagaatgccaagaaaacagcagaattgtctgttaaagaatataaagaagttaatgaaaagctcctccatcaacagcaagtatccgatcaacgatttcagacaagcaggcagacaataaagaagctaaatttggatttggctgggcttcggaaagaaaaagaagatttactaaagaaattggagtcctcatctgaaatcacaagtttggcagaagaaaattcccaggtaacatttccacggatacaagttacatcacttagtccttcaaggagcatggatttggaaatgaagcaattgcagtataaactaaagaatgctactaatgaactcactaaacagtcatcaaatgtgaagactttgaaatttgaactcctagcaaaagaagaacacataaaggaaatgcatgaaaagatatctcgaatggagagggatataactatgaaaagacatttgatagaggacttgaaatttcgacagaaagtaaatttggaaagtaacaagagttttagtgaaatgttacaaaatcttgataaaaaggtaaagacattaactgaagaatgttccaacaagaaggtatcaattgattcactaaagcaaagacttaacgttgctgtaaaagaaaagtcacagtatgaacagatgtatcagaaatctaaagaggagttagaaaaaaaggatctcaagcttactctcctagtatcaagaataagtgagactgaatctgcaatggcagaaattgaaacagcagcatctaagcagcttcaagaattagcattgcaaagtgaacaggtcctagaaggtgcacagaagacattgctgttagccaatgaaaaagtagaagagttcaccacatttgtgaaggctttggccaaagagttgcaaaatgatgtccatgtggtaaggcgacaaataagagagcttaaaaaaatgaagaaaaacagggacgcctgtaaaacctcaacccataaagcccagaccttggcagcttctatcctgaacatttcacggtcagatttagaggaaatattagacacagaagatcaagtggaaattgaaaaaacaaaaattgatgctgaaaatgacaaggaatggatgttgtacattcagaaacttcttgaaggacagcttccttttgcctcatatttactagaagcagtactggaaaaaataaatgaaaaaaagaaactagttgaaggatatttcacaattatgaaagatattagatgatattaaaatggagagctttattgcaaatgtgaaaactttttatgtggtgtgattggaatacatgcattgcaatcctgacacggtatctgctccaactatcaatagtcaggttcaataccaaaataagaagtctctgaaaataattaattgctgaacaagtgaaactaattaagtacatagccatttaaaaggaaatagtgtagcatctgatggtcgaatacaaatattgccacaaatcagtgcaaacttaaaaatgattttccttctagtgcattaaaagaaactgagcaggcttggtacacacaaattggcctgagcataagaagaaaaagtatcaactaaggatttaatgttttacgtttcatgaagaaactagactttttacataaaactgctatagatggccataagtggtccagggagcaacagatttgtagtatgagcaaatataaaatgaagcatcataacttgagcatttattgaaataaattgtgtggtccaattgaatctgttctcattgatgtgctggtttatgtaggagatactgtgtatttctacaactctttggcaaaaacaaaaacattttcttcttctctctcttaacttcacaatactatacgttgtgtagtcatataaatttgcagggaaccacaaacccaatgtataaaattaggctctatttaacagaactactactgtggtcagctaattaaagttacattcttaaccatgatgtcatccttatttagattcctgaacattcccacctcatttcacctcttcaccgtgttcctgccataccctttttggttcctctaattcaccatactggtgcctgcctcccacatttgcccttggtcttctctctttctagaatactctgcactcaactttcctcatggctggctccttgtcatcattcagctccaccttccccggtccctcagagacacattctctgaccagcttactattttatttcctcatagcacaaaattatctatctgttcatgtatttgttttcttgtttattttcttcttttccctctttagtatgtaggtcccatgagattaaggcaagggttggcagattatagcctgcagggcgaatctggcctgccacctgttttgtatggcccacaagctaagaatggtttttgccttattaaatggtttttaaaaaatcaaaaggagaataatattttgtagcatgtgaaaattatataaaattcaaattttggtgtctgttaataaagttttattggaacacagtg

SEQ ID NO: 407316 - DNA, 241 bp, Homo sapiens
caaagttgcagacatctaacttctaatggtttaataatatttagtatgtttttgaactgaagaaaatatagagttttaataatcttttttgtgtttcttttacagcttccttttgcctcatatttactagaagcagtactggaaaaaataaatgaaaaaaagaaactagttgaaggatatttcacaattatgaaagatattagatgatattaaaatggagagctttattgcaaatgtgaaa

SEQ ID NO: 407317 - DNA, 5666 bp, Homo sapiens
  misc_feature (2140)..(2140): n is a, c, g, or t
  misc_feature (2747)..(2747): n is a, c, g, or t
ggggaaagggaggtggagtttccaacagggaacttgacccgttagcagccgcagccatggcggcgcgttcgcctccctcaccgcacccttcgcccccagcgcgacagctgggccccaggtccccacgtgttgggcggggagctgaagtacacgcaatgcgcagcgaggcctcgggttttgccggcgcagcgcgggaggtggtcgcggacgaaagtgataaaatctgggtgggtgaagaagggtcagggggccggcgagggcctgggggggcagctccggctcatgctcccctcctcagcgcgcccatggggtccagacggctagagggcatctcggtagaggaggcgatggtgacccggacgcagctgctggaggaagagctgagcagcctaaaggaggagttggccctgtgtcaggctgataaagaatttgtatggtctttgtggaaacgtctccaggttacaaacccagatctcacacaagtggtcagtttggttgtggaaagagaaaaacagaaatctgaagctaaagacagaaaagttctagaaattctgcaagtcaaggatgccaaaatacaagaatttgaacagagagagtcagtactgaaacaggaaataaatgaccttgtaaaacggaaaattgcagtagatgaagaaaatgctttcttaaggaaagaattcagtgacttggagaagaaatttaaagataaaagtcaagaaattaaggacactaaggagtgtgtacagaacaaagaagagcaaaacagactagttataaaaaatctggaggaggaaaacaagaaattaagtacccgctgcactgacctgctaaatgacctggagaaattgaggaagcaggaagcacatttgagaaaagaaaaatatagcactgatgcaaaaataaagacctttgaagacaatttaattgaagcaaggaaagaagttgaagtatcacagagtaaatacaatgctctatcattacagttgagtaataaacagactgaacttatccagaaggatatggatattaccctggtcaggaaggaactgcaggagctgcagaatctttacaaacagaacagtacacatacagcccagcaagcagagctgatccagcagcttcaggttctcaatatggacacacaaaaagtactgagaaatcaggaagatgttcacacagctgaaagtatatcatatcaaaaactttacaatgagttacatatttgttttgaaaccacaaaatcaaatgaagctatgctccggcaaagtgttactaatcttcaggatcagctattacaaaaagagcaagaaaatgctaagttaaaagaaaaacttcaggaatcacagggagcacctcttcctttacctcaagaaagtgatccagactactcagcacaggtacctcatcgcccatccttatcaagcttagaaacgttaatggtttcacagaagtctgaaattgagtatttacaggagaaactaaagatagcaaatgaaaaactgtcagaaaacatatctgccaacaagggtttctcccgaaagagcatcatgacaagtgctgaaggaaaacataaggaaccacctgtgaaacgttcaaggtctttgtccccaaagagctctttcacagactcagaagagctacagaagctgagaaaagctgaaagaaagattgaaaacttagagaaggcactacaactaaagagccaagaaaatgatgagctaagagatgcccatgaaaaacgcaaggaacggctacagatgttacagaccaactacagagcagtaaaagagcaattaaaacagtgggaagaaggcagtggcatgactgaaatcaggaaaataaagagagcagatccccaacaacttcgacaagaagattctgatgctgtgtggaatgaactggcatatttcaaaagggaaaaccaggagctaatgattcaaaagatgaatcttgaagaagaattagatgaacttaaagtacatatatctattgataaggcagcaatacaagaattgaatagatgtgtggcagagagaagagaagaacagctctttagatctggtgaagatgatgaggtcaagaggagtactccagagaagaatggaaaagaaatgttggagcagacattacagaaggtcantgagttggaaaatcggctgaaatcttttgagaaaaggtcgagaaaattaaaagaagggaataaaaaattaatgaaagaaaatgattttctgaaatccctcttaaaacagcaacaagaagatacagagaccagagaaaaagagctagaacagataataaaggggagtaaagatgtagaaaaagaaaatactgaacttcaagtaaaaatcagtgagctggagacagaagtcacttccctgaggagacaagtggcagaagctaatgcattgagaaatgaaaatgaagagctgatcaacccaatggagaaatcacaccagtcagcagacagagctaaatccgagatggccaccatgaaagtgagatctggacgatatgattgtaagacaactatgaccaaggttaaatttaaagctgcgaagaaaaattgctctgtgggtcgtcaccacactgttctcaatcattccatcaaggttatgagcaatgtgtttgagaacctcagcaaggacggctgggaggatgtgagtgaaagcagcagtgattctgaagcacagacctctcaaactttgggaacaattattgtagaaacatcccagaaaataagtcctacngaagatggaaaagaccagaaagaaagtgatccaacagaagacagccaaacacaaggaaaagaaatagtacagacatatttaaatatagatggcaagaccccaaaggactattttcatgataagaatgccaaaaaaccaacttttcaaaagaagaattgcaagatgcaaaagagttcacatacagcagttcctactagagtcaacagagaaaagtacaaaaatataactgcccagaaatcaagtagcaatattattttattacgagaacggattatatccttgcaacaacaaaacagtgtacttcagaatgccaagaaaacagcagaattgtctgttaaagaatataaagaagttaatgaaaagctcctccatcaacagcaagtatccgatcaacgatttcagacaagcaggcagacaataaagaagctaaatttggatttggctgggcttcggaaagaaaaagaagatttactaaagaaattggagtcctcatctgaaatcacaagtttggcagaagaaaattcccaggtaacatttccacggatacaagttacatcacttagtccttcaaggagcatggatttggaaatgaagcaattgcagtataaactaaagaatgctactaatgaactcactaaacagtcatcaaatgtgaagactttgaaatttgaactcctagcaaaagaagaacacataaaggaaatgcatgaaaagatatctcgaatggagagggatataactatgaaaagacatttgatagaggacttgaaatttcgacagaaagtaaatttggaaagtaacaagagttttagtgaaatgttacaaaatcttgataaaaaggtaaagacattaactgaagaatgttccaacaagaaggtatcaattgattcactaaagcaaagacttaacgttgctgtaaaagaaaagtcacagtatgaacagatgtatcagaaatctaaagaggagttagaaaaaaaggatctcaagcttactctcctagtatcaagaataagtgagactgaatctgcaatggcagaaattgaaacagcagcatctaagcagcttcaagaattagcattgcaaagtgaacaggtcctagaaggtgcacagaagacattgctgttagccaatgaaaaagtagaagagttcaccacatttgtgaaggctttggccaaagagttgcaaaatgatgtccatgtggtaaggcgacaaataagagagcttaaaaaaatgaagaaaaacagggacgcctgtaaaacctcaacccataaagcccagaccttggcagcttctatcctgaacatttcacggtcagatttagaggaaatattagacacagaagatcaagtggaaattgaaaaaacaaaaattgatgctgaaaatgacaaggaatggatgttgtacattcagaaacttcttgaaggacagagtcttactctgtctcccaggctgaagtgcaatggcgcaatcatggctcaccaaaacctccgcctgccagactcgagcagttctgcctcagcctcctgagtagctgggactacagcttccttttgcctcatatttactagaagcagtactggaaaaaataaatgaaaaaaagaaactagttgaaggatatttcacaattatgaaagatattagatgatattaaaatggagagctttattgcaaatgtgaaaactttttatgtggtgtgattggaatacatgcattgcaatcctgacacggtatctgctccaactatcaatagtcaggttcaataccaaaataagaagtctctgaaaataattaattgctgaacaagtgaaactaattaagtacatagccatttaaaaggaaatagtgtagcatctgatggtcgaatacaaatattgccacaaatcagtgcaaacttaaaaatgattttccttctagtgcattaaaagaaactgagcaggcttggtacacacaaattggcctgagcataagaagaaaaagtatcaactaaggatttaatgttttacgtttcatgaagaaactagactttttacataaaactgctatagatggccataagtggtccagggagcaacagatttgtagtatgagcaaatataaaatgaagcatcataacttgagcatttattgaaataaattgtgtggtccaattgaatctgttctcattgatgtgctggtttatgtaggagatactgtgtatttctacaactctttggcaaaaacaaaaacattttcttcttctctctcttaacttcacaatactatacgttgtgtagtcatataaatttgcagggaaccacaaacccaatgtataaaattaggctctatttaacagaactactactgtggtcagctaattaaagttacattcttaaccatgatgtcatccttatttagattcctgaacattcccacctcatttcacctcttcaccgtgttcctgccataccctttttggttcctctaattcaccatactggtgcctgcctcccacatttgcccttggtcttctctctttctagaatactctgcactcaactttcctcatggctggctccttgtcatcattcagctccaccttccccggtccctcagagacacattctctgaccagcttactattttatttcctcatagcacaaaattatctatctgttcatgtatttgttttcttgtttattttcttcttttccctctttagtatgtaggtcccatgagattaaggcaagggttggcagattatagcctgcagggcgaatctggcctgccacctgttttgtatggcccacaagctaagaatggtttttgccttattaaatggtttttaaaaaatcaaaaggagaataatattttgtagcatgtgaaaattatataaaattcaaattttggtgtctgttaataaagttttattggaacacagtg

SEQ ID NO: 407318 - DNA, 5551 bp, Homo sapiens
  misc_feature (2140)..(2140): n is a, c, g, or t
  misc_feature (2747)..(2747): n is a, c, g, or t
ggggaaagggaggtggagtttccaacagggaacttgacccgttagcagccgcagccatggcggcgcgttcgcctccctcaccgcacccttcgcccccagcgcgacagctgggccccaggtccccacgtgttgggcggggagctgaagtacacgcaatgcgcagcgaggcctcgggttttgccggcgcagcgcgggaggtggtcgcggacgaaagtgataaaatctgggtgggtgaagaagggtcagggggccggcgagggcctgggggggcagctccggctcatgctcccctcctcagcgcgcccatggggtccagacggctagagggcatctcggtagaggaggcgatggtgacccggacgcagctgctggaggaagagctgagcagcctaaaggaggagttggccctgtgtcaggctgataaagaatttgtatggtctttgtggaaacgtctccaggttacaaacccagatctcacacaagtggtcagtttggttgtggaaagagaaaaacagaaatctgaagctaaagacagaaaagttctagaaattctgcaagtcaaggatgccaaaatacaagaatttgaacagagagagtcagtactgaaacaggaaataaatgaccttgtaaaacggaaaattgcagtagatgaagaaaatgctttcttaaggaaagaattcagtgacttggagaagaaatttaaagataaaagtcaagaaattaaggacactaaggagtgtgtacagaacaaagaagagcaaaacagactagttataaaaaatctggaggaggaaaacaagaaattaagtacccgctgcactgacctgctaaatgacctggagaaattgaggaagcaggaagcacatttgagaaaagaaaaatatagcactgatgcaaaaataaagacctttgaagacaatttaattgaagcaaggaaagaagttgaagtatcacagagtaaatacaatgctctatcattacagttgagtaataaacagactgaacttatccagaaggatatggatattaccctggtcaggaaggaactgcaggagctgcagaatctttacaaacagaacagtacacatacagcccagcaagcagagctgatccagcagcttcaggttctcaatatggacacacaaaaagtactgagaaatcaggaagatgttcacacagctgaaagtatatcatatcaaaaactttacaatgagttacatatttgttttgaaaccacaaaatcaaatgaagctatgctccggcaaagtgttactaatcttcaggatcagctattacaaaaagagcaagaaaatgctaagttaaaagaaaaacttcaggaatcacagggagcacctcttcctttacctcaagaaagtgatccagactactcagcacaggtacctcatcgcccatccttatcaagcttagaaacgttaatggtttcacagaagtctgaaattgagtatttacaggagaaactaaagatagcaaatgaaaaactgtcagaaaacatatctgccaacaagggtttctcccgaaagagcatcatgacaagtgctgaaggaaaacataaggaaccacctgtgaaacgttcaaggtctttgtccccaaagagctctttcacagactcagaagagctacagaagctgagaaaagctgaaagaaagattgaaaacttagagaaggcactacaactaaagagccaagaaaatgatgagctaagagatgcccatgaaaaacgcaaggaacggctacagatgttacagaccaactacagagcagtaaaagagcaattaaaacagtgggaagaaggcagtggcatgactgaaatcaggaaaataaagagagcagatccccaacaacttcgacaagaagattctgatgctgtgtggaatgaactggcatatttcaaaagggaaaaccaggagctaatgattcaaaagatgaatcttgaagaagaattagatgaacttaaagtacatatatctattgataaggcagcaatacaagaattgaatagatgtgtggcagagagaagagaagaacagctctttagatctggtgaagatgatgaggtcaagaggagtactccagagaagaatggaaaagaaatgttggagcagacattacagaaggtcantgagttggaaaatcggctgaaatcttttgagaaaaggtcgagaaaattaaaagaagggaataaaaaattaatgaaagaaaatgattttctgaaatccctcttaaaacagcaacaagaagatacagagaccagagaaaaagagctagaacagataataaaggggagtaaagatgtagaaaaagaaaatactgaacttcaagtaaaaatcagtgagctggagacagaagtcacttccctgaggagacaagtggcagaagctaatgcattgagaaatgaaaatgaagagctgatcaacccaatggagaaatcacaccagtcagcagacagagctaaatccgagatggccaccatgaaagtgagatctggacgatatgattgtaagacaactatgaccaaggttaaatttaaagctgcgaagaaaaattgctctgtgggtcgtcaccacactgttctcaatcattccatcaaggttatgagcaatgtgtttgagaacctcagcaaggacggctgggaggatgtgagtgaaagcagcagtgattctgaagcacagacctctcaaactttgggaacaattattgtagaaacatcccagaaaataagtcctacngaagatggaaaagaccagaaagaaagtgatccaacagaagacagccaaacacaaggaaaagaaatagtacagacatatttaaatatagatggcaagaccccaaaggactattttcatgataagaatgccaaaaaaccaacttttcaaaagaagaattgcaagatgcaaaagagttcacatacagcagttcctactagagtcaacagagaaaagtacaaaaatataactgcccagaaatcaagtagcaatattattttattacgagaacggattatatccttgcaacaacaaaacagtgtacttcagaatgccaagaaaacagcagaattgtctgttaaagaatataaagaagttaatgaaaagctcctccatcaacagcaagtatccgatcaacgatttcagacaagcaggcagacaataaagaagctaaatttggatttggctgggcttcggaaagaaaaagaagatttactaaagaaattggagtcctcatctgaaatcacaagtttggcagaagaaaattcccaggtaacatttccacggatacaagttacatcacttagtccttcaaggagcatggatttggaaatgaagcaattgcagtataaactaaagaatgctactaatgaactcactaaacagtcatcaaatgtgaagactttgaaatttgaactcctagcaaaagaagaacacataaaggaaatgcatgaaaagatatctcgaatggagagggatataactatgaaaagacatttgatagaggacttgaaatttcgacagaaagtaaatttggaaagtaacaagagttttagtgaaatgttacaaaatcttgataaaaaggtaaagacattaactgaagaatgttccaacaagaaggtatcaattgattcactaaagcaaagacttaacgttgctgtaaaagaaaagtcacagtatgaacagatgtatcagaaatctaaagaggagttagaaaaaaaggatctcaagcttactctcctagtatcaagaataagtgagactgaatctgcaatggcagaaattgaaacagcagcatctaagcagcttcaagaattagcattgcaaagtgaacaggtcctagaaggtgcacagaagacattgctgttagccaatgaaaaagtagaagagttcaccacatttgtgaaggctttggccaaagagttgcaaaatgatgtccatgtggtaaggcgacaaataagagagcttaaaaaaatgaagaaaaacagggacgcctgtaaaacctcaacccataaagcccagaccttggcagcttctatcctgaacatttcacggtcagatttagaggaaatattagacacagaagatcaagtggaaattgaaaaaacaaaaattgatgctgaaaatgacaaggaatggatgttgtacattcagaaacttcttgaaggacagcttccttttgcctcatatttactagaagcagtactggaaaaaataaatgaaaaaaagaaactagttgaaggatatttcacaattatgaaagatattagatgatattaaaatggagagctttattgcaaatgtgaaaactttttatgtggtgtgattggaatacatgcattgcaatcctgacacggtatctgctccaactatcaatagtcaggttcaataccaaaataagaagtctctgaaaataattaattgctgaacaagtgaaactaattaagtacatagccatttaaaaggaaatagtgtagcatctgatggtcgaatacaaatattgccacaaatcagtgcaaacttaaaaatgattttccttctagtgcattaaaagaaactgagcaggcttggtacacacaaattggcctgagcataagaagaaaaagtatcaactaaggatttaatgttttacgtttcatgaagaaactagactttttacataaaactgctatagatggccataagtggtccagggagcaacagatttgtagtatgagcaaatataaaatgaagcatcataacttgagcatttattgaaataaattgtgtggtccaattgaatctgttctcattgatgtgctggtttatgtaggagatactgtgtatttctacaactctttggcaaaaacaaaaacattttcttcttctctctcttaacttcacaatactatacgttgtgtagtcatataaatttgcagggaaccacaaacccaatgtataaaattaggctctatttaacagaactactactgtggtcagctaattaaagttacattcttaaccatgatgtcatccttatttagattcctgaacattcccacctcatttcacctcttcaccgtgttcctgccataccctttttggttcctctaattcaccatactggtgcctgcctcccacatttgcccttggtcttctctctttctagaatactctgcactcaactttcctcatggctggctccttgtcatcattcagctccaccttccccggtccctcagagacacattctctgaccagcttactattttatttcctcatagcacaaaattatctatctgttcatgtatttgttttcttgtttattttcttcttttccctctttagtatgtaggtcccatgagattaaggcaagggttggcagattatagcctgcagggcgaatctggcctgccacctgttttgtatggcccacaagctaagaatggtttttgccttattaaatggtttttaaaaaatcaaaaggagaataatattttgtagcatgtgaaaattatataaaattcaaattttggtgtctgttaataaagttttattggaacacagtg

SEQ ID NO: 407319 - DNA, 2470 bp, Homo sapiens
ggggaaagggaggtggagtttccaacagggaacttgacccgttagcagccgcagccatggcggcgcgttcgcctccctcaccgcacccttcgcccccagcgcgacagctgggccccaggtccccacgtgttgggcggggagctgaagtacacgcaatgcgcagcgaggcctcgggttttgccggcgcagcgcgggaggtggtcgcggacgaaagtgataaaatctgggtgggtgaagaagggtcagggggccggcgagggcctgggggggcagctccggctcatgctcccctcctcagcgcgcccatggggtccagacggctagagggcatctcggtagaggaggcgatggtgacccggacgcagctgctggaggaagagctgagcagcctaaaggaggagttggccctgtgtcaggctgataaagaatttgtatggtctttgtggaaacgtctccaggttacaaacccagatctcacacaagtggtcagtttggttgtggaaaggaggccaccggaagatgtgtaccaccaaaacgaagaatataccaaaaaagataaaaagttgggattgagaaaatgtgagatccaacacatgaataatataaagatattccaaggtgaagatgaaagaagattgagaagacttggtagcagtagttctcaatgaagcaggactacagcagttctttaagaaggatgactctgaaaaaattagcagtgatagattgtaatgtttttgagaaagatatttcatactttttgagaattttagaaaggattagtgataagtaaacagaaaactgcacaaataaaagtgacataatttttgttttttaaaaaaggtaaaagagctttattaacatttctctccattacattaattaacacaactactaaatcatcacttacttgcaggattccaaatgtgatgccatattgattgtaaggggtatgtgtaagtttcttgagagttcctactctagatgagttcactttaaaaaaattcttttcaatatcctgttctttctcatctctcagttttgcctcttatctttcacatgaggaatgagaaaagctgtctatactgattttcttttgagatccacacacaattcaaggaccaaaaggtcagcataaatttatgcttctcttagcaagcatgtgtttaatgtcagaaggaagggaaggtgcataggctgttaaggcctgatagaacctaaaaggcagaatataccaaaggtatttgtaggggcactagaatgcaagcaagacattttctgctctgatgttaacagttgtcagtaagtgaaaaattctacaatgaggtatagcatgtgtatcttcacggtgagattaatgcagtcagctaaacagtgaggttgttaataacagagtgatgcaatttttaactgttcagaaaaaacaaaaagttatatatgaaaggaagtgtcatcatagtacaccgtgttgcttagctgtgaaccatacataataagtattatgttaaaaaactagactaaaaatcaggatttacacctgccatgtaaacactggtcagacggcacagcccccagaagtgctggggtagtgtaccctgaggaaaactcacagagaggggctccctgggcaagtgtgtaggtactccattgtcctcttccttctggggcagtataaagcagtctgacaagattacacatgtcagactctgggaaaattaccccgtcacttctggtatgatgagagactgggagacacattataaaatgtatataatagtttttgctattcaaatatgtttatttcctgagtgtgactagtaaaaagttagataataaggcatgttgagttattggaatcctcttttgattctatgtgttggttagcagatagcaaatattataatagcaagggatactagccctctcaaacacacaaaagaaaatctgtctaaatgtgtttagatccaagcgctatcaatgttgggaggaaatgggtaagaaggaaaaagattatgttcctgtctttcttgatgttagttagcaaagaaagtaaaaaaagaaaaaagttatatccccaaatttaagaaataagtaatatatgacctaatgaatacatttatggatggtacttgggactgcttttttggtggtggtggttgttttttggttatgtcttaataactgtgtttaagttgaaaaaataacatgtaacttggatgatattaagaattaaataaaaatatgtgactgttcatgctgattctgtatgtgatcttcgattaatttgacagttgcatataagttagcataggctgttaaggcctgatagaacctaaaaggcagaatataccaaaggtatttgtaggggcactagaatgcaagcaagacattttctgctctgatgttaacagttgtcagtaagtgaaaaattctacaatgaggtatagcatgtgtatcttcacggtgagat

SEQ ID NO: 407320 - DNA, 367 bp, Homo sapiens
agaaggcaggagcctctacagcagctgccttcacatctaggtattggcacatgactgcgttttgtgaggggctcctgtatgtcaggtcctgtgtttgataggaactctagctatgtcctgatagaggtgataggaaatgttgtttgttttaaagttttctccgttattataatattatatagtgaatttggaaaatgtggaaaggtagaaggaagaatttcatcaacctcaagtttctatatttgctgtttctatagcaatttgatgtatttatttccagaccttgttactctttttttttttttttaaagacggagtctctctattgcccaggatggagtgcaatggtgcaatctcggctcactgc

SEQ ID NO: 407321 - DNA, 723 bp, Homo sapiens
gataatggatttttatagtttataatgtattttttaaataggtgccccttaccagattgaggaagttcccttcaatttctagtttgctgagagctttttatcatgaatggatgttggattttgtcatatgctatttttacatctatgaagatgattgctatggtttgaatgtttgttgcctccaaaactcatgttgaaaattaattcctaatggcaatattgagaggtggggtttttaagaggtgactgggtcatgagggctctgctctcatgaatggatgaacctattcatggattggtgagttaatcgattaatgggttatcacaggattgggactgatgactttataagaagaagagaggcctcaactagcacatttgcatgttcagcccacttgccatttgatgccctgcaaagcctcggaattcagcagagtccccaccagcaagaaggccctcaatagacacagccctttgaggctggacttctcaacctccaaaacggtaagaaataaattccttttccttgtaaattactgaatttcaaggtattctgttataaacaacagaaagtgaactaagacaatgatcatacggtctttcattttttctgttaatatggtgaattaacaggtagaaagaaatcctaatcatcatttttgtatatcattatatttgatttgttaatattttattaaaatttttgtatctatgtatggaaaa

SEQ ID NO: 407322 - DNA, 466 bp, Homo sapiens
gaagttgcacaaaatgtacagaaaagtcctgtgtagacttcacccagcccctcccagtgttaacatcttaggattgggactgatgactttataagaagaagagaggcctcaactagcacatttgcatgttcagcccacttgccatttgatgccctgcaaagcctcggaattcagcagagtccccaccagcaagaaggccctcaatagacacagccctttgaggctggacttctcaacctccaaaacggtaagaaataaattccttttccttgtaaattactgaatttcaaggtattctgttataaacaacagaaagtgaactaagacaatgatcatacggtctttcattttttctgttaatatggtgaattaacaggtagaaagaaatcctaatcatcatttttgtatatcattatatttgatttgttaatattttattaaaatttttgtatctatgtatggaaaa

SEQ ID NO: 407323 - DNA, 891 bp, Homo sapiens
acacacacacacatatatgtagtaggacggacagatattaaaagagggattacagacacagtgtacattttagaagtgtaaaacaaggggatttccccagcttggtttcttcccagttcatcctcactttgtgttcctttcctggcttttcagcatggtcatttagccctgctttagcttggtgtcatcgcaaacttagtgggcctgcccccctgtcatgtggaatatgaaaaggggaatatggtatagtgtaaagaacactggactaggaattggaagatggggtgggtcaaatgtgataatatgggtacaataactgaatattatgaagtgctacacagacataccacattcaggcgacttacttaattggaatttgaagctggtctctggcttccattcaagaagcaaaactgtctttgaggagaagttggcatttttctggtgagttacctgcccttttccaaggattttttttgagctgggagaatagcctgtggtactaaagaactttgccaggcattatggaatttttccctgtctgccaggccagagttcctgctctgtgtccagaaggatgtttttctattggtctgttccataacaggatccacagctgagttatacttggcaaaatcaaatgcagatgtgagggctgtgtggtatcacctttttagctttatctctgggcagctcaaaggactgaggctggttgctctcacccatcgctgtttgacataacctcctgattctattattgtcacagcattaacctccacagtaaaacgatctgcagacaacctttgggaataaaataagttaattacttcaggatcatgagtaccaaaactttcaggcagttccccgaaagagctggtacattttatttaa

SEQ ID NO: 407324 - DNA, 567 bp, Homo sapiens
tatgaagtgctacacagacataccacattcaggcgacttacttaattggaatttgaagctggtctctggcttccattcaagaagcaaaactgtctttgaggagaagttggcatttttctggtgagttacctgcccttttccaaggattttttttgagctgggagaatagcctgtggtactaaagaactttgccaggcattatggaatttttccctgtctgccaggccagagttcctgctctgtgtccagaaggatgtttttctattggtctgttccataacaggatccacagctgagttatacttggcaaaatcaaatgcagatgtgagggctgtgtggtatcacctttttagctttatctctgggcagctcaaaggactgaggctggttgctctcacccatcgctgtttgacataacctcctgattctattattgtcacagcattaacctccacagtaaaacgatctgcagacaacctttgggaataaaataagttaattacttcaggatcatgagtaccaaaactttcaggcagttccccgaaagagctggtacattttatttaa

SEQ ID NO: 407325 - DNA, 499 bp, Homo sapiens
atacatacatacacacacacacacacacacacacacatatatgtagtaggacggacagatattaaaagagggattacagacacagtgtacattttagaagtgtaaaacaaggggatttccccagcttggtttcttcccagttcatcctcactttgtgttcctttcctggcttttcagcatggtcatttagccctgctttagcttggtgtcatcgcaaacttagtgggcctgcccccctgtcatgtggaatatgaaaaggggaatatggtatagtgtaaagaacactggactaggaattggaagatggggtgggtcaaatgtgataatatgggtacaataactgaatattatgaagtgctacacagacataccacattcaggcgacttacttaattggaatttgaagctggtctctggcttccattcaagaagcaaaactgtctttgaggagaagttggcatttttctggtgagttacctgcccttttccaaggattttt

SEQ ID NO: 407326 - DNA, 2610 bp, Homo sapiens
ggcccatgcaagtccaaaattcagcagggcagtcaaattttaaacctccaaaatgatcacctttgactccacgtctcacaatcatctctctcaagttcgaagttccacaaatctctaaggcaagggaaagatgctgccagtctctttgctaaaacacagcaagagtcacctttactccagttcccaaaaagtttttcatctccatctgagaccacctcagcctgaattttattgtcaatattgctatcagcattttgggcaaagccattcagcaagtatctaggaagttccaaactttcccacattttcctgtcttcttctgagcccttcaaactgttccaacctctgcctgttacccagttccaaacttgctttcatatttttggctatcttttcagcaatgccccactctactgttagcagtttactgtattagtctgttttcacactgctgataaagacattcctcaagattgtgaagaaaaagaggtttaattggacttacagttccacatggccggggaggcctcagaatcatggcgggaggtgaaaagcacttcgtacatggtggtggcaagagaaaatgaagaagaagcaaaagtggaaacccctgataaacccatcagatctcatgagacttactatcatgagaatagcacaggaaagactggcccccctgattcgatgacctccccctgggtccctcccacaacatgtgggaattccagaagataaattcaagttgcaatttcagtggggacatagccaaaccaggcgccaggtagctcctgcccttagcccaggaggccatccctgcggcggggccacgggcatcggaaaagccatcgtgaaggagctcctggagctggggagtaatgtggtcattgcatcccgtaagttggagagattgaagtctgcggcagatgaactgcaggccaacctacctcccacaaagcaggcacgagtcattcccatacaatgcaacatccggaatgaggaggaggtgaataatttggtcaaatctaccttagatacttttggtaagatcaatttcttggtgaacaatggaggaggccagtttctttcccctgctgaacacatcagttctaagggatggcacgctgtgcttgagaccaacctgacgggtaccttctacatgtgcaaagcagttgaccagctaatctggcttctgtgtctttttgaaatggctcagacctgtttctccaagaagacctagttccctttagtagtttacagctcctggatgaaagagcatggaggatctatcgtcaatatcattgtccctactaaagctggatttccattagctgtgcattctggagctgcaagagcaggtgtttacaacctcaccaaatctttagctttggaatgggcctgcagtggaatacggatcaattgtgttgcccctggagttatttattcccagactgctgtggagaactatggttcctggggacaaagcttctttgaagggtcttttcagaaaatccccgctaaacgaattggtgttcctgaggaggtctcctctgtggtctgcttcctactgtctcctgcagcttccttcatcactggacagtcggtggatgtggatgggggccggagtctctatactcactcgtatgaggtaccagatcatgacaactggcccaagggagcaggggacctttctgttgtcaaaaagatgaaggagacctttaaggagaaagctaagctctgagctgaggaaacaaggtgtcctccatcccccagtgccttcacatcttgaggatatgcttctgtactttttaaaagcttatagttggtatggaaaacatttttcttatttttaagtgttattaattatatctatggaaaaactattcctgaaatatatacagtcttatgtcccaatcagagtcttttaacctatgatttaaaaatgtataagtaacagaaattaacatattttaatgactttactttttatttctaagaaaagtatttgaaaaatggaataattttaaatcaatgataattctagggatcatgaactcccagaagattttattatttaattgtaaaggtagaggccagacgcagtggctcacgcctgtaattccagcactttgggaggccgaggtaggcgggtcagttgaggtcaggagttcaagaccaggctggccaacatggtaaaaccctgtctctactgaaaaacaacaaaaacaaaaacacaaattagtcgggtgtggtggcacacacctgtagtcccaggtacttgggaggctgaggcaggaggatcgcttgaacccaggaagcagaggttgcagtgagctgagatcatgctactgcagtccagcctgggctacagagtgagactgcatctcaaaaaaaacccaaaaaacaaaaacaaacaacaacaacaaaattataaaggtagaaaataaacctaaattgtgtcgtaattaagattattaaaattagaattatacaatgacttatttttggtggcaaatactttaggagcaataatgccttatggtaattattgatgtatagtttcttttgtttatgaagtcaaatttgtataaattctcttaattcaaaaaaaaa

SEQ ID NO: 407327 - DNA, 2531 bp, Homo sapiens
ctagtcgaggacggcgtgtaattcggccgagggtctgcggcgattgagtggtgggctagctcgccgcttcggctctggctgctgttgttcctcctgccctcagcgcagggcgccagaaggagtcaggttcaaaatggaaagtatttattgaccaaattaacaggtctttggagaattacgaaccatgttcaagtcaaaactgcagctgctaccatggtgtcatagaagaggatctaactcctttccgaggaggcatctccaggaagatgatggcagaggtagtcagacggaagctagggacccactatcagatcactaagaacagactgtaccgggaaaatgactgcatgttcccctcaaggtgtagtggtgttgagcactttattttggaagtgatcgggcgtctccctgacatggagatggtgatcaatgtacgagattatcctcaggttcctaaatggatggagcctgccatcccagtcttctccttcaggtaagacatcagagtaccatgatatcatgtatcctgcttggacatttgggaagggggacctgctgtttggccaatttatcctacaggtcttggacggtgggacctcttcagagaagatctggtaaggtcagcagcacagtggccatgggaaaaagaaaaactcagcagcacagtggccatggaaatatgctgtaggaatgtccctgagacccagaagggcctgcgctcagctgctctggcaccccgctgcagggatggcctcctgggctaagggcaggagctacctggcgcctggtttgctgcagggccaagtggccatcgtcaccggcggggccacgggcatcggaaaagccatcgtgaaggagctcctggagctggggagtaatgtggtcattgcatcccgtaagttggagagattgaagtctgcggcagatgaactgcaggccaacctacctcccacaaagcaggcacgagtcattcccatacaatgcaacatccggaatgaggaggaggtgaataatttggtcaaatctaccttagatacttttggtaagatcaatttcttggtgaacaatggaggaggccagtttctttcccctgctgaacacatcagttctaagggatggcacgctgtgcttgagaccaacctgacgggtaccttctacatgtgcaaagcagtttacagctcctggatgaaagagcatggaggatctatcgtcaatatcattgtccctactaaagctggatttccattagctgtgcattctggagctgcaagagcaggtgtttacaacctcaccaaatctttagctttggaatgggcctgcagtggaatacggatcaattgtgttgcccctggagttatttattcccagactgctgtggagaactatggttcctggggacaaagcttctttgaagggtcttttcagaaaatccccgctaaacgaattggtgttcctgaggaggtctcctctgtggtctgcttcctactgtctcctgcagcttccttcatcactggacagtcggtggatgtggatgggggccggagtctctatactcactcgtatgaggtaccagatcatgacaactggcccaagggagcaggggacctttctgttgtcaaaaagatgaaggagacctttaaggagaaagctaagctctgagctgaggaaacaaggtgtcctccatcccccagtgccttcacatcttgaggatatgcttctgtactttttaaaagcttatagttggtatggaaaacatttttcttatttttaagtgttattaattatatctatggaaaaactattcctgaaatatatacagtcttatgtcccaatcagagtcttttaacctatgatttaaaaatgtataagtaacagaaattaacatattttaatgactttactttttatttctaagaaaagtatttgaaaaatggaataattttaaatcaatgataattctagggatcatgaactcccagaagattttattatttaattgtaaaggtagaggccagacgcagtggctcacgcctgtaattccagcactttgggaggccgaggtaggcgggtcagttgaggtcaggagttcaagaccaggctggccaacatggtaaaaccctgtctctactgaaaaacaacaaaaacaaaaacacaaattagtcgggtgtggtggcacacacctgtagtcccaggtacttgggaggctgaggcaggaggatcgcttgaacccaggaagcagaggttgcagtgagctgagatcatgctactgcagtccagcctgggctacagagtgagactgcatctcaaaaaaaacccaaaaaacaaaaacaaacaacaacaacaaaattataaaggtagaaaataaacctaaattgtgtcgtaattaagattattaaaattagaattatacaatgacttatttttggtggcaaatactttaggagcaataatgccttatggtaattattgatgtatagtttcttttgtttatgaagtcaaatttgtataaattctcttaattcaaaaaaaaa

SEQ ID NO: 407328 - DNA, 1830 bp, Homo sapiens
ctagtcgaggacggcgtgtaattcggccgagggtctgcggcgattgagtggtgggctagctcgccgcttcggctctggctgctgttgttcctcctgccctcagcgcagggcgccagaaggagtcaggttcaaaatggaaagtatttattgaccaaattaacaggtctttggagaattacgaaccatgttcaagtcaaaactgcagctgctaccatggtgtcatagaagaggatctaactcctttccgaggaggcatctccaggaagatgatggcagaggtagtcagacggaagctagggacccactatcagatcactaagaacagactgtaccgggaaaatgactgcatgttcccctcaaggtgtagtggtgttgagcactttattttggaagtgatcgggcgtctccctgacatggagatggtgatcaatgtacgagattatcctcaggttcctaaatggatggagcctgccatcccagtcttctccttcaggtaagacatcagagtaccatgatatcatgtatcctgcttggacatttgggaagggggacctgctgtttggccaatttatcctacaggtcttggacggtgggacctcttcagagaagatctggtaaggtcagcagcacagtggccatgggaaaaagaaaaactcagcagcacagtggccatggaaatatgctgtaggaatgtccctgagacccagaagggcctgcgctcagctgctctggcaccccgctgcagggatggcctcctgggctaagggcaggagctacctggcgcctggtttgctgcagggccaagtggccatcgtcaccggcggggccacgggcatcggaaaagccatcgtgaaggagctcctggagctggggagtaatgtggtcattgcatcccgtaagttggagagattgaagtctgcggcagatgaactgcaggccaacctacctcccacaaagcaggcacgagtcattcccatacaatgcaacatccggaatgaggaggaggtgaataatttggtcaaatctaccttagatacttttggtaagatcaatttcttggtgaacaatggaggaggccagtttctttcccctgctgaacacatcagttctaagggatggcacgctgtgcttgagaccaacctgacgggtaccttctacatgtgcaaagcagtttacagctcctggatgaaagagcatggaggatctatcgtcaatatcattgtccctactaaagctggatttccattagctgtgcattctggagctgcaagagcaggtgtttacaacctcaccaaatctttagctttggaatgggcctgcagtggaatacggatcaattgtgttgcccctggagttatttattcccagactgctgtggagaactatggttcctggggacaaagcttctttgaagggtcttttcagaaaatccccgctaaacgaattggtgttcctgaggaggtctcctctgtggtctgcttcctactgtctcctgcagcttccttcatcactggacagtcggtggatgtggatgggggccggagtctctatactcactcgtatgaggtaccagatcatgacaactggcccaagggagcaggggacctttctgttgtcaaaaagatgaaggagacctttaaggagaaagctaagctctgagctgaggaaacaaggtgtcctccatcccccagtgccttcacatcttgaggatatgcttctgtactttttaaaagcttatagttggtatggaaaacatttttcttatttttaagtgttattaattatatctatggaaaaactattcctgaaatatatacagtcttatgtccc

SEQ ID NO: 407329 - DNA, 2552 bp, Homo sapiens
ctagtcgaggacggcgtgtaattcggccgagggtctgcggcgattgagtggtgggctagctcgccgcttcggctctggctgctgttgttcctcctgccctcagcgcagggcgccagaaggagtcaggttcaaaatggaaagtatttattgaccaaattaacaggtctttggagaattacgaaccatgttcaagtcaaaactgcagctgctaccatggtgtcatagaagaggatctaactcctttccgaggaggcatctccaggaagatgatggcagaggtagtcagacggaagctagggacccactatcagatcactaagaacagactgtaccgggaaaatgactgcatgttcccctcaaggtgtagtggtgttgagcactttattttggaagtgatcgggcgtctccctgacatggagatggtgatcaatgtacgagattatcctcaggttcctaaatggatggagcctgccatcccagtcttctccttcaggtaagacatcagagtaccatgatatcatgtatcctgcttggacatttgggaagggggacctgctgtttggccaatttatcctacaggtcttggacggtgggacctcttcagagaagatctggtaaggtcagcagcacagtggccatgggaaaaagaaaaactcagcagcacagtggccatggaaatatgctgtaggaatgtccctgagacccagaagggcctgcgctcagctgctctggcaccccgctgcagggatggcctcctgggctaagggcaggagctacctggcgcctggtttgctgcagggccaagtggccatcgtcaccggcggggccacgggcatcggaaaagccatcgtgaaggagctcctggagctggggagtaatgtggtcattgcatcccgtaagttggagagattgaagtctgcggcagatgaactgcaggccaacctacctcccacaaagcaggcacgagtcattcccatacaatgcaacatccggaatgaggaggaggtgaataatttggtcaaatctaccttagatacttttggtaagatcaatttcttggtgaacaatggaggaggccagtttctttcccctgctgaacacatcagttctaagggatggcacgctgtgcttgagaccaacctgacgggtaccttctacatgtgcaaagcagtttacagctcctggatgaaagagcatggaggatctatcgtcaatatcattgtccctactaaagctggatttccattagctgtgcattctggagctgcaagagcaggtgtttacaacctcaccaaatctttagctttggaatgggcctgcagtggaatacggatcaattgtgttgcccctggagttatttattcccagactgctgtggagaactatggttcctggggacaaagcttctttgaagggtcttttcagaaaatccccgctaaacgaattggtgttcctgaggaggtctcctctgtggtctgcttcctactgtctcctgcagcttccttcatcactggacagtcggtggatgtggatgggggccggagtctctatactcactcgtatgaggtaccagatcatgacaactggcccaagggagcaggggacctttctgttgtcaaaaagatgaaggagacctttaaggagaaagctaagctctgagctgaggaaacaaggtgtcctccatcccccagtgccttcacatcttgaggatatgcttctgtactttttaaaagcttatagttggtatggaaaacatttttcttatttttaagtgttattaattatatctatggaaaaactattcctgaaatatatacagtcttatgtcccaatcagagtcttttaacctatgatttaaaaatgtataagtaacagaaattaacatattttaatgactttactttttatttctaagaaaagtatttgaaaaatggaataattttaaatcaatgataattctagggatcatgaactcccagaagattttattatttaattgtaaaggtagaggccagacgcagtggctcacgcctgtaattccagcactttgggaggccgaggtaggcgggtcagttgaggtcaggagttcaagaccaggctggccaacatggtaaaaccctgtctctactgaaaaacaacaaaaacaaaaacacaaattagtcgggtgtggtggcacacacctgtagtcccaggtacttgggaggctgaggcaggaggatcgcttgaacccaggaagcagaggttgcagtgagctgagatcatgctactgcagtccagcctgggctacagagtgagactgcatctcaaaaaaaacccaaaaaacaaaaacaaacaacaacaacaaaattataaaggtagaaaataaacctaaattgtgtcgtaattaagattattaaaattagaattatacaatgacttatttttggtggcaaatactttaggagcaataatgccttatggtaattattgatgtatagtttcttttgtttatgaagtcaaatttgtataaattctcttaattcaaaaaaaaaaaagtcgacgcggccgcgaat

SEQ ID NO: 407330 - DNA, 1518 bp, Homo sapiens
cactctagctgttcttaactctccagtgagagagtgcctctcaagtcatgccagcaaaaacaatattaatggtgccagcaggtcccagagaggatactcattaactgaccctgcctggttatgtgttcagtcattaaccaaaaactgtagaaatgaggttgctctgctatgcatggtcagcctgaggaatgaggaactgtggtcatcatcgctcagacatggactgagaacaggcaagaggcattctggagctgcaagagcaggtgtttacaacctcaccaaatctttagctttggaatgggcctgcagtggaatacggatcaattgtgttgcccctggagttatttattcccagactgctgtggagaactatggttcctggggacaaagcttctttgaagggtcttttcagaaaatccccgctaaacgaattggtgttcctgaggaggtctcctctgtggtctgcttcctactgtctcctgcagcttccttcatcactggacagtcggtggatgtggatgggggccggagtctctatactcactcgtatgaggtaccagatcatgacaactggcccaagggagcaggggacctttctgttgtcaaaaagatgaaggagacctttaaggagaaagctaagctctgagctgaggaaacaaggtgtcctccatcccccagtgccttcacatcttgaggatatgcttctgtactttttaaaagcttatagttggtatggaaaacatttttcttatttttaagtgttattaattatatctatggaaaaactattcctgaaatatatacagtcttatgtcccaatcagagtcttttaacctatgatttaaaaatgtataagtaacagaaattaacatattttaatgactttactttttatttctaagaaaagtatttgaaaaatggaataattttaaatcaatgataattctagggatcatgaactcccagaagattttattatttaattgtaaaggtagaggccagacgcagtggctcacgcctgtaattccagcactttgggaggccgaggtaggcgggtcagttgaggtcaggagttcaagaccaggctggccaacatggtaaaaccctgtctctactgaaaaacaacaaaaacaaaaacacaaattagtcgggtgtggtggcacacacctgtagtcccaggtacttgggaggctgaggcaggaggatcgcttgaacccaggaagcagaggttgcagtgagctgagatcatgctactgcagtccagcctgggctacagagtgagactgcatctcaaaaaaaacccaaaaaacaaaaacaaacaacaacaacaaaattataaaggtagaaaataaacctaaattgtgtcgtaattaagattattaaaattagaattatacaatgacttatttttggtggcaaatactttaggagcaataatgccttatggtaattattgatgtatagtttcttttgtttatgaagtcaaatttgtataaattctcttaattcaaaaaaaaa

SEQ ID NO: 407331 - DNA, 1424 bp, Homo sapiens
ctagtcgaggacggcgtgtaattcggccgagggtctgcggcgattgagtggtgggctagctcgccgcttcggctctggctgctgttgttcctcctgccctcagcgcagggcgccagaaggagtcaggttcaaaatggaaagtatttattgaccaaattaacaggtctttggagaattacgaaccatgttcaagtcaaaactgcagctgctaccatggtgtcatagaagaggatctaactcctttccgaggaggcatctccaggaagatgatggcagaggtagtcagacggaagctagggacccactatcagatcactaagaacagactgtaccgggaaaatgactgcatgttcccctcaaggtgtagtggtgttgagcactttattttggaagtgatcgggcgtctccctgacatggagatggtgatcaatgtacgagattatcctcaggttcctaaatggatggagcctgccatcccagtcttctccttcaggtaagacatcagagtaccatgatatcatgtatcctgcttggacatttgggaagggggacctgctgtttggccaatttatcctacaggtcttggacggtgggacctcttcagagaagatctggtaaggtcagcagcacagtggccatgggaaaaagaaaaactcagcagcacagtggccatggaaatatgctgtaggaatgtccctgagacccagaagggcctgcgctcagctgctctggcaccccgctgcagggatggcctcctgggctaagggcaggagctacctggcgcctggtttgctgcagggccaagtggccatcgtcaccggcggggccacgggcatcggaaaagccatcgtgaaggagctcctggagctggggagtaatgtggtcattgcatcccgtaagttggagagattgaagtctgcggcagatgaactgcaggccaacctacctcccacaaagcaggcacgagtcattcccatacaatgcaacatccggaatgaggaggaggtgaataatttggtcaaatctaccttagatacttttggtaagatcaatttcttggtgaacaatggaggaggccagtttctttcccctgctgaacacatcagttctaagggatggcacgctgtgcttgagaccaacctgacgggtaccttctacatgtgcaaagcaggcaaatcagcaatgtcttaccaatccaagataccttgctaacaactgtcaattaaaagtctacagaattgaaattcagccatgatttttattagccaaaactgaattaaagaatacaaggctggccgggcatggtggctcatgcctgtaatcccagcactttgggaggccgaggcgggcggattacctgagctcaggagtttgagaccagcctgggcaacacggtgaaaccccgtctctactaagatacaaaa

SEQ ID NO: 407332 - DNA, 1922 bp, Homo sapiens
  misc_feature (22)..(22): n is a, c, g, or t
  misc_feature (30)..(30): n is a, c, g, or t
  misc_feature (35)..(36): n is a, c, g, or t
  misc_feature (59)..(59): n is a, c, g, or t
aaaaaagccaaggccgttgggnttaacccnggganntcccggcgcacaaatttcccccngggggcaagttcttggacgagaatgtccctgagacccagaagggcctgcgctcagctgctctggcaccccgctgcagggatggcctcctgggctaagggcaggagctacctggcgcctggtttgctgcagggccaagtggccatcgtcaccggcggggccacgggcatcggaaaagccatcgtgaaggagctcctggagctggggagtaatgtggtcattgcatcccgtaagttggagagattgaagtctgcggcagatgaactgcaggccaacctacctcccacaaagcaggcacgagtcattcccatacaatgcaacatccggaatgaggaggaggtgaataatttggtcaaatctaccttagatacttttggtaagatcaatttcttggtgaacaatggaggaggccagtttctttcccctgctgaacacatcagttctaagggatggcacgctgtgcttgagaccaacctgacgggtaccttctacatgtgcaaagcagtttacagctcctggatgaaagagcatggaggatctatcgtcaatatcattgtccctactaaagctggatttccattagctgtgcattctggagctgcaagagcaggtgtttacaacctcaccaaatctttagctttggaatgggcctgcagtggaatacggatcaattgtgttgcccctggagttatttattcccagactgctgtggagaactatggttcctggggacaaagcttctttgaagggtcttttcagaaaatccccgctaaacgaattggtgttcctgaggaggtctcctctgtggtctgcttcctactgtctcctgcagcttccttcatcactggacagtcggtggatgtggatgggggccggagtctctatactcactcgtatgaggtaccagatcatgacaactggcccaagggagcaggggacctttctgttgtcaaaaagatgaaggagacctttaaggagaaagctaagctctgagctgaggaaacaaggtgtcctccatcccccagtgccttcacatcttgaggatatgcttctgtactttttaaaagcttatagttggtatggaaaacatttttcttatttttaagtgttattaattatatctatggaaaaactattcctgaaatatatacagtcttatgtcccaatcagagtcttttaacctatgatttaaaaatgtataagtaacagaaattaacatattttaatgactttactttttatttctaagaaaagtatttgaaaaatggaataattttaaatcaatgataattctagggatcatgaactcccagaagattttattatttaattgtaaaggtagaggccagacgcagtggctcacgcctgtaattccagcactttgggaggccgaggtaggcgggtcagttgaggtcaggagttcaagaccaggctggccaacatggtaaaaccctgtctctactgaaaaacaacaaaaacaaaaacacaaattagtcgggtgtggtggcacacacctgtagtcccaggtacttgggaggctgaggcaggaggatcgcttgaacccaggaagcagaggttgcagtgagctgagatcatgctactgcagtccagcctgggctacagagtgagactgcatctcaaaaaaaacccaaaaaacaaaaacaaacaacaacaacaaaattataaaggtagaaaataaacctaaattgtgtcgtaattaagattattaaaattagaattatacaatgacttatttttggtggcaaatactttaggagcaataatgccttatggtaattattgatgtatagtttcttttgtttatgaagtcaaatttgtataaattctcttaattcaaaaaaaaa

SEQ ID NO: 407333 - DNA, 1868 bp, Homo sapiens
  misc_feature (22)..(22): n is a, c, g, or t
  misc_feature (30)..(30): n is a, c, g, or t
  misc_feature (35)..(36): n is a, c, g, or t
  misc_feature (59)..(59): n is a, c, g, or t
aaaaaagccaaggccgttgggnttaacccnggganntcccggcgcacaaatttcccccngggggcaagttcttggacgagaatgtccctgagacccagaagggcctgcgctcagctgctctggcaccccgctgcagggatggcctcctgggctaagggcaggagctacctggcgcctggtttgctgcagggccaagtggccatcgtcaccggcggggccacgggcatcggccgtaagttggagagattgaagtctgcggcagatgaactgcaggccaacctacctcccacaaagcaggcacgagtcattcccatacaatgcaacatccggaatgaggaggaggtgaataatttggtcaaatctaccttagatacttttggtaagatcaatttcttggtgaacaatggaggaggccagtttctttcccctgctgaacacatcagttctaagggatggcacgctgtgcttgagaccaacctgacgggtaccttctacatgtgcaaagcagtttacagctcctggatgaaagagcatggaggatctatcgtcaatatcattgtccctactaaagctggatttccattagctgtgcattctggagctgcaagagcaggtgtttacaacctcaccaaatctttagctttggaatgggcctgcagtggaatacggatcaattgtgttgcccctggagttatttattcccagactgctgtggagaactatggttcctggggacaaagcttctttgaagggtcttttcagaaaatccccgctaaacgaattggtgttcctgaggaggtctcctctgtggtctgcttcctactgtctcctgcagcttccttcatcactggacagtcggtggatgtggatgggggccggagtctctatactcactcgtatgaggtaccagatcatgacaactggcccaagggagcaggggacctttctgttgtcaaaaagatgaaggagacctttaaggagaaagctaagctctgagctgaggaaacaaggtgtcctccatcccccagtgccttcacatcttgaggatatgcttctgtactttttaaaagcttatagttggtatggaaaacatttttcttatttttaagtgttattaattatatctatggaaaaactattcctgaaatatatacagtcttatgtcccaatcagagtcttttaacctatgatttaaaaatgtataagtaacagaaattaacatattttaatgactttactttttatttctaagaaaagtatttgaaaaatggaataattttaaatcaatgataattctagggatcatgaactcccagaagattttattatttaattgtaaaggtagaggccagacgcagtggctcacgcctgtaattccagcactttgggaggccgaggtaggcgggtcagttgaggtcaggagttcaagaccaggctggccaacatggtaaaaccctgtctctactgaaaaacaacaaaaacaaaaacacaaattagtcgggtgtggtggcacacacctgtagtcccaggtacttgggaggctgaggcaggaggatcgcttgaacccaggaagcagaggttgcagtgagctgagatcatgctactgcagtccagcctgggctacagagtgagactgcatctcaaaaaaaacccaaaaaacaaaaacaaacaacaacaacaaaattataaaggtagaaaataaacctaaattgtgtcgtaattaagattattaaaattagaattatacaatgacttatttttggtggcaaatactttaggagcaataatgccttatggtaattattgatgtatagtttcttttgtttatgaagtcaaatttgtataaattctcttaattcaaaaaaaaa

SEQ ID NO: 407334 - DNA, 307 bp, Homo sapiens
ctcaagatactttatcaacaagtgcatattttcaggtactacatagcaggctcatttagtacaactgagttttcacagagtgatagctgttgccacatcacttttgtgaatgggagatttaatttggtttgtaaaggattctttgtgatgacttaaatgtacggggtattttttaggaatattttcaaatgtaaatgttgttactaagaactacaatcaatctgtagtgttgagtaatttcaaatgtaaaatttatgtaacaatgcagtgcagataccaaaataggggttggtggcctgaaatacaa

SEQ ID NO: 407335 - DNA, 684 bp, Homo sapiens
ggtcaggagtttgagaccagcctggccaacatggcgaaaccccatctctactaaaaatacaaaaagtagccgggtatggtggtgggcgcctttaatcccagctacttggtaggcaggatggtctcgatctcctgatcttgtcatccatccgccttggcctcctaaaatgctggggttacaggcgtgacccactgcatctggccagtgggtattttttttaacatacatagctttcaagggctttctgaaacattagttgaactcagtttttgtctcctgacaacatatactacccctctcttaggcttttctgtgcaggcacccccaacaactactgtaggtggtggggacttaaccttattgcaggtttctccacttacatcttgttgattatgtaatatgaacaactgatacgctgtctcaaagaagctgagtcacttagaatgtttttctcctgttttttccttttccttcagaggaagaagagcttagaagaacagctccatcaccttgtaagttgagccttagaaattcatggcaacatgacttagttttttatagtggttttctagagttcattgattttacataataatatatttgtatcagtcataaagttcattttgaggagatgtaaacctttaacatattcgtgttacccatttttcttaaaatcttaaacat

SEQ ID NO: 407336 - DNA, 288 bp, Homo sapiens
ctgatctatgagatcccctggaatcttcccgtgggaaaagtggcagtggatgagtagtgagagcttacgatgtgaagaacttcatcttcatgcagaaaatctgtctaggcgggtctgggagctactgatgcttcttcctacatgtcctaatatgttgatggcattccagaatatctcagatgagcagagtaatgatggatttaattggaaagaacttctcaaaattaagagcgcccacaagctattgtatgctctggaaattattgaagcactgggaaaacctaatag

SEQ ID NO: 407337 - DNA, 4400 bp, Homo sapiens
ccccccccactcctatagatcagtcaaaaatctgttcttaagtccatatgagttattaattaaaagtagacttattttctttggaagcaaaagaatgattatctgaaatgtttgcatttgtagctcttggctttattttgaactgttggctttaatactggtttagcattattcataattttaaaatttcttttttatttcagtatcagatgtagaaggtggtgatggactgcagctcagaaaggaacatactctcaaaatatttacttacatcaattcctggacacagaggcaatgtctatgctgcttcaaggaatataagcatttggagatttttaatcaagtagtgtgtgcacttattaacttagtgattgcccaagttcaagtgctccgggaccagctttgtaaacattgtactaccattaacatagattccacgtggcaagatgagagtaatcaagcagaagaaccactgaatatagatagagagtgtaatgaaggaagtacagaaagacaaaaatcaatagaaaaaaaatcaaactctacaagaatttgtaatctgactgaggaggaatcttcaaagagttctgatccttttagtttatggagtacagatgagaaggaaaaactcttactatgtgtggcaaaaaatttttcaaattcagtttcccttatatactgcttacaagcataatactcaccctactattgaggatatatcaactcaagaaagtaacatattaggggcattctgtgatatgaatgatgtagaagtaccattgcatttgcttcgttatgtatgtttgttttgtgggaaaaatggcctttctctcatgaaggattgctttgaatatggaactcctgaaactttgccatttcttatagcacatgcgtttattacagttgtgtctaatattagaatatggctacatattcccgctgtcatgcagcacattataccttttaggacctatgttattaggtatttatgcaagctctcggatcaggagttacgacagagtgcagctcgtaacatggctgacttaatgtggagcacagtcaaagaaccattggatacaacattatgctttgataaagaaagcctagatcttgcatttaagtactttatgtcacctactttgactatgaggttggctggattgagtcagataacaaatcaactccataccttcaatgatgtgtgcaataatgaatcattagtatcggacacagaaacgtccattgcaaaagaacttgcagactggcttattagcaacaatgtggtggagcatatatttggaccaaatttacatattgagattatcaaacagtgccaagtgattttgaattttttggcagcagaagggcgactgagtactcaacatattgactgtatttgggctgcagcacagttgaaacattgtagtcggtatatacatgacttatttccttcactcatcaagaatttggatcccgtaccacttagacatctacttaatctggtctcagctcttgagccaagtgttcatactgaacagacactgtacttggcatccatgttaattaaagcactgtggaataacgcactagcagctaaggctcagttatctaaacagagttcttttgcatctttattaaatactaatattcccattggaaataagaaagaggaagaagagcttagaagaacagctccatcaccttggtcacctgcagctagtcctcaaagcagtgataatagcgatacacatcaaagtggaggtagtgacattgaaatggatgagcaacttattaatagaaccaaacatgtgcaacaacgactttcagacacagaggaatccatgcagggaagttctgacgaaactgccaacagtggtgaagatggaagcagtggtcctggtagcagtagtgggcatagtgatggatctagcaatgaggttaattctagccacgcaagccagtcagctgggagccctggcagtgaggtacagtcagaagacattgcagatattgaagccctcaaagaggaagatgaagacgatgatcatggtcataatcctcccaaaagcagttgtggtacagatcttcggaatagaaagttagagagtcaagcaggcatttgcctgggggactcccaaggcacgtcagaaagaaatgggacaagcagcggaacaggaaaggacctggtttttaacactgaatcattgccatcagtagataatcgaatgcgaatgctggatgcttgttcacactctgaagacccagaacatgatatttcaggggaaatgaatgctactcatatagcacaagggtctcaggagtcttgtatcacacgaactggggacttccttggggagactattgggaatgaattatttaattgtcgacaatttattggtccacagcatcaccaccaccaccaccaccatcaccaccaccacgatgggcatatggttgatgatatgctaagtgcagatgatgtcagttgtagtagctcccaggttagtgcaaaatcagaaaaaaatatggctgattttgatggtgaagaatctggatgtgaagaggagctagttcagattaattcacatgcggaactgacatctcacctccaacaacatcttcccaatttagcttccatttaccatgaacatcttagtcaaggacctgtagttcataaacatcaattcaacagtaatgctgttacagacattaatttggataatgtttgcaagaaaggaaatactttgttgtgggatatagtccaagatgaagatgcagttaatctttctgaaggattaataaatgaagcagagaaacttctttgttcgttagtatgttggtttacagatagacaaattcgaatgagattcattgaaggttgccttgaaaacttgggaaacaacagatcagtagtaatttcacttcgtcttcttccaaaactatttggtacttttcagcagtttgggagcagttacgatacacactggataacaatgtgggcagaaaaagaactgaacatgatgaagcttttctttgataatttggtatactacattcaaactgtgagagaaggaagacaaaaacatgcactgtacagccatagtgctgaagttcaagttcgtcttcaattcttgacttgtgtattttcaactctgggatcacctgatcatttcaggttaagtttagagcaagttgacatcttatggcattgtttagtagaagattctgaatgttatgatgatgcactccattggtttttaaatcaagttcgaagtaaagatcaacatgctatgggtatggaaacctacaaacatcttttcctggagaagatgccccagctaaaacctgaaacaattagcatgactggcttaaacctgtttcagcatctctgtaacttggctcgattggctaccagtgcctatgatggttgttcaaattctgagctgtgtggtatggaccaattttggggcattgctttaagagcacaatctggtgatgtcagtcgagcagctatccagtatattaactcctattatattaatggtaaaacaggtttggagaaggagcaagaatttattagtaagtgcatggagagtcttatgatagcttctagcagtcttgaacaggaatcacactcaagtctcatggttatagaaagaggactccttatgctgaagacacatctggaagcgtttaggagaaggtttgcatatcatctgagacagtggcaaattgaaggcactggtattagtagtcatttgaaagcactgagtgacaaacagtctctgccgctaagggttgtatgccagccagctggacttcctgacaagatgactattgaaatgtatcctagtgaccaggtagcagatcttagggctgaagtaactcattggtatgaaaatttacagaaagaacaaataaatcaacaagctcagcttcaggagtttggtcaaagcaaccgaaaaggagagtttcctggtagcctttcagtgtcaaattttctctttctctttctctctttctttctttttctcttttttttctttttctttctcttttctcctttccttttcttttattctccttttcttttctttcttggttatatcatatagcaactgtcttggtttgtcttgtgttgctgtaacaatactacagactaggtaaagaacagaatttgggaagtccaagatcagggtaccagcatctggtgagggctcctctctgctttcaaagtggcaccttgaatgctgcctcctcacaggcagagggtggaagggtaaaaaatgaacagactccctccatcagacccttttataatggcattaattcattcatggcctctccaaagaccccacatctaaaacctgttgcattggagattaatgttcaacatgaat

SEQ ID NO: 407338 - DNA, 5670 bp, Homo sapiens
ccccccccactcctatagatcagtcaaaaatctgttcttaagtccatatgagttattaattaaaagtagacttattttctttggaagcaaaagaatgattatctgaaatgtttgcatttgtagctcttggctttattttgaactgttggctttaatactggtttagcattattcataattttaaaatttcttttttatttcagtatcagatgtagaaggtggtgatggactgcagctcagaaaggaacatactctcaaaatatttacttacatcaattcctggacacagaggcaatgtctatgctgcttcaaggaatataagcatttggagatttttaatcaagtagtgtgtgcacttattaacttagtgattgcccaagttcaagtgctccgggaccagctttgtaaacattgtactaccattaacatagattccacgtggcaagatgagagtaatcaagcagaagaaccactgaatatagatagagagtgtaatgaaggaagtacagaaagacaaaaatcaatagaaaaaaaatcaaactctacaagaatttgtaatctgactgaggaggaatcttcaaagagttctgatccttttagtttatggagtacagatgagaaggaaaaactcttactatgtgtggcaaaaaatttttcaaattcagtttcccttatatactgcttacaagcataatactcaccctactattgaggatatatcaactcaagaaagtaacatattaggggcattctgtgatatgaatgatgtagaagtaccattgcatttgcttcgttatgtatgtttgttttgtgggaaaaatggcctttctctcatgaaggattgctttgaatatggaactcctgaaactttgccatttcttatagcacatgcgtttattacagttgtgtctaatattagaatatggctacatattcccgctgtcatgcagcacattataccttttaggacctatgttattaggtatttatgcaagctctcggatcaggagttacgacagagtgcagctcgtaacatggctgacttaatgtggagcacagtcaaagaaccattggatacaacattatgctttgataaagaaagcctagatcttgcatttaagtactttatgtcacctactttgactatgaggttggctggattgagtcagataacaaatcaactccataccttcaatgatgtgtgcaataatgaatcattagtatcggacacagaaacgtccattgcaaaagaacttgcagactggcttattagcaacaatgtggtggagcatatatttggaccaaatttacatattgagattatcaaacagtgccaagtgattttgaattttttggcagcagaagggcgactgagtactcaacatattgactgtatttgggctgcagcacagaggaagaagagcttagaagaacagctccatcaccttggtcacctgcagctagtcctcaaagcagtgataatagcgatacacatcaaagtggaggtagtgacattgaaatggatgagcaacttattaatagaaccaaacatgtgcaacaacgactttcagacacagaggaatccatgcagggaagttctgacgaaactgccaacagtggtgaagatggaagcagtggtcctggtagcagtagtgggcatagtgatggatctagcaatgaggttaattctagccacgcaagccagtcagctgggagccctggcagtgaggtacagtcagaagacattgcagatattgaagccctcaaagaggaagatgaagacgatgatcatggtcataatcctcccaaaagcagttgtggtacagatcttcggaatagaaagttagagagtcaagcaggcatttgcctgggggactcccaaggcacgtcagaaagaaatgggacaagcagcggaacaggaaaggacctggtttttaacactgaatcattgccatcagtagataatcgaatgcgaatgctggatgcttgttcacactctgaagacccagaacatgatatttcaggggaaatgaatgctactcatatagcacaagggtctcaggagtcttgtatcacacgaactggggacttccttggggagactattgggaatgaattatttaattgtcgacaatttattggtccacagcatcaccaccaccaccaccaccatcaccaccaccacgatgggcatatggttgatgatatgctaagtgcagatgatgtcagttgtagtagctcccaggttagtgcaaaatcagaaaaaaatatggctgattttgatggtgaagaatctggatgtgaagaggagctagttcagattaattcacatgcggaactgacatctcacctccaacaacatcttcccaatttagcttccatttaccatgaacatcttagtcaaggacctgtagttcataaacatcaattcaacagtaatgctgttacagacattaatttggataatgtttgcaagaaaggaaatactttgttgtgggatatagtccaagatgaagatgcagttaatctttctgaaggattaataaatgaagcagagaaacttctttgttcgttagtatgttggtttacagatagacaaattcgaatgagattcattgaaggttgccttgaaaacttgggaaacaacagatcagtagtaatttcacttcgtcttcttccaaaactatttggtacttttcagcagtttgggagcagttacgatacacactggataacaatgtgggcagaaaaagaactgaacatgatgaagcttttctttgataatttggtatactacattcaaactgtgagagaaggaagacaaaaacatgcactgtacagccatagtgctgaagttcaagttcgtcttcaattcttgacttgtgtattttcaactctgggatcacctgatcatttcaggttaagtttagagcaagttgacatcttatggcattgtttagtagaagattctgaatgttatgatgatgcactccattggtttttaaatcaagttcgaagtaaagatcaacatgctatgggtatggaaacctacaaacatcttttcctggagaagatgccccagctaaaacctgaaacaattagcatgactggcttaaacctgtttcagcatctctgtaacttggctcgattggctaccagtgcctatgatggttgttcaaattctgagctgtgtggtatggaccaattttggggcattgctttaagagcacaatctggtgatgtcagtcgagcagctatccagtatattaactcctattatattaatggtaaaacaggtttggagaaggagcaagaatttattagtaagtgcatggagagtcttatgatagcttctagcagtcttgaacaggaatcacactcaagtctcatggttatagaaagaggactccttatgctgaagacacatctggaagcgtttaggagaaggtttgcatatcatctgagacagtggcaaattgaaggcactggtattagtagtcatttgaaagcactgagtgacaaacagtctctgccgctaagggttgtatgccagccagctggacttcctgacaagatgactattgaaatgtatcctagtgaccaggtagcagatcttagggctgaagtaactcattggtatgaaaatttacagaaagaacaaataaatcaacaagctcagcttcaggagtttggtcaaagcaaccgaaaaggagagtttcctggaggcctcatgggacctgtcaggatgatttcatctggacacgagttaacaacagattatgatgaaaaagcacttcatgagcttggttttaaggatatgcagatggtatttgtatctttgggtgcaccaaggagagagcggaaaggggaaggtgttcagctgccagcatcttgcctcccaccccctcagaaggacaacattccaatgcttttgcttttacaagagcctcatttaactactctttttgatttattagagatgcttgcatcatttaaaccaccctcaggaaaagtggcagtggatgatagtgagagcttacgatgtgaagaacttcatcttcatgcagaaaatctgtctaggcgggtctgggagctactgatgcttcttcctacatgtcctaatatgttgatggcattccagaatatctcagatgagcagagttttaaaagctcagtctgatcacaggtctagacatgaagtttcacattattcaatgtggctcttggtgagttgggctcattgctgttctttagtgaaatctagccttgctgatagcgatcatttacaagattggctaaagaaattgactctccttattcctgagactgcagtttgtcatgaatcatgcagtggtctctataagttatccctgtcagggctggatggaggagactcaatcaatcgttcttttctgctattggctgcctcaacattattgaaatttcttcctgatgctcaagcactcaaacctattaggatagatgattatgaggaagaaccaatattaaaaccaggatgtaaagagtatttttggttgttatgcaaattagttgacaacatacatataaaggacgctagtcagacaacgctcctcgacttagatgccttggcaagacatttggctgactgtattcgaagtagggagatccttgatcatcaggatggtaatgtagaagatgatgggcttacaggactcctaaggcttgcaacaagtgttgttaaacacaaaccaccctttaaattttcaagggaaggacaggtaagtgttaagataatcaaatgtttctatgaaatgtgattgaaattttttgttgttacattgtgtattagtccgtttttacactgctcataaaggcatacccgagactgggcagtttacaaaagaaaagggtttaattcgactcagagttccatgtggctggggaggcctcacaatcgtgccggaaggcaagtccgggcaagtccgagcaagtcgcatcttatgtgaatggcggcaggcaaaaaaagaatgagaaccaagcgaaagcggtttctccttataaaaccatcagatctcaagagacttattcacttatcacaagaacagtatgggggaaaccgccgccatgattcagtcatctcccaccaggtccctcccacaacaatgggaattataggcaatataattcaagatgagatttgggtggagacacggccaaactgtatcacattgtatgtggatatgttaatttttttaaacatacagacataaaaattgctagaaattaccgacaagaaaagcaaattttgaataaattgaattctggaaatataaaacgggcttgtttttagaatacaaaatcagatgttaattcctgtgactgactgaatatagaaaggtaacctaaggctgggcacggtggctcgtgcctatagtcctggcactttgagtggctgaggtgggtggattgcttgaaaccaggagttcgagaccagccaaggcaacatggtgaaacctcatccctacagaaaatacaaaaatttgctgggtgtggtggcacacacctgtagtctcagctactcgggaggctgaggtgggaggattgcttgagctcaggaggtcgaggcttcagtgagccatgatcacaccactgcactgtagcctaggtgacagaaggagaacgtgtctc

SEQ ID NO: 407339 - DNA, 4516 bp, Homo sapiens
ccccccccactcctatagatcagtcaaaaatctgttcttaagtccatatgagttattaattaaaagtagacttattttctttggaagcaaaagaatgattatctgaaatgtttgcatttgtagctcttggctttattttgaactgttggctttaatactggtttagcattattcataattttaaaatttcttttttatttcagtatcagatgtagaaggtggtgatggactgcagctcagaaaggaacatactctcaaaatatttacttacatcaattcctggacacagaggcaatgtctatgctgcttcaaggaatataagcatttggagatttttaatcaagtagtgtgtgcacttattaacttagtgattgcccaagttcaagtgctccgggaccagctttgtaaacattgtactaccattaacatagattccacgtggcaagatgagagtaatcaagcagaagaaccactgaatatagatagagagtgtaatgaaggaagtacagaaagacaaaaatcaatagaaaaaaaatcaaactctacaagaatttgtaatctgactgaggaggaatcttcaaagagttctgatccttttagtttatggagtacagatgagaaggaaaaactcttactatgtgtggcaaaaaatttttcaaattcagtttcccttatatactgcttacaagcataatactcaccctactattgaggatatatcaactcaagaaagtaacatattaggggcattctgtgatatgaatgatgtagaagtaccattgcatttgcttcgttatgtatgtttgttttgtgggaaaaatggcctttctctcatgaaggattgctttgaatatggaactcctgaaactttgccatttcttatagcacatgcgtttattacagttgtgtctaatattagaatatggctacatattcccgctgtcatgcagcacattataccttttaggacctatgttattaggtatttatgcaagctctcggatcaggagttacgacagagtgcagctcgtaacatggctgacttaatgtggagcacagtcaaagaaccattggatacaacattatgctttgataaagaaagcctagatcttgcatttaagtactttatgtcacctactttgactatgaggttggctggattgagtcagataacaaatcaactccataccttcaatgatgtgtgcaataatgaatcattagtatcggacacagaaacgtccattgcaaaagaacttgcagactggcttattagcaacaatgtggtggagcatatatttggaccaaatttacatattgagattatcaaacagtgccaagtgattttgaattttttggcagcagaagggcgactgagtactcaacatattgactgtatttgggctgcagcacagttgaaacattgtagtcggtatatacatgacttatttccttcactcatcaagaatttggatcccgtaccacttagacatctacttaatctggtctcagctcttgagccaagtgttcatactgaacagacactgtacttggcatccatgttaattaaagcactgtggaataacgcactagcagctaaggctcagttatctaaacagagttcttttgcatctttattaaatactaatattcccattggaaataagaaagaggaagaagagcttagaagaacagctccatcaccttggtcacctgcagctagtcctcaaagcagtgataatagcgatacacatcaaagtggaggtagtgacattgaaatggatgagcaacttattaatagaaccaaacatgtgcaacaacgactttcagacacagaggaatccatgcagggaagttctgacgaaactgccaacagtggtgaagatggaagcagtggtcctggtagcagtagtgggcatagtgatggatctagcaatgaggttaattctagccacgcaagccagtcagctgggagccctggcagtgaggtacagtcagaagacattgcagatattgaagccctcaaagaggaagatgaagacgatgatcatggtcataatcctcccaaaagcagttgtggtacagatcttcggaatagaaagttagagagtcaagcaggcatttgcctgggggactcccaaggcacgtcagaaagaaatgggacaagcagcggaacaggaaaggacctggtttttaacactgaatcattgccatcagtagataatcgaatgcgaatgctggatgcttgttcacactctgaagacccagaacatgatatttcaggggaaatgaatgctactcatatagcacaagggtctcaggagtcttgtatcacacgaactggggacttccttggggagactattgggaatgaattatttaattgtcgacaatttattggtccacagcatcaccaccaccaccaccaccatcaccaccaccacgatgggcatatggttgatgatatgctaagtgcagatgatgtcagttgtagtagctcccaggttagtgcaaaatcagaaaaaaatatggctgattttgatggtgaagaatctggatgtgaagaggagctagttcagattaattcacatgcggaactgacatctcacctccaacaacatcttcccaatttagcttccatttaccatgaacatcttagtcaaggacctgtagttcataaacatcaattcaacagtaatgctgttacagacattaatttggataatgtttgcaagaaaggaaatactttgttgtgggatatagtccaagatgaagatgcagttaatctttctgaaggattaataaatgaagcagagaaacttctttgttcgttagtatgttggtttacagatagacaaattcgaatgagattcattgaaggttgccttgaaaacttgggaaacaacagatcagtagtaatttcacttcgtcttcttccaaaactatttggtacttttcagcagtttgggagcagttacgatacacactggataacaatgtgggcagaaaaagaactgaacatgatgaagcttttctttgataatttggtatactacattcaaactgtgagagaaggaagacaaaaacatgcactgtacagccatagtgctgaagttcaagttcgtcttcaattcttgacttgtgtattttcaactctgggatcacctgatcatttcaggttaagtttagagcaagttgacatcttatggcattgtttagtagaagattctgaatgttatgatgatgcactccattggtttttaaatcaagttcgaagtaaagatcaacatgctatgggtatggaaacctacaaacatcttttcctggagaagatgccccagctaaaacctgaaacaattagcatgactggcttaaacctgtttcagcatctctgtaacttggctcgattggctaccagtgcctatgatggttgttcaaattctgagctgtgtggtatggaccaattttggggcattgctttaagagcacaatctggtgatgtcagtcgagcagctatccagtatattaactcctattatattaatggtaaaacaggtttggagaaggagcaagaatttattagtaagtgcatggagagtcttatgatagcttctagcagtcttgaacaggaatcacactcaagtctcatggttatagaaagaggactccttatgctgaagacacatctggaagcgtttaggagaaggtttgcatatcatctgagacagtggcaaattgaaggcactggtattagtagtcatttgaaagcactgagtgacaaacagtctctgccgctaagggttgtatgccagccagctggacttcctgacaagatgactattgaaatgtatcctagtgaccaggtagcagatcttagggctgaagtaactcattggtatgaaaatttacagaaagaacaaataaatcaacaagctcagcttcaggagtttggtcaaagcaaccgaaaaggagagtttcctggaggcctcatgggacctgtcaggatgatttcatctggacacgagttaacaacagattatgatgaaaaagcacttcatgagcttggttttaaggatatgcagatggtatttgtatctttgggtgcaccaaggagagagcggaaaggggaaggtgttcagctgccagcatcttgcctcccaccccctcagaaggacaacattccaatgcttttgcttttacaagagcctcatttaactactctttttgatttattagagatgcttgcatcatttaaaccaccctcaggaaaagtggcagtggatgatagtgagagcttacgatgtgaagaacttcatcttcatgcagaaaatctgtctaggcgggtctgggagctactgatgcttcttcctacatgtcctaatatgttgatggcattccagaatatctcagatgagcagagtaatgatggatttaattggaaagaacttctcaaaattaagagcgcccacaagctattgtatgctctggaaattattgaagcactgggaaaacctaatag

SEQ ID NO: 407340 - DNA, 2127 bp, Homo sapiens
taaaaaattataaattatgagcagtatgttttttcaaaaatctcatagctattacatatatttttatattgccttcattaaagaaatgaaagtgtcatttccatttcattaaatacatcttgtataccctctttatttctagatactttttcttcatttttataagattgaattggtactgaccataatatttgagcagcagaatttttatagtacatgattaagtactagctataattatttttattttctggtcttttaatttcaaaattgtattgtggccattctaaattaatgaaaatagggaattgactatttcttctcatttacagtggcagctagactgtcttgcttgcttgctgaagttaatatgccagtttgcagtagatccatccgatttggatttagcttatcatgatgtctttgcctggtctggtatagcggaaagccataggaaaagaacctggcctggcaaatcaaggaaggctgctggtgatcatgctaagggtcttcatataccacgattaacagaggtatttcttgttcttgtccaaggaaccagtttgattcagcgacttatgtctgttgcttatacgtatgataatctggctcctagagttttaaaagctcagtctgatcacaggtctagacatgaagtttcacattattcaatgtggctcttggtgagttgggctcattgctgttctttagtgaaatctagccttgctgatagcgatcatttacaagattggctaaagaaattgactctccttattcctgagactgcagtttgtcatgaatcatgcagtggtctctataagttatccctgtcagggctggatggaggagactcaatcaatcgttcttttctgctattggctgcctcaacattattgaaatttcttcctgatgctcaagcactcaaacctattaggatagatgattatgaggaagaaccaatattaaaaccaggatgtaaagagtatttttggttgttatgcaaattagttgacaacatacatataaaggacgctagtcagacaacgctcctcgacttagatgccttggcaagacatttggctgactgtattcgaagtagggagatccttgatcatcaggatggtaatgtagaagatgatgggcttacaggactcctaaggcttgcaacaagtgttgttaaacacaaaccaccctttaaattttcaagggaaggacaggtaagtgttaagataatcaaatgtttctatgaaatgtgattgaaattttttgttgttacattgtgtattagtccgtttttacactgctcataaaggcatacccgagactgggcagtttacaaaagaaaagggtttaattcgactcagagttccatgtggctggggaggcctcacaatcgtgccggaaggcaagtccgggcaagtccgagcaagtcgcatcttatgtgaatggcggcaggcaaaaaaagaatgagaaccaagcgaaagcggtttctccttataaaaccatcagatctcaagagacttattcacttatcacaagaacagtatgggggaaaccgccgccatgattcagtcatctcccaccaggtccctcccacaacaatgggaattataggcaatataattcaagatgagatttgggtggagacacggccaaactgtatcacattgtatgtggatatgttaatttttttaaacatacagacataaaaattgctagaaattaccgacaagaaaagcaaattttgaataaattgaattctggaaatataaaacgggcttgtttttagaatacaaaatcagatgttaattcctgtgactgactgaatatagaaaggtaacctaaggctgggcacggtggctcgtgcctatagtcctggcactttgagtggctgaggtgggtggattgcttgaaaccaggagttcgagaccagccaaggcaacatggtgaaacctcatccctacagaaaatacaaaaatttgctgggtgtggtggcacacacctgtagtctcagctactcgggaggctgaggtgggaggattgcttgagctcaggaggtcgaggcttcagtgagccatgatcacaccactgcactgtagcctaggtgacagaaggagaacgtgtctc

SEQ ID NO: 407341 - DNA, 463 bp, Homo sapiens
gtaaaatttgatgtgaaattgacatttatattgtcgaggaaagataaaagacataattatgtgaactatcttgcttgtgtgtattttttttcttttttgtagtagggagatccttgatcatcaggatggtaatgtagaagatgatgggcttacaggactcctaaggcttgcaacaagtgttgttaaacacaaaccaccctttaaattttcaagggaaggacaggtaagtgttaagataatcaaatgtttctatgaaatgtgattgaaattttttgttgttacattgtgtattagtccgtttttacactgctcataaaggcatacccgagactgggcagtttacaaaagaaaagggtttaattcgactcagagttccatgtggctggggaggcctcacaatcgtgccggaaggcaagtccgggcaagtccgagcaagtcgcatcttatgtgaatggcggcaggc

SEQ ID NO: 407342 - DNA, 5842 bp, Homo sapiens
attctcttgctccccgccccgtcgggatcagtcagtgtgatccgaagcgggggagggggggggcggcggccgaacgatgtgcgagaactgcgcagacctggtggaggtgttaaatgaaatatcagatgtagaaggtggtgatggactgcagctcagaaaggaacatactctcaaaatatttacttacatcaattcctggacacagaggcaatgtctatgctgcttcaaggaatataagcatttggagatttttaatcaagtagtgtgtgcacttattaacttagtgattgcccaagttcaagtgctccgggaccagctttgtaaacattgtactaccattaacatagattccacgtggcaagatgagagtaatcaagcagaagaaccactgaatatagatagagagtgtaatgaaggaagtacagaaagacaaaaatcaatagaaaaaaaatcaaactctacaagaatttgtaatctgactgaggaggaatcttcaaagagttctgatccttttagtttatggagtacagatgagaaggaaaaactcttactatgtgtggcaaaaaatttttcaaattcagtttcccttatatactgcttacaagcataatactcaccctactattgaggatatatcaactcaagaaagtaacatattaggggcattctgtgatatgaatgatgtagaagtaccattgcatttgcttcgttatgtatgtttgttttgtgggaaaaatggcctttctctcatgaaggattgctttgaatatggaactcctgaaactttgccatttcttatagcacatgcgtttattacagttgtgtctaatattagaatatggctacatattcccgctgtcatgcagcacattataccttttaggacctatgttattaggtatttatgcaagctctcggatcaggagttacgacagagtgcagctcgtaacatggctgacttaatgtggagcacagtcaaagaaccattggatacaacattatgctttgataaagaaagcctagatcttgcatttaagtactttatgtcacctactttgactatgaggttggctggattgagtcagataacaaatcaactccataccttcaatgatgtgtgcaataatgaatcattagtatcggacacagaaacgtccattgcaaaagaacttgcagactggcttattagcaacaatgtggtggagcatatatttggaccaaatttacatattgagattatcaaacagtgccaagtgattttgaattttttggcagcagaagggcgactgagtactcaacatattgactgtatttgggctgcagcacagttgaaacattgtagtcggtatatacatgacttatttccttcactcatcaagaatttggatcccgtaccacttagacatctacttaatctggtctcagctcttgagccaagtgttcatactgaacagacactgtacttggcatccatgttaattaaagcactgtggaataacgcactagcagctaaggctcagttatctaaacagagttcttttgcatctttattaaatactaatattcccattggaaataagaaagaggaagaagagcttagaagaacagctccatcaccttggtcacctgcagctagtcctcaaagcagtgataatagcgatacacatcaaagtggaggtagtgacattgaaatggatgagcaacttattaatagaaccaaacatgtgcaacaacgactttcagacacagaggaatccatgcagggaagttctgacgaaactgccaacagtggtgaagatggaagcagtggtcctggtagcagtagtgggcatagtgatggatctagcaatgaggttaattctagccacgcaagccagtcagctgggagccctggcagtgaggtacagtcagaagacattgcagatattgaagccctcaaagaggaagatgaagacgatgatcatggtcataatcctcccaaaagcagttgtggtacagatcttcggaatagaaagttagagagtcaagcaggcatttgcctgggggactcccaaggcacgtcagaaagaaatgggacaagcagcggaacaggaaaggacctggtttttaacactgaatcattgccatcagtagataatcgaatgcgaatgctggatgcttgttcacactctgaagacccagaacatgatatttcaggggaaatgaatgctactcatatagcacaagggtctcaggagtcttgtatcacacgaactggggacttccttggggagactattgggaatgaattatttaattgtcgacaatttattggtccacagcatcaccaccaccaccaccaccatcaccaccaccacgatgggcatatggttgatgatatgctaagtgcagatgatgtcagttgtagtagctcccaggttagtgcaaaatcagaaaaaaatatggctgattttgatggtgaagaatctggatgtgaagaggagctagttcagattaattcacatgcggaactgacatctcacctccaacaacatcttcccaatttagcttccatttaccatgaacatcttagtcaaggacctgtagttcataaacatcaattcaacagtaatgctgttacagacattaatttggataatgtttgcaagaaaggaaatactttgttgtgggatatagtccaagatgaagatgcagttaatctttctgaaggattaataaatgaagcagagaaacttctttgttcgttagtatgttggtttacagatagacaaattcgaatgagattcattgaaggttgccttgaaaacttgggaaacaacagatcagtagtaatttcacttcgtcttcttccaaaactatttggtacttttcagcagtttgggagcagttacgatacacactggataacaatgtgggcagaaaaagaactgaacatgatgaagcttttctttgataatttggtatactacattcaaactgtgagagaaggaagacaaaaacatgcactgtacagccatagtgctgaagttcaagttcgtcttcaattcttgacttgtgtattttcaactctgggatcacctgatcatttcaggttaagtttagagcaagttgacatcttatggcattgtttagtagaagattctgaatgttatgatgatgcactccattggtttttaaatcaagttcgaagtaaagatcaacatgctatgggtatggaaacctacaaacatcttttcctggagaagatgccccagctaaaacctgaaacaattagcatgactggcttaaacctgtttcagcatctctgtaacttggctcgattggctaccagtgcctatgatggttgttcaaattctgagctgtgtggtatggaccaattttggggcattgctttaagagcacaatctggtgatgtcagtcgagcagctatccagtatattaactcctattatattaatggtaaaacaggtttggagaaggagcaagaatttattagtaagtgcatggagagtcttatgatagcttctagcagtcttgaacaggaatcacactcaagtctcatggttatagaaagaggactccttatgctgaagacacatctggaagcgtttaggagaaggtttgcatatcatctgagacagtggcaaattgaaggcactggtattagtagtcatttgaaagcactgagtgacaaacagtctctgccgctaagggttgtatgccagccagctggacttcctgacaagatgactattgaaatgtatcctagtgaccaggtagcagatcttagggctgaagtaactcattggtatgaaaatttacagaaagaacaaataaatcaacaagctcagcttcaggagtttggtcaaagcaaccgaaaaggagagtttcctggaggcctcatgggacctgtcaggatgatttcatctggacacgagttaacaacagattatgatgaaaaagcacttcatgagcttggttttaaggatatgcagatggtatttgtatctttgggtgcaccaaggagagagcggaaaggggaaggtgttcagctgccagcatcttgcctcccaccccctcagaaggacaacattccaatgcttttgcttttacaagagcctcatttaactactctttttgatttattagagatgcttgcatcatttaaaccaccctcaggaaaagtggcagtggatgatagtgagagcttacgatgtgaagaacttcatcttcatgcagaaaatctgtctaggcgggtctgggagctactgatgcttcttcctacatgtcctaatatgttgatggcattccagaatatctcagatgagcagagttttaaaagctcagtctgatcacaggtctagacatgaagtttcacattattcaatgtggctcttggtgagttgggctcattgctgttctttagtgaaatctagccttgctgatagcgatcatttacaagattggctaaagaaattgactctccttattcctgagactgcagtttgtcatgaatcatgcagtggtctctataagttatccctgtcagggctggatggaggagactcaatcaatcgttcttttctgctattggctgcctcaacattattgaaatttcttcctgatgctcaagcactcaaacctattaggatagatgattatgaggaagaaccaatattaaaaccaggatgtaaagagtatttttggttgttatgcaaattagttgacaacatacatataaaggacgctagtcagacaacgctcctcgacttagatgccttggcaagacatttggctgactgtattcgaagtagggagatccttgatcatcaggatggtaatgtagaagatgatgggcttacaggactcctaaggcttgcaacaagtgttgttaaacacaaaccaccctttaaattttcaagggaaggacaggtaagtgttaagataatcaaatgtttctatgaaatgtgattgaaattttttgttgttacattgtgtattagtccgtttttacactgctcataaaggcatacccgagactgggcagtttacaaaagaaaagggtttaattcgactcagagttccatgtggctggggaggcctcacaatcgtgccggaaggcaagtccgggcaagtccgagcaagtcgcatcttatgtgaatggcggcaggcaaaaaaagaatgagaaccaagcgaaagcggtttctccttataaaaccatcagatctcaagagacttattcacttatcacaagaacagtatgggggaaaccgccgccatgattcagtcatctcccaccaggtccctcccacaacaatgggaattataggcaatataattcaagatgagatttgggtggagacacggccaaactgtatcacattgtatgtggatatgttaatttttttaaacatacagacataaaaattgctagaaattaccgacaagaaaagcaaattttgaataaattgaattctggaaatataaaacgggcttgtttttagaatacaaaatcagatgttaattcctgtgactgactgaatatagaaaggtaacctaaggctgggcacggtggctcgtgcctatagtcctggcactttgagtggctgaggtgggtggattgcttgaaaccaggagttcgagaccagccaaggcaacatggtgaaacctcatccctacagaaaatacaaaaatttgctgggtgtggtggcacacacctgtagtctcagctactcgggaggctgaggtgggaggattgcttgagctcaggaggtcgaggcttcagtgagccatgatcacaccactgcactgtagcctaggtgacagaaggagaacgtgtctc

SEQ ID NO: 407343 - DNA, 5926 bp, Homo sapiens
ccccccccactcctatagatcagtcaaaaatctgttcttaagtccatatgagttattaattaaaagtagacttattttctttggaagcaaaagaatgattatctgaaatgtttgcatttgtagctcttggctttattttgaactgttggctttaatactggtttagcattattcataattttaaaatttcttttttatttcagtatcagatgtagaaggtggtgatggactgcagctcagaaaggaacatactctcaaaatatttacttacatcaattcctggacacagaggcaatgtctatgctgcttcaaggaatataagcatttggagatttttaatcaagtagtgtgtgcacttattaacttagtgattgcccaagttcaagtgctccgggaccagctttgtaaacattgtactaccattaacatagattccacgtggcaagatgagagtaatcaagcagaagaaccactgaatatagatagagagtgtaatgaaggaagtacagaaagacaaaaatcaatagaaaaaaaatcaaactctacaagaatttgtaatctgactgaggaggaatcttcaaagagttctgatccttttagtttatggagtacagatgagaaggaaaaactcttactatgtgtggcaaaaaatttttcaaattcagtttcccttatatactgcttacaagcataatactcaccctactattgaggatatatcaactcaagaaagtaacatattaggggcattctgtgatatgaatgatgtagaagtaccattgcatttgcttcgttatgtatgtttgttttgtgggaaaaatggcctttctctcatgaaggattgctttgaatatggaactcctgaaactttgccatttcttatagcacatgcgtttattacagttgtgtctaatattagaatatggctacatattcccgctgtcatgcagcacattataccttttaggacctatgttattaggtatttatgcaagctctcggatcaggagttacgacagagtgcagctcgtaacatggctgacttaatgtggagcacagtcaaagaaccattggatacaacattatgctttgataaagaaagcctagatcttgcatttaagtactttatgtcacctactttgactatgaggttggctggattgagtcagataacaaatcaactccataccttcaatgatgtgtgcaataatgaatcattagtatcggacacagaaacgtccattgcaaaagaacttgcagactggcttattagcaacaatgtggtggagcatatatttggaccaaatttacatattgagattatcaaacagtgccaagtgattttgaattttttggcagcagaagggcgactgagtactcaacatattgactgtatttgggctgcagcacagttgaaacattgtagtcggtatatacatgacttatttccttcactcatcaagaatttggatcccgtaccacttagacatctacttaatctggtctcagctcttgagccaagtgttcatactgaacagacactgtacttggcatccatgttaattaaagcactgtggaataacgcactagcagctaaggctcagttatctaaacagagttcttttgcatctttattaaatactaatattcccattggaaataagaaagaggaagaagagcttagaagaacagctccatcaccttggtcacctgcagctagtcctcaaagcagtgataatagcgatacacatcaaagtggaggtagtgacattgaaatggatgagcaacttattaatagaaccaaacatgtgcaacaacgactttcagacacagaggaatccatgcagggaagttctgacgaaactgccaacagtggtgaagatggaagcagtggtcctggtagcagtagtgggcatagtgatggatctagcaatgaggttaattctagccacgcaagccagtcagctgggagccctggcagtgaggtacagtcagaagacattgcagatattgaagccctcaaagaggaagatgaagacgatgatcatggtcataatcctcccaaaagcagttgtggtacagatcttcggaatagaaagttagagagtcaagcaggcatttgcctgggggactcccaaggcacgtcagaaagaaatgggacaagcagcggaacaggaaaggacctggtttttaacactgaatcattgccatcagtagataatcgaatgcgaatgctggatgcttgttcacactctgaagacccagaacatgatatttcaggggaaatgaatgctactcatatagcacaagggtctcaggagtcttgtatcacacgaactggggacttccttggggagactattgggaatgaattatttaattgtcgacaatttattggtccacagcatcaccaccaccaccaccaccatcaccaccaccacgatgggcatatggttgatgatatgctaagtgcagatgatgtcagttgtagtagctcccaggttagtgcaaaatcagaaaaaaatatggctgattttgatggtgaagaatctggatgtgaagaggagctagttcagattaattcacatgcggaactgacatctcacctccaacaacatcttcccaatttagcttccatttaccatgaacatcttagtcaaggacctgtagttcataaacatcaattcaacagtaatgctgttacagacattaatttggataatgtttgcaagaaaggaaatactttgttgtgggatatagtccaagatgaagatgcagttaatctttctgaaggattaataaatgaagcagagaaacttctttgttcgttagtatgttggtttacagatagacaaattcgaatgagattcattgaaggttgccttgaaaacttgggaaacaacagatcagtagtaatttcacttcgtcttcttccaaaactatttggtacttttcagcagtttgggagcagttacgatacacactggataacaatgtgggcagaaaaagaactgaacatgatgaagcttttctttgataatttggtatactacattcaaactgtgagagaaggaagacaaaaacatgcactgtacagccatagtgctgaagttcaagttcgtcttcaattcttgacttgtgtattttcaactctgggatcacctgatcatttcaggttaagtttagagcaagttgacatcttatggcattgtttagtagaagattctgaatgttatgatgatgcactccattggtttttaaatcaagttcgaagtaaagatcaacatgctatgggtatggaaacctacaaacatcttttcctggagaagatgccccagctaaaacctgaaacaattagcatgactggcttaaacctgtttcagcatctctgtaacttggctcgattggctaccagtgcctatgatggttgttcaaattctgagctgtgtggtatggaccaattttggggcattgctttaagagcacaatctggtgatgtcagtcgagcagctatccagtatattaactcctattatattaatggtaaaacaggtttggagaaggagcaagaatttattagtaagtgcatggagagtcttatgatagcttctagcagtcttgaacaggaatcacactcaagtctcatggttatagaaagaggactccttatgctgaagacacatctggaagcgtttaggagaaggtttgcatatcatctgagacagtggcaaattgaaggcactggtattagtagtcatttgaaagcactgagtgacaaacagtctctgccgctaagggttgtatgccagccagctggacttcctgacaagatgactattgaaatgtatcctagtgaccaggtagcagatcttagggctgaagtaactcattggtatgaaaatttacagaaagaacaaataaatcaacaagctcagcttcaggagtttggtcaaagcaaccgaaaaggagagtttcctggaggcctcatgggacctgtcaggatgatttcatctggacacgagttaacaacagattatgatgaaaaagcacttcatgagcttggttttaaggatatgcagatggtatttgtatctttgggtgcaccaaggagagagcggaaaggggaaggtgttcagctgccagcatcttgcctcccaccccctcagaaggacaacattccaatgcttttgcttttacaagagcctcatttaactactctttttgatttattagagatgcttgcatcatttaaaccaccctcaggaaaagtggcagtggatgatagtgagagcttacgatgtgaagaacttcatcttcatgcagaaaatctgtctaggcgggtctgggagctactgatgcttcttcctacatgtcctaatatgttgatggcattccagaatatctcagatgagcagagttttaaaagctcagtctgatcacaggtctagacatgaagtttcacattattcaatgtggctcttggtgagttgggctcattgctgttctttagtgaaatctagccttgctgatagcgatcatttacaagattggctaaagaaattgactctccttattcctgagactgcagtttgtcatgaatcatgcagtggtctctataagttatccctgtcagggctggatggaggagactcaatcaatcgttcttttctgctattggctgcctcaacattattgaaatttcttcctgatgctcaagcactcaaacctattaggatagatgattatgaggaagaaccaatattaaaaccaggatgtaaagagtatttttggttgttatgcaaattagttgacaacatacatataaaggacgctagtcagacaacgctcctcgacttagatgccttggcaagacatttggctgactgtattcgaagtagggagatccttgatcatcaggatggtaatgtagaagatgatgggcttacaggactcctaaggcttgcaacaagtgttgttaaacacaaaccaccctttaaattttcaagggaaggacaggtaagtgttaagataatcaaatgtttctatgaaatgtgattgaaattttttgttgttacattgtgtattagtccgtttttacactgctcataaaggcatacccgagactgggcagtttacaaaagaaaagggtttaattcgactcagagttccatgtggctggggaggcctcacaatcgtgccggaaggcaagtccgggcaagtccgagcaagtcgcatcttatgtgaatggcggcaggcaaaaaaagaatgagaaccaagcgaaagcggtttctccttataaaaccatcagatctcaagagacttattcacttatcacaagaacagtatgggggaaaccgccgccatgattcagtcatctcccaccaggtccctcccacaacaatgggaattataggcaatataattcaagatgagatttgggtggagacacggccaaactgtatcacattgtatgtggatatgttaatttttttaaacatacagacataaaaattgctagaaattaccgacaagaaaagcaaattttgaataaattgaattctggaaatataaaacgggcttgtttttagaatacaaaatcagatgttaattcctgtgactgactgaatatagaaaggtaacctaaggctgggcacggtggctcgtgcctatagtcctggcactttgagtggctgaggtgggtggattgcttgaaaccaggagttcgagaccagccaaggcaacatggtgaaacctcatccctacagaaaatacaaaaatttgctgggtgtggtggcacacacctgtagtctcagctactcgggaggctgaggtgggaggattgcttgagctcaggaggtcgaggcttcagtgagccatgatcacaccactgcactgtagcctaggtgacagaaggagaacgtgtctc

SEQ ID NO: 407344 - DNA, 5220 bp, Homo sapiens
cctaagtggaactgctccggtggctttttccccatgtctgagtgctgctcatccaaaagcatagttgttttttggggttttctttcgttatgtatgtttgttttgtgggaaaaatggcctttctctcatgaaggattgctttgaatatggaactcctgaaactttgccatttcttatagcacatgcgtttattacagttgtgtctaatattagaatatggctacatattcccgctgtcatgcagcacattataccttttaggacctatgttattaggtatttatgcaagctctcggatcaggagttacgacagagtgcagctcgtaacatggctgacttaatgtggagcacagtcaaagaaccattggatacaacattatgctttgataaagaaagcctagatcttgcatttaagtactttatgtcacctactttgactatgaggttggctggattgagtcagataacaaatcaactccataccttcaatgatgtgtgcaataatgaatcattagtatcggacacagaaacgtccattgcaaaagaacttgcagactggcttattagcaacaatgtggtggagcatatatttggaccaaatttacatattgagattatcaaacagtgccaagtgattttgaattttttggcagcagaagggcgactgagtactcaacatattgactgtatttgggctgcagcacagttgaaacattgtagtcggtatatacatgacttatttccttcactcatcaagaatttggatcccgtaccacttagacatctacttaatctggtctcagctcttgagccaagtgttcatactgaacagacactgtacttggcatccatgttaattaaagcactgtggaataacgcactagcagctaaggctcagttatctaaacagagttcttttgcatctttattaaatactaatattcccattggaaataagaaagaggaagaagagcttagaagaacagctccatcaccttggtcacctgcagctagtcctcaaagcagtgataatagcgatacacatcaaagtggaggtagtgacattgaaatggatgagcaacttattaatagaaccaaacatgtgcaacaacgactttcagacacagaggaatccatgcagggaagttctgacgaaactgccaacagtggtgaagatggaagcagtggtcctggtagcagtagtgggcatagtgatggatctagcaatgaggttaattctagccacgcaagccagtcagctgggagccctggcagtgaggtacagtcagaagacattgcagatattgaagccctcaaagaggaagatgaagacgatgatcatggtcataatcctcccaaaagcagttgtggtacagatcttcggaatagaaagttagagagtcaagcaggcatttgcctgggggactcccaaggcacgtcagaaagaaatgggacaagcagcggaacaggaaaggacctggtttttaacactgaatcattgccatcagtagataatcgaatgcgaatgctggatgcttgttcacactctgaagacccagaacatgatatttcaggggaaatgaatgctactcatatagcacaagggtctcaggagtcttgtatcacacgaactggggacttccttggggagactattgggaatgaattatttaattgtcgacaatttattggtccacagcatcaccaccaccaccaccaccatcaccaccaccacgatgggcatatggttgatgatatgctaagtgcagatgatgtcagttgtagtagctcccaggttagtgcaaaatcagaaaaaaatatggctgattttgatggtgaagaatctggatgtgaagaggagctagttcagattaattcacatgcggaactgacatctcacctccaacaacatcttcccaatttagcttccatttaccatgaacatcttagtcaaggacctgtagttcataaacatcaattcaacagtaatgctgttacagacattaatttggataatgtttgcaagaaaggaaatactttgttgtgggatatagtccaagatgaagatgcagttaatctttctgaaggattaataaatgaagcagagaaacttctttgttcgttagtatgttggtttacagatagacaaattcgaatgagattcattgaaggttgccttgaaaacttgggaaacaacagatcagtagtaatttcacttcgtcttcttccaaaactatttggtacttttcagcagtttgggagcagttacgatacacactggataacaatgtgggcagaaaaagaactgaacatgatgaagcttttctttgataatttggtatactacattcaaactgtgagagaaggaagacaaaaacatgcactgtacagccatagtgctgaagttcaagttcgtcttcaattcttgacttgtgtattttcaactctgggatcacctgatcatttcaggttaagtttagagcaagttgacatcttatggcattgtttagtagaagattctgaatgttatgatgatgcactccattggtttttaaatcaagttcgaagtaaagatcaacatgctatgggtatggaaacctacaaacatcttttcctggagaagatgccccagctaaaacctgaaacaattagcatgactggcttaaacctgtttcagcatctctgtaacttggctcgattggctaccagtgcctatgatggttgttcaaattctgagctgtgtggtatggaccaattttggggcattgctttaagagcacaatctggtgatgtcagtcgagcagctatccagtatattaactcctattatattaatggtaaaacaggtttggagaaggagcaagaatttattagtaagtgcatggagagtcttatgatagcttctagcagtcttgaacaggaatcacactcaagtctcatggttatagaaagaggactccttatgctgaagacacatctggaagcgtttaggagaaggtttgcatatcatctgagacagtggcaaattgaaggcactggtattagtagtcatttgaaagcactgagtgacaaacagtctctgccgctaagggttgtatgccagccagctggacttcctgacaagatgactattgaaatgtatcctagtgaccaggtagcagatcttagggctgaagtaactcattggtatgaaaatttacagaaagaacaaataaatcaacaagctcagcttcaggagtttggtcaaagcaaccgaaaaggagagtttcctggaggcctcatgggacctgtcaggatgatttcatctggacacgagttaacaacagattatgatgaaaaagcacttcatgagcttggttttaaggatatgcagatggtatttgtatctttgggtgcaccaaggagagagcggaaaggggaaggtgttcagctgccagcatcttgcctcccaccccctcagaaggacaacattccaatgcttttgcttttacaagagcctcatttaactactctttttgatttattagagatgcttgcatcatttaaaccaccctcaggaaaagtggcagtggatgatagtgagagcttacgatgtgaagaacttcatcttcatgcagaaaatctgtctaggcgggtctgggagctactgatgcttcttcctacatgtcctaatatgttgatggcattccagaatatctcagatgagcagagttttaaaagctcagtctgatcacaggtctagacatgaagtttcacattattcaatgtggctcttggtgagttgggctcattgctgttctttagtgaaatctagccttgctgatagcgatcatttacaagattggctaaagaaattgactctccttattcctgagactgcagtttgtcatgaatcatgcagtggtctctataagttatccctgtcagggctggatggaggagactcaatcaatcgttcttttctgctattggctgcctcaacattattgaaatttcttcctgatgctcaagcactcaaacctattaggatagatgattatgaggaagaaccaatattaaaaccaggatgtaaagagtatttttggttgttatgcaaattagttgacaacatacatataaaggacgctagtcagacaacgctcctcgacttagatgccttggcaagacatttggctgactgtattcgaagtagggagatccttgatcatcaggatggtaatgtagaagatgatgggcttacaggactcctaaggcttgcaacaagtgttgttaaacacaaaccaccctttaaattttcaagggaaggacaggtaagtgttaagataatcaaatgtttctatgaaatgtgattgaaattttttgttgttacattgtgtattagtccgtttttacactgctcataaaggcatacccgagactgggcagtttacaaaagaaaagggtttaattcgactcagagttccatgtggctggggaggcctcacaatcgtgccggaaggcaagtccgggcaagtccgagcaagtcgcatcttatgtgaatggcggcaggcaaaaaaagaatgagaaccaagcgaaagcggtttctccttataaaaccatcagatctcaagagacttattcacttatcacaagaacagtatgggggaaaccgccgccatgattcagtcatctcccaccaggtccctcccacaacaatgggaattataggcaatataattcaagatgagatttgggtggagacacggccaaactgtatcacattgtatgtggatatgttaatttttttaaacatacagacataaaaattgctagaaattaccgacaagaaaagcaaattttgaataaattgaattctggaaatataaaacgggcttgtttttagaatacaaaatcagatgttaattcctgtgactgactgaatatagaaaggtaacctaaggctgggcacggtggctcgtgcctatagtcctggcactttgagtggctgaggtgggtggattgcttgaaaccaggagttcgagaccagccaaggcaacatggtgaaacctcatccctacagaaaatacaaaaatttgctgggtgtggtggcacacacctgtagtctcagctactcgggaggctgaggtgggaggattgcttgagctcaggaggtcgaggcttcagtgagccatgatcacaccactgcactgtagcctaggtgacagaaggagaacgtgtctc

SEQ ID NO: 407345 - DNA, 1952 bp, Homo sapiens
tctttatccagattcagatgattcaagtgaggatcaagtggaaaatagtaaaaattcctggagttgcaagtttgttgctgctggagggcttcaacagttattagaaatttttaattctggaattctagagcctaaagagcaggaatcatggactgtgtggcagctagactgtcttgcttgcttgctgaagttaatatgccagtttgcagtagatccatccgatttggatttagcttatcatgatgtctttgcctggtctggtatagcggaaagccataggaaaagaacctggcctggcaaatcaaggaaggctgctggtgatcatgctaagggtcttcatataccacgattaacagaggtatttcttgttcttgtccaaggaaccagtttgattcagcgacttatgtctgttgcttatacgtatgataatctggctcctagagttttaaaagctcagtctgatcacaggtctagacatgaagtttcacattattcaatgtggctcttggtgagttgggctcattgctgttctttagtgaaatctagccttgctgatagcgatcatttacaagattggctaaagaaattgactctccttattcctgagactgcagtttgtcatgaatcatgcagtggtctctataagttatccctgtcagggctggatggaggagactcaatcaatcgttcttttctgctattggctgcctcaacattattgaaatttcttcctgatgctcaagcactcaaacctattaggatagatgattatgaggaagaaccaatattaaaaccaggatgtaaagagtatttttggttgttatgcaaattagttgacaacatacatataaaggacgctagtcagacaacgctcctcgacttagatgccttggcaagacatttggctgactgtattcgaagtagggagatccttgatcatcaggatggtaatgtagaagatgatgggcttacaggactcctaaggcttgcaacaagtgttgttaaacacaaaccaccctttaaattttcaagggaaggacaggtaagtgttaagataatcaaatgtttctatgaaatgtgattgaaattttttgttgttacattgtgtattagtccgtttttacactgctcataaaggcatacccgagactgggcagtttacaaaagaaaagggtttaattcgactcagagttccatgtggctggggaggcctcacaatcgtgccggaaggcaagtccgggcaagtccgagcaagtcgcatcttatgtgaatggcggcaggcaaaaaaagaatgagaaccaagcgaaagcggtttctccttataaaaccatcagatctcaagagacttattcacttatcacaagaacagtatgggggaaaccgccgccatgattcagtcatctcccaccaggtccctcccacaacaatgggaattataggcaatataattcaagatgagatttgggtggagacacggccaaactgtatcacattgtatgtggatatgttaatttttttaaacatacagacataaaaattgctagaaattaccgacaagaaaagcaaattttgaataaattgaattctggaaatataaaacgggcttgtttttagaatacaaaatcagatgttaattcctgtgactgactgaatatagaaaggtaacctaaggctgggcacggtggctcgtgcctatagtcctggcactttgagtggctgaggtgggtggattgcttgaaaccaggagttcgagaccagccaaggcaacatggtgaaacctcatccctacagaaaatacaaaaatttgctgggtgtggtggcacacacctgtagtctcagctactcgggaggctgaggtgggaggattgcttgagctcaggaggtcgaggcttcagtgagccatgatcacaccactgcactgtagcctaggtgacagaaggagaacgtgtctc

SEQ ID NO: 407346 - DNA, 941 bp, Homo sapiens
gaagaattaacgatatgttaacacaagttgactgtgatagaataattacaataaatatgcctattttcctttggggagaaaagtctaaaattctgctttatagaagctattctcagctctaaaagagcatatatgtagatcttcatttcttttcttctaacaattttaggggaaaatacaaaccttaagttatttcctgaaatatttcccaggatgattactaccttggattttaaggcttctttcttcacaagttctgactcttctataagcacagtcagaatggtcagaatgctgactctcctttaggtagtcagaatgggtcttccaaacctttgtatgagcccattagctgcctcagctttccctcaactttcaggaaaacacaggttacatattctttacgttactatgagaaactacctacattatttttttttaaattttatttttggctgggcacattggctcacacctgcaatcccaacattttgggaggctgagatgaaaggattgcttgaagccaggagttgcaagacaagcctaggtgacaaagtgagaccttgactataaaaaaaaaattaacctttccggcggtgatgacctacccacacgagaacatgcctcttgcaaagggtctccttcatccctctccagaaaaggagaagaggaaacacaagaagaaacgcctggtgcagagccccaattcctgcttcatggatgtgaaatgcccaggatgctataaaatcatcacggtctttagccatgcacaaacggtagttttgtgtgttggctgctccactgtcctctgccagcctacaggaggaaaagcaaggcttacagaaggatgttccttcaggaggaagcagcactaaaagcactctgaatcaagatgagtgggaaaccatctcaataaacacattttggattaaaaaaaaaaa

SEQ ID NO: 407347 - DNA, 590 bp, Homo sapiens
aattagccgggcatggtggcatgcacctgtagtcccagctactctggaggctaaggtgggaggatcgcttgagcctaggagctcaaggttacagtgagctatgatcacatcactgcattccagcctgggtgacaatagccctataatgtaggtagttacttttatctgcattttacaaatgaaaagaactgacagacattgagttaaaataaccagtacaaaaatcacagatgggggatagccaaagctttaaaatggaatagcaggaagttttaatttgcaaatagaatcattaatgtttaatagaatcattaatagatttaatagaattaatgaattgatagaatcattaattcatacttagtttggagtgattgttgaacacatttctcagctaatttaggtcttcattatattttagaacatattatctgcatcattaaaaaattcctcatttcctcattgcctatctctgccttttattcactcagttttaaaataaacagattttgtttatactgcttcttttattaatatttatggtaagatattttatactgctgataaatggacattaatgatatatagcc

SEQ ID NO: 407348 - DNA, 1779 bp, Homo sapiens
gagattttatcgggagcagtgaggtgactttggcagctaacaggccactagtatcctactaaagcttttgtctggataggagcaacatgcatgtttacagtcttgcagtgtgctgagagctggtggccagtgggactgagtgagctgtgtgccgtgtattgacccgcttcctagtcctgaattcctttcagaagctccggcagggaggatgatacagtcagacaaaggagcagatccaccagacaagaaggacatgaagctttctacagccaccaatccacagaatggcctctcccagatcctgaggcttgtgctgcaagagctgagtctgttctacagcagagatgtgaatggagtgtgtctcttgtacgatctcctccactcgccgtggcttcaggctctgctaaagatttatgactgcctccaggaatttaaagaaaagaaactagttcctgccacaccacatgcacaggtgttatcctatgaggtagtggagttattacgtgaaacccctacttcccctgagatccaagagctgagacaaatgctccaggctccacacttcaagggagccaccatcaagcgccacgagatgacaggggacatcttggtggccaggatcatccacggtgggctggcggagagaagtgggttgctatatgctggagacaaactggtagaagtgaatggagtttcagttgagggactggaccctgaacaagtgatccatattctggccatgtctcgaggcacaatcatgttcaaggtggttccagtctctgaccctcctgtgaatagccagcagatggtgtacgtccgtgccatgactgagtactggccccaggaggatcccgacatcccctgcatggacgctggattgcctttccagaagggggacatcctccagattgtggaccagaatgatgccctctggtggcaggcccgaaaaatctcagaccctgctacctgcgctgggcttgtcccttctaaccaccttctgaagaggtaaggaacgtcaccactcctggactcagggctgaaccatcaggaaacaaaatgtttttcttgggtttctgttacctcaagatgagataaagagggacaagcagatgaatgaacacacacacactggtttataaatccaaatgtcaacttatcgataaaccctaagcatcttaaataccaaggagacgagaataatcatatcagctagaaaacagggaaaagtcttgggaaactaaattaaacttaaaaagtgctatggcctgaatgtttgtgtcctctccaaaattcatatgttgagacctaatccccaatgcaatagtattaagaggcggggcctttagcaggtggttaggtcatgagcactctgccctcatgaatgggattagtgcccttataaaagaggcctgagggagcttattttccccttccaccatgggaggacccagctaaaaggtgccatttatgagtcacggagtgggccctcgccagacactgcatccactggctccttgatcttggacttcccagcttccagaactatgagcaaatacatctctgttgtttgtaagtgacccagtttacggtactttgttatagcagcctgcacagactaagacaaaaaaggattcatctttcaaggctgagttgagacctcaatttcaacccaccaccctcaccttatgctactgagttttgacaagctaccaagggagggcgtgcaaatagaaagaagcagcagtcccaggctcagccactgttaagagatcaagaaga

SEQ ID NO: 407349 - DNA, 2752 bp, Homo sapiens
gagattttatcgggagcagtgaggtgactttggcagctaacaggccactagtatcctactaaagcttttgtctggataggagcaacatgcatgtttacagtcttgcagtgtgctgagagctggtggccagtgggactgagtgagctgtgtgccgtgtattgacccgcttcctagtcctgaattcctttcagaagctccggcagggaggatgatacagtcagacaaaggagcagatccaccagacaagaaggacatgaagctttctacagccaccaatccacagaatggcctctcccagatcctgaggcttgtgctgcaagagctgagtctgttctacagcagagatgtgaatggagtgtgtctcttgtacgatctcctccactcgccgtggcttcaggctctgctaaagatttatgactgcctccaggaatttaaagaaaagaaactagttcctgccacaccacatgcacaggtgttatcctatgaggtagtggagttattacgtgaaacccctacttcccctgagatccaagagctgagacaaatgctccaggctccacacttcaaggccttgctcagtgcccatgacacgatagctcagaaagattttgaaccccttctccctccactgccagacaatatccctgagagtgaggaagcaatgaggattgtttgtttagtgaaaaaccaacagcccctgggagccaccatcaagcgccacgagatgacaggggacatcttggtggccaggatcatccacggtgggctggcggagagaagtgggttgctatatgctggagacaaactggtagaagtgaatggagtttcagttgagggactggaccctgaacaagtgatccatattctggccatgtctcgaggcacaatcatgttcaaggtggttccagtctctgaccctcctgtgaatagccagcagatggtgtacgtccgtgccatgactgagtactggccccaggaggatcccgacatcccctgcatggacgctggattgcctttccagaagggggacatcctccagattgtggaccagaatgatgccctctggtggcaggcccgaaaaatctcagaccctgctacctgcgctgggcttgtcccttctaaccaccttctgaagaggaagcaacgggaattctggtggtctcagccgtaccagcctcacacctgcctcaagtcaaccctatatgaagaaacatttgaatctgacaaggaggagtttgttggctacggtcagaagttctttatagctggcttccgccgcagcatgcgcctttgtcgcaggaagtctcacctcagcccgctgcatgccagtgtgtgctgcaccggcagctgctacagtgcagtgggtgccccttacgaggaggtggtgaggtaccagcgacgcccttcagacaagtaccgcctcatagtgctcatgggaccctctggtgttggagtaaatgagctcagaagacaacttattgaatttaatcccagccattttcaaagtgctgtgccacacactactcgtactaaaaagagttacgaaatgaatgggcgtgagtatcactatgtgtccaaggaaacatttgaaaacctcatatatagtcacaggatgctggagtatggtgagtacaaaggccacctgtatggcactagtgtggatgctgttcaaacagtccttgtcgaaggaaagatctgtgtcatggacctagagcctcaggatattcaaggggttcgaacccatgaactgaagccctatgtcatatttataaagccatcgaatatgaggtgtatgaaacaatctcggaaaaatgccaaggttattactgactactatgtggacatgaagttcaaggatgaagacctacaagagatggaaaatttagcccaaagaatggaaactcagtttggccaattttttgatcatgtgattgtgaatgacagcttgcacgatgcatgtgcccagttgttgtctgccatacagaaggctcaggaggagcctcagtgggtaccagcaacatggatttcctcagatactgagtctcaatgagacttcttgtttaatgctggagttttaacactgtacccttgatacagcgatccatagttgcaatctaaaacaacagtatttgacccattttaatgtgtacaactttaaaagtgcagcaatttattaattaatcttatttgaaaaaaatttttattgtatggttatgtggttacctattttaacttaattttttttcctttacctcatatgcagctgtggtagaaatatgaataatgttaagtcactgagtatgagaacctttcgcagatttcacatgatctttttaagatttaaataaagagctttcctaaataaaataagcaatagttaactttaaaaaaaaaaaaaaaaaaaaaaaaaaacgttgtgtgtggggcggcgccttgggccctcggaaaaaagaggtctttctaaaaccacatgtggttgtgggggggggcggcacccacagagaggtaacatgtggaacaattgggccaaaaaacgtggtcgccccagaggagagaacccgcgggcccaagacaataagttggcggtgggtttcccacacgaagtaaaaaaaaaacgccgcgggggggagacagggaggctgctttcggaacacaaatcccaggagagagagtccgggaggggacatcagcggggtcttaaacaaccgaggtgagccaagagaagtccgaataaaatcaccgccggcgagga

SEQ ID NO: 407350 - DNA, 1515 bp, Homo sapiens
gccaggccttacccgagttaccttttgctagtggtgacgtgcacgtcttgcttatgtcatttgccttgatttgatggctaacatgatcttcttaaaggcttaactttttcatgtctgtttctgcacttacccaaatatccagaggaactttcagaagacaaggaggagtttgttggctacggtcagaagttctttataggaccctctggtgttggagtaaatgagctcagaagacaacttattgaatttaatcccagccattttcaaagtgctgtgccacacactactcgtactaaaaagagttacgaaatgaatgggcgtgagtatcactatgtgtccaaggaaacatttgaaaacctcatatatagtcacaggatgctggagtatggtgagtacaaaggccacctgtatggcactagtgtggatgctgttcaaacagtccttgtcgaaggaaagatctgtgtcatggacctagagcctcaggatattcaaggggttcgaacccatgaactgaagccctatgtcatatttataaagccatcgaatatgaggtgtatgaaacaatctcggaaaaatgccaaggttattactgactactatgtggacatgaagttcaaggatgaagacctacaagagatggaaaatttagcccaaagaatggaaactcagtttggccaattttttgatcatgtgattgtgaatgacagcttgcacgatgcatgtgcccagttgttgtctgccatacagaaggctcaggaggagcctcagtgggtaccagcaacatggatttcctcagatactgagtctcaatgagacttcttgtttaatgctggagttttaacactgtacccttgatacagcgatccatagttgcaatctaaaacaacagtatttgacccattttaatgtgtacaactttaaaagtgcagcaatttattaattaatcttatttgaaaaaaatttttattgtatggttatgtggttacctattttaacttaattttttttcctttacctcatatgcagctgtggtagaaatatgaataatgttaagtcactgagtatgagaacctttcgcagatttcacatgatctttttaagatttaaataaagagctttcctaaataaaataagcaatagttaactttaaaaaaaaaaaaaaaaaaaaaaaaaaacgttgtgtgtggggcggcgccttgggccctcggaaaaaagaggtctttctaaaaccacatgtggttgtgggggggggcggcacccacagagaggtaacatgtggaacaattgggccaaaaaacgtggtcgccccagaggagagaacccgcgggcccaagacaataagttggcggtgggtttcccacacgaagtaaaaaaaaaacgccgcgggggggagacagggaggctgctttcggaacacaaatcccaggagagagagtccgggaggggacatcagcggggtcttaaacaaccgaggtgagccaagagaagtccgaataaaatcaccgccggcgagga

SEQ ID NO: 407351 - DNA, 590 bp, Homo sapiens
gagattttatcgggagcagtgaggtgactttggcagctaacaggccactagtatcctactaaagcttttgtctggataggagcaacatgcatgtttacagtcttgcagtgtgctgagagctggtggccagtgggactgagtgagctgtgtgccgtgtattgacccgcttcctagtcctgaattcctttcagaagctccggcagggaggatgatacagtcagacaaaggagcagatccaccagacaagaaggacatgaagctttctacagccaccaatccacagaatggcctctcccagatcctgaggcttgtgctgcaagagctgagtctgttctacagcagagatgtgaatggagtgtgtctcttgtacgatctcctccactcgccgtggcttcaggctctgctaaagatttatgactgcctccaggaatttaaagaaaagaaactagttcctgccacaccacatgcacaggtgttatcctatgaggtaaggagattttattccacaggatagtagagctctgatgtggtgccattttccccacattgctagttcaaatgaattaaaggttctaaggaaaagttttatt

SEQ ID NO: 407352 - DNA, 446 bp, Homo sapiens
aaagatctgtgtcatggacctagagcctcaggtgggtccatggtggaatatttatgtccccaaacaatgaatgcgtatcatccattttttgtgcacatgctgtaggttatagttgagacatttattctgttagccttttaagaataaggccatttcccatatataagatcttacttaacgtgtcaattgacaacattttacttttagttgggaaagaagtcttgcttctcagacagaaaagcagaactgattgagtggtcacaaagagaagcaagaatctttcttgctttaaccttgatcacaaaggcatcagagtaacttcttgtggagtgaataagatgttgctttgtacaaggaggtgaggtttctatgttgtcatatctgtggctaccttcctgagaccacatgtagaatggagcaggggtgagcaagttaaggtaagataa

SEQ ID NO: 407353 - DNA, 2692 bp, Homo sapiens
gagattttatcgggagcagtgaggtgactttggcagctaacaggccactagtatcctactaaagcttttgtctggataggagcaacatgcatgtttacagtcttgcagtgtgctgagagctggtggccagtgggactgagtgagctgtgtgccgtgtattgacccgcttcctagtcctgaattcctttcagaagctccggcagggaggatgatacagtcagacaaaggagcagatccaccagacaagaaggacatgaagctttctacagccaccaatccacagaatggcctctcccagatcctgaggcttgtgctgcaagagctgagtctgttctacagcagagatgtgaatggagtgtgtctcttgtacgatctcctccactcgccgtggcttcaggctctgctaaagatttatgactgcctccaggaatttaaagaaaagaaactagttcctgccacaccacatgcacaggtgttatcctatgaggtagtggagttattacgtgaaacccctacttcccctgagatccaagagctgagacaaatgctccaggctccacacttcaaggccttgctcagtgcccatgacacgatagctcagaaagattttgaaccccttctccctccactgccagacaatatccctgagagtgaggaagcaatgaggattgtttgtttagtgaaaaaccaacagcccctgggagccaccatcaagcgccacgagatgacaggggacatcttggtggccaggatcatccacggtgggctggcggagagaagtgggttgctatatgctggagacaaactggtagaagtgaatggagtttcagttgagggactggaccctgaacaagtgatccatattctggccatgtctcgaggcacaatcatgttcaaggtggttccagtctctgaccctcctgtgaatagccagcagatggatcccgacatcccctgcatggacgctggattgcctttccagaagggggacatcctccagattgtggaccagaatgatgccctctggtggcaggcccgaaaaatctcagaccctgctacctgcgctgggcttgtcccttctaaccaccttctgaagaggaagcaacgggaattctggtggtctcagccgtaccagcctcacacctgcctcaagtcaaccctatacaaggaggagtttgttggctacggtcagaagttctttatagctggcttccgccgcagcatgcgcctttgtcgcaggaagtctcacctcagcccgctgcatgccagtgtgtgctgcaccggcagctgctacagtgcagtgggtgccccttacgaggaggtggtgaggtaccagcgacgcccttcagacaagtaccgcctcatagtgctcatgggaccctctggtgttggagtaaatgagctcagaagacaacttattgaatttaatcccagccattttcaaagtgctgtgccacacactactcgtactaaaaagagttacgaaatgaatgggcgtgagtatcactatgtgtccaaggaaacatttgaaaacctcatatatagtcacaggatgctggagtatggtgagtacaaaggccacctgtatggcactagtgtggatgctgttcaaacagtccttgtcgaaggaaagatctgtgtcatggacctagagcctcaggatattcaaggggttcgaacccatgaactgaagccctatgtcatatttataaagccatcgaatatgaggtgtatgaaacaatctcggaaaaatgccaaggttattactgactactatgtggacatgaagttcaaggatgaagacctacaagagatggaaaatttagcccaaagaatggaaactcagtttggccaattttttgatcatgtgattgtgaatgacagcttgcacgatgcatgtgcccagttgttgtctgccatacagaaggctcaggaggagcctcagtgggtaccagcaacatggatttcctcagatactgagtctcaatgagacttcttgtttaatgctggagttttaacactgtacccttgatacagcgatccatagttgcaatctaaaacaacagtatttgacccattttaatgtgtacaactttaaaagtgcagcaatttattaattaatcttatttgaaaaaaatttttattgtatggttatgtggttacctattttaacttaattttttttcctttacctcatatgcagctgtggtagaaatatgaataatgttaagtcactgagtatgagaacctttcgcagatttcacatgatctttttaagatttaaataaagagctttcctaaataaaataagcaatagttaactttaaaaaaaaaaaaaaaaaaaaaaaaaaacgttgtgtgtggggcggcgccttgggccctcggaaaaaagaggtctttctaaaaccacatgtggttgtgggggggggcggcacccacagagaggtaacatgtggaacaattgggccaaaaaacgtggtcgccccagaggagagaacccgcgggcccaagacaataagttggcggtgggtttcccacacgaagtaaaaaaaaaacgccgcgggggggagacagggaggctgctttcggaacacaaatcccaggagagagagtccgggaggggacatcagcggggtcttaaacaaccgaggtgagccaagagaagtccgaataaaatcaccgccggcgagga

SEQ ID NO: 407354 - DNA, 2784 bp, Homo sapiens
gagattttatcgggagcagtgaggtgactttggcagctaacaggccactagtatcctactaaagcttttgtctggataggagcaacatgcatgtttacagtcttgcagtgtgctgagagctggtggccagtgggactgagtgagctgtgtgccgtgtattgacccgcttcctagtcctgaattcctttcagaagctccggcagggaggatgatacagtcagacaaaggagcagatccaccagacaagaaggacatgaagctttctacagccaccaatccacagaatggcctctcccagatcctgaggcttgtgctgcaagagctgagtctgttctacagcagagatgtgaatggagtgtgtctcttgtacgatctcctccactcgccgtggcttcaggctctgctaaagatttatgactgcctccaggaatttaaagaaaagaaactagttcctgccacaccacatgcacaggtgttatcctatgaggtagtggagttattacgtgaaacccctacttcccctgagatccaagagctgagacaaatgctccaggctccacacttcaaggccttgctcagtgcccatgacacgatagctcagaaagattttgaaccccttctccctccactgccagacaatatccctgagagtgaggaagcaatgaggattgtttgtttagtgaaaaaccaacagcccctgggagccaccatcaagcgccacgagatgacaggggacatcttggtggccaggatcatccacggtgggctggcggagagaagtgggttgctatatgctggagacaaactggtagaagtgaatggagtttcagttgagggactggaccctgaacaagtgatccatattctggccatgtctcgaggcacaatcatgttcaaggtggttccagtctctgaccctcctgtgaatagccagcagatggtgtacgtccgtgccatgactgagtactggccccaggaggatcccgacatcccctgcatggacgctggattgcctttccagaagggggacatcctccagattgtggaccagaatgatgccctctggtggcaggcccgaaaaatctcagaccctgctacctgcgctgggcttgtcccttctaaccaccttctgaagaggaagcaacgggaattctggtggtctcagccgtaccagcctcacacctgcctcaagtcaaccctatatgaagaaacatttgaatctgacaaggaggagtttgttggctacggtcagaagttctttatagctggcttccgccgcagcatgcgcctttgtcgcaggaagtctcacctcagcccgctgcatgccagtgtgtgctgcaccggcagctgctacagtgcagtgggtgccccttacgaggaggtggtgaggtaccagcgacgcccttcagacaagtaccgcctcatagtgctcatgggaccctctggtgttggagtaaatgagctcagaagacaacttattgaatttaatcccagccattttcaaagtgctgtgccacacactactcgtactaaaaagagttacgaaatgaatgggcgtgagtatcactatgtgtccaaggaaacatttgaaaacctcatatatagtcacaggatgctggagtatggtgagtacaaaggccacctgtatggcactagtgtggatgctgttcaaacagtccttgtcgaaggaaagatctgtgtcatggacctagagcctcaggatattcaaggggttcgaacccatgaactgaagccctatgtcatatttataaagccatcgaatatgaggtgtatgaaacaatctcggaaaaatgccaaggttattactgactactatgtggacatgaagttcaagttttagtctgtgtgctaccaaagcaagcacaggatgaagacctacaagagatggaaaatttagcccaaagaatggaaactcagtttggccaattttttgatcatgtgattgtgaatgacagcttgcacgatgcatgtgcccagttgttgtctgccatacagaaggctcaggaggagcctcagtgggtaccagcaacatggatttcctcagatactgagtctcaatgagacttcttgtttaatgctggagttttaacactgtacccttgatacagcgatccatagttgcaatctaaaacaacagtatttgacccattttaatgtgtacaactttaaaagtgcagcaatttattaattaatcttatttgaaaaaaatttttattgtatggttatgtggttacctattttaacttaattttttttcctttacctcatatgcagctgtggtagaaatatgaataatgttaagtcactgagtatgagaacctttcgcagatttcacatgatctttttaagatttaaataaagagctttcctaaataaaataagcaatagttaactttaaaaaaaaaaaaaaaaaaaaaaaaaaacgttgtgtgtggggcggcgccttgggccctcggaaaaaagaggtctttctaaaaccacatgtggttgtgggggggggcggcacccacagagaggtaacatgtggaacaattgggccaaaaaacgtggtcgccccagaggagagaacccgcgggcccaagacaataagttggcggtgggtttcccacacgaagtaaaaaaaaaacgccgcgggggggagacagggaggctgctttcggaacacaaatcccaggagagagagtccgggaggggacatcagcggggtcttaaacaaccgaggtgagccaagagaagtccgaataaaatcaccgccggcgagga

SEQ ID NO: 407355 - DNA, 1815 bp, Homo sapiens
ttagtatgtgtggctatttaaagtataatgactttggtttggttatatgagtgacacagaatttaaggaggcttcatgccatagttcatagtttgctctaatggcttggtggtatccctgaacagtctacttttagaaattaacagtaaatacacaatccagctgtaatcttaccctccaccagggggagcttcaacatcggttaatactttttttttttttgagatggagtctcgccctgtcgcccaggctagagtgcaatggctcagtctccgctcaccgcaatctctgcctcccgggttcaaacagttgtgcctcagtcttccaagtagctgggattacaggcacccgccaccacgcccagctaatttttgtatttttagtagagacggggtttcatcatgttggcgaggctggtcttgaactcctgacttcgtgatccgcccccccctcagcctcccaaagtgctgggattacaggcgtgagccaccgcgcctggcccggttaatactttcataagcattgaagtaactatttaagtcctagtacataaacactgtgtggttcacaaaaaggcatagagacattctctcaagagtttacaatctaattgggcagggaagatactacagttcatcaaagatatgaataacaccctagttttctgaactgcagctgcatgggtaattatcttaagaacttttggcaaaatatggatgttggtgtgttactctcttctccctacaactctgaactaatctgtgtttggcaccttgatttgccatcataaatggccaccatttactcctcactgaaatattcttcttctttgaggttataatgtacttggaaaagttaatacttatagaaaataatgatctttattaccaactttattaaaacaggcttggaacatttttctccatagaagaatagtaataagacattctacatttcctggacatggccagtttaaaatattttgccccattacccttgtagatacacatgtatttgtcagtttatgtgcctcagttttgtcttaggcactgagggacagaaagagaaataaggaataccttggtattttcctttgcaagcaatcacagcagaatgctagaaaacataaaatatactcttataaattgtatgtgtgttgaaaccaaagtgtgaagaaattgtcaggtatttggaggaggaaaataatttgtaaaataacctttttaagaatttggattttgtacttatttaaggtgctaaatatgtgttaaaatatcccctcttgaatcagctccaggcttaaaagggcagagtggtttggattcttgtccagggtctggaaagagctcatcttgccgagagggaaataaatgtgagctttgaggcggtctaactacccagcttttagtatttatgttccccaaaatgtaaaaactgtaagttattcttgaaaatgtagtccagacatttctttgatcctggattttactgcagtttcatcatgggtttgttgaatgtgcagtccatttattgccctgtcttgcttaaatattcttgttgagaacagctggaggctttgactgggttcctagttctgttttctgggaaggcaacgtggattctgttttgtagacattaatgagctttaaatgggaattggggatgatgtatgttcgttgggcatgctgagaagcggcctcctgtggttctgggcccaaggtgtgacatacatttcccactaattgcttctctcaagaagcaagagattggctgttcctcttgaggaaaaaccttaataaaccttcccattttaaa

SEQ ID NO: 407356 - DNA, 1770 bp, Homo sapiens
  misc_feature (1732)..(1732): n is a, c, g, or t
ttagtatgtgtggctatttaaagtataatgactttggtttggttatatgagtgacacagaatttaaggaggcttcatgccatagttcatagtttgctctaatggcttggtggtatccctgaacagtctacttttagaaattaacagtaaatacacaatccagctgtaatcttaccctccaccagggggagcttcaacatcggttaatactttttttttttttgagatggagtctcgccctgtcgcccaggctagagtgcaatggctcagtctccgctcaccgcaatctctgcctcccgggttcaaacagttgtgcctcagtcttccaagtagctgggattacaggcacccgccaccacgcccagctaatttttgtatttttagtagagacggggtttcatcatgttggcgaggctggtcttgaactcctgacttcgtgatccgcccccccctcagcctcccaaagtgctgggattacaggcgtgagccaccgcgcctggcccggttaatactttcataagcattgaagtaactatttaagtcctagtacataaacactgtgtggttcacaaaaaggcatagagacattctctcaagagtttacaatctaattgggcagggaagatactacagttcatcaaagatatgaataacaccctagttttctgaactgcagctgcatgggtaattatcttaagaacttttggcaaaatatggatgttggtgtgttactctcttctccctacaactctgaactaatctgtgtttggcaccttgatttgccatcataaatggccaccatttactcctcactgaaatattcttcttctttgaggttataatgtacttggaaaagttaatacttatagaaaataatgatctttattaccaactttattaaaacaggcttggaacatttttctccatagaagaatagtaataagacattctacatttcctggacatggccagtttaaaatattttgccccattacccttgtagatacacatgtatttgtcagtttatgtgcctcagttttgtcttaggcactgagggacagaaagagaaataaggaataccttggtattttcctttgcaagcaatcacagcagaatgctagaaaacataaaatatactcttataaattgtatgtgtgttgaaaccaaagtgtgaagaaattgtcaggtatttggaggaggaaaataatttgtaaaataacctttttaagaatttggattttgtacttatttaaggtgctaaatatgtgttaaaatatcccctcttgaatcagctccaggcttaaaagggcagagtggtttggattcttgtccagggtctggaaagagctcatcttgccgagagggaaataaatgtgagctttgaggcggtctaactacccagcttttagtatttatgttccccaaaatgtaaaaactgtaagttattcttgaaaatgtagtccagacatttctttgatcctggattttactgcagtttcatcatgggtttgttgaatgtgcagtccatttattgccctgtcttgcttaaatattcttgttgagaacagctggaggctttgactgggttcctagttctgttttctgggaaggcaacgtggattctgttttgtagacattaatgagctttaaatgggaattggggatgatgtatgtctacaaaaaaaaaaaagttggagcggccgccaacttaggggccacgtgagccaggcacngccgcataggcaagcaccggaagcaccccggcggccgc

SEQ ID NO: 407357 - DNA, 1992 bp, Homo sapiens
  misc_feature (1901)..(1901): n is a, c, g, or t
ttagtatgtgtggctatttaaagtataatgactttggtttggttatatgagtgacacagaatttaaggaggcttcatgccatagttcatagtttgctctaatggcttggtggtatccctgaacagtctacttttagaaattaacagtaaatacacaatccagctgtaatcttaccctccaccagggggagcttcaacatcggttaatactttttttttttttgagatggagtctcgccctgtcgcccaggctagagtgcaatggctcagtctccgctcaccgcaatctctgcctcccgggttcaaacagttgtgcctcagtcttccaagtagctgggattacaggcacccgccaccacgcccagctaatttttgtatttttagtagagacggggtttcatcatgttggcgaggctggtcttgaactcctgacttcgtgatccgcccccccctcagcctcccaaagtgctgggattacaggcgtgagccaccgcgcctggcccggttaatactttcataagcattgaagtaactatttaagtcctagtacataaacactgtgtggttcacaaaaaggcatagagacattctctcaagagtttacaatctaattgggcagggaagatactacagttcatcaaagatatgaataacaccctagttttctgaactgcagctgcatgggtaattatcttaagaacttttggcaaaatatggatgttggtgtgttactctcttctccctacaactctgaactaatctgtgtttggcaccttgatttgccatcataaatggccaccatttactcctcactgaaatattcttcttctttgaggttataatgtacttggaaaagttaatacttatagaaaataatgatctttattaccaactttattaaaacaggcttggaacatttttctccatagaagaatagtaataagacattctacatttcctggacatggccagtttaaaatattttgccccattacccttgtagatacacatgtatttgtcagtttatgtgcctcagttttgtcttaggcactgagggacagaaagagaaataaggaataccttggtattttcctttgcaagcaatcacagcagaatgctagaaaacataaaatatactcttataaattgtatgtgtgttgaaaccaaagtgtgaagaaattgtcaggtatttggaggaggaaaataatttgtaaaataacctttttaagaatttggattttgtacttatttaaggtgctaaatatgtgttaaaatatcccctcttgaatcagctccaggcttaaaagggcagagtggtttggattcttgtccagggtctggaaagagctcatcttgccgagagggaaataaatgtgagctttgaggcggtctaactacccagcttttagtatttatgttccccaaaatgtaaaaactgtaagttattcttgaaaatgtagtccagacatttctttgatcctggattttactgcagtttcatcatgggtttgttgaatgtgcagtccatttattgccctgtcttgcttaaatattcttgttgagaacagctggaggctttgactgggttcctagttctgttttctgggaaggcaacgtggattctgttttgtagacattaatgagctttaaatgggaattggggatgatgtatgttcgttgggcatgctgagaagcggcctcctgtggttctgggcccaaggtgtgacatacatttcccactaattgcttctctcaagaagcaagagattggctgttcctcttgaggaaaaaccttaataaaccttcccattttaaaaaaaaaaaaaaaaaaaaaaaaaaaaaaaaaaaaaaaaaaaaaaaataaaaaaaaaaattaaaaatatattatataaaattttaaanaaaatatatattaaaaaaaaaagggggggccccggtcccaattttcccctttataggaagtcgtttttacaattaaatgggccctattttt

SEQ ID NO: 407358 - DNA, 778 bp, Homo sapiens
ccaaagtgtgaagaaattgtcaggtatttggaggaggaaaataatttgtaaaataacctttttaagaatttggattttgtacttatttaaggtgctaaatatgtgttaaaatatcccctcttgaatcagctccaggcttaaaagggcagagtggtttggattcttgtccagggtctggaaagagctcatcttgccgagagggaaataaatgtgagctttgaggcggtctaactacccagcttttagtatttatgttccccaaaatgtaaaaactgtaagttattcttgaaaatgtagtccagacatttctttgatcctggattttactgcagtttcatcatgggtttgttgaatgtgcagtccatttattgccctgtcttgcttaaatattcttgttgagaacagctggaggctttgactgggttcctagttctgttttctgggaaggcaacgtggattctgttttgtagacattaatgagctttaaatgggaattggggatgatgtatgttcgttgggcatgctgagaagcggcctcctgtggttctgggcccaaggtgtgacatacatttcccactaattgcttctctcaagaagcaagagattggctgttcctcttgaggaaaaaccttaataaaccttcccattttaaacagtggtgtgactcttattttgagctgttgttttcaatgaatttttttaaagcttaccatgttcaaatttttgtgctgaatgttgtaggacatgcaaatcagaacaggacatgatccttaggggc

SEQ ID NO: 407359 - DNA, 851 bp, Homo sapiens
aattttaaacaaaatatgtatatactgttatgcataaagaaccttaggtgttcattcgtttgcttctattgatactacattaaatttacttataatcataggttaatagtttaatgaaagcataaaaatttagtatgcctatgtttttctctttctttccagacggattccatttctaggtatgttttatttattttttaactgacatttttttcttatttttatctttgttaaaaatgtgttgctaggaatttatggattttgtaagtttatagaattatttgataataaaaaacaaattttgatggccttatcattgttactagctttctttgttaaaggctttacttcaagatcactagtcagagcaagtaagatttttccccaaatctctacaacaaaggtattccaaagtttcttaagttagttcaactatctcattattaacatcagggactgataaaacccacacttggccagaaatgtatttgattaagtattcagaatcttctcttgtagccctgctttagacaaaagagaaccagtgaagacacttttaaaaaagtgtcatctagctcaacccttaatcctagcacttggggaggctgaggcaggagcatcacttgagtccaggagttgaagaccagcatggacaacatcaagactccatctctaccaaaaaaaaaaaaaatttcttaattatccaggcataactgtatgctcctctatttctagctgctggggaggctgagtcagaaggatcacttgagctcccaggagctcaaggttatagtgagctatggttgtgccactgcactcctcactggatacagtgagaccctgtgtcttta

SEQ ID NO: 407360 - DNA, 4220 bp, Homo sapiens
gcagcagatagggtagaggaaagggtctagaatatgtacacgcagctgactcaggcaggctccatgctgaacggtcacacagagaggaaacaataaatctcagctactatgcaataaatatctcaagttttaacgaagaaaaacatcattgcagtgaaataaaaaattttaaaattttagaacaaagctaacaaatggctagttttctatgattcttcttcaaacgctttctttgagggggaaagagtcaaacaaacaagcagttttacctgaaataaagaactagttttagaggtcagaagaaaggagcaagttttgcgagaggcacggaaggagtgtgctggcagtacaatgacagttttcctttcctttgctttcctcgctgccattctgactcacatagggtgcagcaatcagcgccgaagtccagaaaacagtgggagaagatataaccggattcaacatgggcaatgtgcctacactttcattcttccagaacacgatggcaactgtcgtgagagtacgacagaccagtacaacacaaacgctctgcagagagatgctccacacgtggaaccggatttctcttcccagaaacttcaacatctggaacatgtgatggaaaattatactcagtggctgcaaaaacttgagaattacattgtggaaaacatgaagtcggagatggcccagatacagcagaatgcagttcagaaccacacggctaccatgctggagataggaaccagcctcctctctcagactgcagagcagaccagaaagctgacagatgttgagacccaggtactaaatcaaacttctcgacttgagatacagctgctggagaattcattatccacctacaagctagagaagcaacttcttcaacagacaaatgaaatcttgaagatccatgaaaaaaacagtttattagaacataaaatcttagaaatggaaggaaaacacaaggaagagttggacaccttaaaggaagagaaagagaaccttcaaggcttggttactcgtcaaacatatataatccaggagctggaaaagcaattaaacagagctaccaccaacaacagtgtccttcagaagcagcaactggagctgatggacacagtccacaaccttgtcaatctttgcactaaagaaggttttactaaagggaggaaaaagagaggaagagaaaccatttagagactgtgcagatgtatatcaagctggttttaataaaagtggaatctacactatttatattaataatatgccagaacccaaaaaggtgttttgcaatatggatgtcaatgggggaggttggactgtaatacaacatcgtgaagatggaagtctagatttccaaagaggctggaaggaatataaaatgggttttggaaatccctccggtgaatattggctggggaatgagtttatttttgccattaccagtcagaggcagtacatgctaagaattgagttaatggactgggaagggaaccgagcctattcacagtatgacagattccacataggaaatgaaaagcaaaactataggttgtatttaaaaggtcacactgggacagcaggaaaacagagcagcctgatcttacacggtgctgatttcagcactaaagatgctgataatgacaactgtatgtgcaaatgtgccctcatgttaacaggaggatggtggtttgatgcttgtggcccctccaatctaaatggaatgttctatactgcgggacaaaaccatggaaaactgaatgggataaagtggcactacttcaaagggcccagttactccttacgttccacaactatgatgattcgacctttagatttttgaaagcgcaatgtcagaagcgattatgaaagcaacaaagaaatccggagaagctgccaggtgagaaactgtttgaaaacttcagaagcaaacaatattgtctcccttccagcaataagtggtagttatgtgaagtcaccaaggttcttgaccgtgaatctggagccgtttgagttcacaagagtctctacttggggtgacagtgctcacgtggctcgactatagaaaactccactgactgtcgggctttaaaaagggaagaaactgctgagcttgctgtgcttcaaactactactggaccttattttggaactatggtagccagatgataaatatggttaatttcatgtaaaacagaaaaaaagagtgaaaaagagaatatacatgaagaatagaaacaagcctgccataatcctttggaaaagatgtattataccagtgaaaaggtgttatatctatgcaaacctactaacaaattatactgttgcacaattttgataaaaatttagaacagcattgtcctctgagttggttaaatgttaatggatttcagaagcctaattccagtatcatacttactagttgatttctgcttacccatcttcaaatgaaaattccatttttgtaagccataatgaactgtagtacatggacaataagtgtgtggtagaaacaaactccattactctgatttttgatacagttttcagaaaaagaaatgaacataatcaagtaaggatgtatgtggtgaaaacttaccacccccatactatggttttcatttactctaaaaactgattgaatgatatataaatatatttatagcctgagtaaagttaaaagaatgtaaaatatatcatcaagttcttaaaataatatacatgcatttaatatttcctttgatattatacaggaaagcaatattttggagtatgttaagttgaagtaaaaccaagtactctggagcagttcattttacagtatctacttgcatgtgtatacatacatgtaacttcattattttaaaaatatttttagaactccaatactcaccctgttatgtcttgctaatttaaattttgctaattaactgaaacatgcttaccagattcacactgttccagtgtctataaaagaaacactttgaagtctataaaaaataaaataattataaatatcattgtacatagcatgtttatatctgcaaaaaacctaatagctaattaatctggaatatgcaacattgtccttaattgatgcaaataacacaaatgctcaaagaaatctactatatcccttaatgaaatacatcattcttcatatatttctccttcagtccattcccttaggcaatttttaatttttaaaaattattatcaggggagaaaaattggcaaaactattatatgtaagggatatatatatacaaaaagaaaattaatcatagtcacctgactaagaaattctgactgctagttgccataaataactcaatggaaatattcctatgggataatgtattttaagtgaatttttggggtgcttgaagttactgcattattttatcaagaagtcttctctgcctgtaagtgtccaaggttatgacagtaaacagtttttattaaaacatgagtcactatgggatgagaaaattgaaataaagctactgggcctcctctcataaaagagacagttgttggcaaggtagcaataccagtttcaaacttggtgacttgatccactatgccttaatggtttcctccatttgagaaaataaagctattcacattgttaagaaaaatactttttaaagtttaccatcaagtcttttttatatttatgtgtctgtattctacccctttttgccttacaagtgatatttgcaggtattataccatttttctattcttggtggcttcttcatagcaggtaagcctctccttctaaaaacttctcaactgttttcatttaagggaaagaaaatgagtattttgtccttttgtgttcctacagacactttcttaaaccagtttttggataaagaatactatttccaaactcatattacaaaaacaaaataaaataataaaaaaagaaagcatgatatttactgttttgttgtctgggtttgagaaatgaaatattgtttccaattatttataataaatcagtataaaatgttttatgattgttatgtgtattatgtaatacgtacatgtttatggcaatttaacatgtgtattcttttaattgtttcagaataggataattaggtattcgaattttgtctttaaaattcatgtggtttctatgcaaagttcttcatatcatcacaacattatttgatttaaataaaattgaaagtaatatttgtgca

SEQ ID NO: 407361 - DNA, 1026 bp, Homo sapiens
gcagcagatagggtagaggaaagggtctagaatatgtacacgcagctgactcaggcaggctccatgctgaacggtcacacagagaggaaacaataaatctcagctactatgcaataaatatctcaagttttaacgaagaaaaacatcattgcagtgaaataaaaaattttaaaattttagaacaaagctaacaaatggctagttttctatgattcttcttcaaacgctttctttgagggggaaagagtcaaacaaacaagcagttttacctgaaataaagaactagttttagaggtcagaagaaaggagcaagttttgcgagaggcacggaaggagtgtgctggcagtacaatgacagttttcctttcctttgctttcctcgctgccattctgactcacatagggtgcagcaatcagcgccgaagtccagaaaacagtgggagaagatataaccggattcaacatgggcaatgtgcctacactttcattcttccagaacacgatggcaactgtcgtgagagtacgacagaccagtacaacacaaacgctctgcagagagatgctccacacgtggaaccggatttctcttcccagaaacttcaacatctggaacatgtgatggaaaattatactcagtggctgcaaaaagacccagcaggactcttggctagatgcccgataaaagttaattggaagttcttggatttctgattgatgtctctcctcagacactgatgtgtgaacagattgcctacaatgtaaaatagaatttggatcatccaattttagctgaccactgaccacatataatttttgaactaaaaattataactcttgaaggaattctaggaacctaggagcatttccaagggacaaaaataatgagtggttttgtttcactgagaatgagggataggacctcgtgcttctagactgctgagctcatttgcatgttcagccacattcttcattggctgaccaactgacataaacagaagaaggctgatctattaccttgacatataa

SEQ ID NO: 407362 - DNA, 3925 bp, Homo sapiens
gcagcagatagggtagaggaaagggtctagaatatgtacacgcagctgactcaggcaggctccatgctgaacggtcacacagagaggaaacaataaatctcagctactatgcaataaatatctcaagttttaacgaagaaaaacatcattgcagtgaaataaaaaattttaaaattttagaacaaagctaacaaatggctagttttctatgattcttcttcaaacgctttctttgagggggaaagagtcaaacaaacaagcagttttacctgaaataaagaactagttttagaggtcagaagaaaggagcaagttttgcgagaggcacggaaggagtgtgctggcagtacaatgacagttttcctttcctttgctttcctcgctgccattctgactcacatagggtgcagcaatcagcgccgaagtccagaaaacagtgggagaagatataaccggattcaacatgggcaatgtgcctacactttcattcttccagaacacgatggcaactgtcgtgagagtacgacagaccagtacaacacaaacgctctgcagagagatgctccacacgtggaaccggatttctcttcccagaaacttcaacatctggaacatgtgatggaaaattatactcagtggctgcaaaaacttgagaattacattgtggaaaacatgaagtcggagatggcccagatacagcagaatgcagttcagaaccacacggctaccatgctggagataggaaccagcctcctctctcagactgcagagcagaccagaaagctgacagatgttgagacccaggtactaaatcaaacttctcgacttgagatacagctgctggagaattcattatccacctacaagctagagaagcaacttcttcaacagacaaatgaaatcttgaagatccatgaaaaaaacagtttattagaacataaaatcttagaaatggaaggaaaacacaaggaagagttggacaccttaaaggaagagaaagagaaccttcaaggcttggttactcgtcaaacatatataatccaggagctggaaaagcaattaaacagagctaccaccaacaacagtgtccttcagaagcagcaactggagctgatggacacagtccacaaccttgtcaatctttgcactaaagaagggtgttttgcaatatggatgtcaatgggggaggttggactgtaatacaacatcgtgaagatggaagtctagatttccaaagaggctggaaggaatataaaatggttgtatttaaaaggtcacactgggacagcaggaaaacagagcagcctgatcttacacggtgctgatttcagcactaaagatgctgataatgacaactgtatgtgcaaatgtgccctcatgttaacaggaggatggtggtttgatgcttgtggcccctccaatctaaatggaatgttctatactgcgggacaaaaccatggaaaactgaatgggataaagtggcactacttcaaagggcccagttactccttacgttccacaactatgatgattcgacctttagatttttgaaagcgcaatgtcagaagcgattatgaaagcaacaaagaaatccggagaagctgccaggtgagaaactgtttgaaaacttcagaagcaaacaatattgtctcccttccagcaataagtggtagttatgtgaagtcaccaaggttcttgaccgtgaatctggagccgtttgagttcacaagagtctctacttggggtgacagtgctcacgtggctcgactatagaaaactccactgactgtcgggctttaaaaagggaagaaactgctgagcttgctgtgcttcaaactactactggaccttattttggaactatggtagccagatgataaatatggttaatttcatgtaaaacagaaaaaaagagtgaaaaagagaatatacatgaagaatagaaacaagcctgccataatcctttggaaaagatgtattataccagtgaaaaggtgttatatctatgcaaacctactaacaaattatactgttgcacaattttgataaaaatttagaacagcattgtcctctgagttggttaaatgttaatggatttcagaagcctaattccagtatcatacttactagttgatttctgcttacccatcttcaaatgaaaattccatttttgtaagccataatgaactgtagtacatggacaataagtgtgtggtagaaacaaactccattactctgatttttgatacagttttcagaaaaagaaatgaacataatcaagtaaggatgtatgtggtgaaaacttaccacccccatactatggttttcatttactctaaaaactgattgaatgatatataaatatatttatagcctgagtaaagttaaaagaatgtaaaatatatcatcaagttcttaaaataatatacatgcatttaatatttcctttgatattatacaggaaagcaatattttggagtatgttaagttgaagtaaaaccaagtactctggagcagttcattttacagtatctacttgcatgtgtatacatacatgtaacttcattattttaaaaatatttttagaactccaatactcaccctgttatgtcttgctaatttaaattttgctaattaactgaaacatgcttaccagattcacactgttccagtgtctataaaagaaacactttgaagtctataaaaaataaaataattataaatatcattgtacatagcatgtttatatctgcaaaaaacctaatagctaattaatctggaatatgcaacattgtccttaattgatgcaaataacacaaatgctcaaagaaatctactatatcccttaatgaaatacatcattcttcatatatttctccttcagtccattcccttaggcaatttttaatttttaaaaattattatcaggggagaaaaattggcaaaactattatatgtaagggatatatatatacaaaaagaaaattaatcatagtcacctgactaagaaattctgactgctagttgccataaataactcaatggaaatattcctatgggataatgtattttaagtgaatttttggggtgcttgaagttactgcattattttatcaagaagtcttctctgcctgtaagtgtccaaggttatgacagtaaacagtttttattaaaacatgagtcactatgggatgagaaaattgaaataaagctactgggcctcctctcataaaagagacagttgttggcaaggtagcaataccagtttcaaacttggtgacttgatccactatgccttaatggtttcctccatttgagaaaataaagctattcacattgttaagaaaaatactttttaaagtttaccatcaagtcttttttatatttatgtgtctgtattctacccctttttgccttacaagtgatatttgcaggtattataccatttttctattcttggtggcttcttcatagcaggtaagcctctccttctaaaaacttctcaactgttttcatttaagggaaagaaaatgagtattttgtccttttgtgttcctacagacactttcttaaaccagtttttggataaagaatactatttccaaactcatattacaaaaacaaaataaaataataaaaaaagaaagcatgatatttactgttttgttgtctgggtttgagaaatgaaatattgtttccaattatttataataaatcagtataaaatgttttatgattgttatgtgtattatgtaatacgtacatgtttatggcaatttaacatgtgtattcttttaattgtttcagaataggataattaggtattcgaattttgtctttaaaattcatgtggtttctatgcaaagttcttcatatcatcacaacattatttgatttaaataaaattgaaagtaatatttgtgca

SEQ ID NO: 407363 - DNA, 2205 bp, Homo sapiens
gcagcagatagggtagaggaaagggtctagaatatgtacacgcagctgactcaggcaggctccatgctgaacggtcacacagagaggaaacaataaatctcagctactatgcaataaatatctcaagttttaacgaagaaaaacatcattgcagtgaaataaaaaattttaaaattttagaacaaagctaacaaatggctagttttctatgattcttcttcaaacgctttctttgagggggaaagagtcaaacaaacaagcagttttacctgaaataaagaactagttttagaggtcagaagaaaggagcaagttttgcgagaggcacggaaggagtgtgctggcagtacaatgacagttttcctttcctttgctttcctcgctgccattctgactcacatagggtgcagcaatcagcgccgaagtccagaaaacagtgggagaagatataaccggattcaacatgggcaatgtgcctacactttcattcttccagaacacgatggcaactgtcgtgagagtacgacagaccagtacaacacaaacgctctgcagagagatgctccacacgtggaaccggatttctcttcccagaaacttcaacatctggaacatgtgatggaaaattatactcagtggctgcaaaaacttgagaattacattgtggaaaacatgaagtcggagatggcccagatacagcagaatgcagttcagaaccacacggctaccatgctggagataggaaccagcctcctctctcagactgcagagcagaccagaaagctgacagatgttgagacccaggtactaaatcaaacttctcgacttgagatacagctgctggagaattcattatccacctacaagctagagaagcaacttcttcaacagacaaatgaaatcttgaagatccatgaaaaaaacagtttattagaacataaaatcttagaaatggaaggaaaacacaaggaagagttggacaccttaaaggaagagaaagagaaccttcaaggcttggttactcgtcaaacatatataatccaggagctggaaaagcaattaaacagagctaccaccaacaacagtgtccttcagaagcagcaactggagctgatggacacagtccacaaccttgtcaatctttgcactaaagaaggttttactaaagggaggaaaaagagaggaagagaaaccatttagagactgtgcagatgtatatcaagctggttttaataaaagtggaatctacactatttatattaataatatgccagaacccaaaaaggtgttttgcaatatggatgtcaatgggggaggttggactgtaatacaacatcgtgaagatggaagtctagatttccaaagaggctggaaggaatataaaatgggttttggaaatccctccggtgaatattggctggggaatgagtttatttttgccattaccagtcagaggcagtacatgctaagaattgagttaatggactgggaagggaaccgagcctattcacagtatgacagattccacataggaaatgaaaagcaaaactataggtaagtcatgctacagtgtagtgttcgactaccttttacctagccacttaataattgtagtgggaaaatatgaaaaaaagaaatgaaaatcatccttcaaaatgaaaattcttttttttttggtctagacctattacaaagaggtacaaaaaagcctgtaaagactttttcaaagatttaaatttcagttttcgtaggttgactatctttgatattggcttaaattttagggaatggtgaatgaagtcaagcatactgttgttctgtggttatcatgcagttgcagtgaattcatatatataaaactgataagtttcatactcaaactcattggcttaaataatctctttattctaaaaaaagattttctggttctactttttttgatgacctttcttgaattagcatttttcaaatgatcttgaagatgacaaaagtaaaatttttttatgtttgaatgatttacataaaagagaagatgaggcatgatttagagggttttcttggtaaatctaaaaagcaaaaataaattgtaataatggcatcaatatacataatacatgattgcagatgtaaaaatagataaactatacacttaatgatacatgtttccaattatcctttttcaatgagaagctcgtctactaggga

SEQ ID NO: 407364 - DNA, 2201 bp, Homo sapiens
gcagcagatagggtagaggaaagggtctagaatatgtacacgcagctgactcaggcaggctccatgctgaacggtcacacagagaggaaacaataaatctcagctactatgcaataaatatctcaagttttaacgaagaaaaacatcattgcagtgaaataaaaaattttaaaattttagaacaaagctaacaaatggctagttttctatgattcttcttcaaacgctttctttgagggggaaagagtcaaacaaacaagcagttttacctgaaataaagaactagttttagaggtcagaagaaaggagcaagttttgcgagaggcacggaaggagtgtgctggcagtacaatgacagttttcctttcctttgctttcctcgctgccattctgactcacatagggtgcagcaatcagcgccgaagtccagaaaacagtgggagaagatataaccggattcaacatgggcaatgtgcctacactttcattcttccagaacacgatggcaactgtcgtgagagtacgacagaccagtacaacacaaacgctctgcagagagatgctccacacgtggaaccggatttctcttcccagaaacttcaacatctggaacatgtgatggaaaattatactcagtggctgcaaaaacttgagaattacattgtggaaaacatgaagtcggagatggcccagatacagcagaatgcagttcagaaccacacggctaccatgctggagataggaaccagcctcctctctcagactgcagagcagaccagaaagctgacagatgttgagacccaggtactaaatcaaacttctcgacttgagatacagctgctggagaattcattatccacctacaagctagagaagcaacttcttcaacagacaaatgaaatcttgaagatccatgaaaaaaacagtttattagaacataaaatcttagaaatggaaggaaaacacaaggaagagttggacaccttaaaggaagagaaagagaaccttcaaggcttggttactcgtcaaacatatataatccaggagctggaaaagcaattaaacagagctaccaccaacaacagtgtccttcagaagcagcaactggagctgatggacacagtccacaaccttgtcaatctttgcactaaagaaggttttactaaagggaggaaaaagagaggaagagaaaccatttagagactgtgcagatgtatatcaagctggttttaataaaagtggaatctacactatttatattaataatatgccagaacccaaaaaggtgttttgcaatatggatgtcaatgggggaggttggactgtaatacaacatcgtgaagatggaagtctagatttccaaagaggctggaaggaatataaaatgggttttggaaatccctccggtgaatattggctggggaatgagtttatttttgccattaccagtcagaggcagtacatgctaagaattgagttaatggactgggaagggaaccgagcctattcacagtatgacagattccacataggaaatgaaaagcaaaactataggttgtatttaaaaggtcacactgggacagcaggaaaacagagcagcctgatcttacacggtgctgatttcagcactaaagatgctgataatgacaactgtatgtgcaaatgtgccctcatgttaacaggaggatggtggtttgatgcttgtggcccctccaatctaaatggaatgttctatactgcgggacaaaaccatggaaaactgaatgggataaagtggcactacttcaaagggcccagttactccttacgttccacaactatgatgattcgacctttagatttttgaaagcgcaatgtcagaagcgattatgaaagcaacaaagaaatccggagaagctgccaggtgagaaactgtttgaaaacttcagaagcaaacaatattgtctcccttccagcaataagtggtagttatgtgaagtcaccaaggttcttgaccgtgaatctggagccgtttgagttcacaagagtctctacttggggtgacagtgctcacgtggctcgactatagaaaactccactgactgtcgggctttaaaaagggaagaaactgctgagcttgctgtgcttcaaactactactggaccttattttggaactatggtagccagatgataaatatggttaatttcatgtaaaacaga

SEQ ID NO: 407365 - DNA, 3989 bp, Homo sapiens
gcagcagatagggtagaggaaagggtctagaatatgtacacgcagctgactcaggcaggctccatgctgaacggtcacacagagaggaaacaataaatctcagctactatgcaataaatatctcaagttttaacgaagaaaaacatcattgcagtgaaataaaaaattttaaaattttagaacaaagctaacaaatggctagttttctatgattcttcttcaaacgctttctttgagggggaaagagtcaaacaaacaagcagttttacctgaaataaagaactagttttagaggtcagaagaaaggagcaagttttgcgagaggcacggaaggagtgtgctggcagtacaatgacagttttcctttcctttgctttcctcgctgccattctgactcacatagggtgcagcaatcagcgccgaagtccagaaaacagtgggagaagatataaccggattcaacatgggcaatgtgcctacactttcattcttccagaacacgatggcaactgtcgtgagagtacgacagaccagtacaacacaaacgctctgcagagagatgctccacacgtggaaccggatttctcttcccagaaacttcaacatctggaacatgtgatggaaaattatactcagtggctgcaaaaacttgagaattacattgtggaaaacatgaagtcggagatggcccagatacagcagaatgcagttcagaaccacacggctaccatgctggagataggaaccagcctcctctctcagactgcagagcagaccagaaagctgacagatgttgagacccaggtactaaatcaaacttctcgacttgagatacagctgctggagaattcattatccacctacaagctagagaagcaacttcttcaacagacaaatgaaatcttgaagatccatgaaaaaaacagttttactaaagggaggaaaaagagaggaagagaaaccatttagagactgtgcagatgtatatcaagctggttttaataaaagtggaatctacactatttatattaataatatgccagaacccaaaaaggtgttttgcaatatggatgtcaatgggggaggttggactgtaatacaacatcgtgaagatggaagtctagatttccaaagaggctggaaggaatataaaatgggttttggaaatccctccggtgaatattggctggggaatgagtttatttttgccattaccagtcagaggcagtacatgctaagaattgagttaatggactgggaagggaaccgagcctattcacagtatgacagattccacataggaaatgaaaagcaaaactataggttgtatttaaaaggtcacactgggacagcaggaaaacagagcagcctgatcttacacggtgctgatttcagcactaaagatgctgataatgacaactgtatgtgcaaatgtgccctcatgttaacaggaggatggtggtttgatgcttgtggcccctccaatctaaatggaatgttctatactgcgggacaaaaccatggaaaactgaatgggataaagtggcactacttcaaagggcccagttactccttacgttccacaactatgatgattcgacctttagatttttgaaagcgcaatgtcagaagcgattatgaaagcaacaaagaaatccggagaagctgccaggtgagaaactgtttgaaaacttcagaagcaaacaatattgtctcccttccagcaataagtggtagttatgtgaagtcaccaaggttcttgaccgtgaatctggagccgtttgagttcacaagagtctctacttggggtgacagtgctcacgtggctcgactatagaaaactccactgactgtcgggctttaaaaagggaagaaactgctgagcttgctgtgcttcaaactactactggaccttattttggaactatggtagccagatgataaatatggttaatttcatgtaaaacagaaaaaaagagtgaaaaagagaatatacatgaagaatagaaacaagcctgccataatcctttggaaaagatgtattataccagtgaaaaggtgttatatctatgcaaacctactaacaaattatactgttgcacaattttgataaaaatttagaacagcattgtcctctgagttggttaaatgttaatggatttcagaagcctaattccagtatcatacttactagttgatttctgcttacccatcttcaaatgaaaattccatttttgtaagccataatgaactgtagtacatggacaataagtgtgtggtagaaacaaactccattactctgatttttgatacagttttcagaaaaagaaatgaacataatcaagtaaggatgtatgtggtgaaaacttaccacccccatactatggttttcatttactctaaaaactgattgaatgatatataaatatatttatagcctgagtaaagttaaaagaatgtaaaatatatcatcaagttcttaaaataatatacatgcatttaatatttcctttgatattatacaggaaagcaatattttggagtatgttaagttgaagtaaaaccaagtactctggagcagttcattttacagtatctacttgcatgtgtatacatacatgtaacttcattattttaaaaatatttttagaactccaatactcaccctgttatgtcttgctaatttaaattttgctaattaactgaaacatgcttaccagattcacactgttccagtgtctataaaagaaacactttgaagtctataaaaaataaaataattataaatatcattgtacatagcatgtttatatctgcaaaaaacctaatagctaattaatctggaatatgcaacattgtccttaattgatgcaaataacacaaatgctcaaagaaatctactatatcccttaatgaaatacatcattcttcatatatttctccttcagtccattcccttaggcaatttttaatttttaaaaattattatcaggggagaaaaattggcaaaactattatatgtaagggatatatatatacaaaaagaaaattaatcatagtcacctgactaagaaattctgactgctagttgccataaataactcaatggaaatattcctatgggataatgtattttaagtgaatttttggggtgcttgaagttactgcattattttatcaagaagtcttctctgcctgtaagtgtccaaggttatgacagtaaacagtttttattaaaacatgagtcactatgggatgagaaaattgaaataaagctactgggcctcctctcataaaagagacagttgttggcaaggtagcaataccagtttcaaacttggtgacttgatccactatgccttaatggtttcctccatttgagaaaataaagctattcacattgttaagaaaaatactttttaaagtttaccatcaagtcttttttatatttatgtgtctgtattctacccctttttgccttacaagtgatatttgcaggtattataccatttttctattcttggtggcttcttcatagcaggtaagcctctccttctaaaaacttctcaactgttttcatttaagggaaagaaaatgagtattttgtccttttgtgttcctacagacactttcttaaaccagtttttggataaagaatactatttccaaactcatattacaaaaacaaaataaaataataaaaaaagaaagcatgatatttactgttttgttgtctgggtttgagaaatgaaatattgtttccaattatttataataaatcagtataaaatgttttatgattgttatgtgtattatgtaatacgtacatgtttatggcaatttaacatgtgtattcttttaattgtttcagaataggataattaggtattcgaattttgtctttaaaattcatgtggtttctatgcaaagttcttcatatcatcacaacattatttgatttaaataaaattgaaagtaatatttgtgca

SEQ ID NO: 407366 - DNA, 2673 bp, Homo sapiens
  misc_feature (782)..(782): n is a, c, g, or t
  misc_feature (1081)..(1081): n is a, c, g, or t
  misc_feature (1182)..(1182): n is a, c, g, or t
  misc_feature (1247)..(1247): n is a, c, g, or t
  misc_feature (1864)..(1865): n is a, c, g, or t
  misc_feature (1872)..(1872): n is a, c, g, or t
  misc_feature (1881)..(1881): n is a, c, g, or t
  misc_feature (1890)..(1890): n is a, c, g, or t
  misc_feature (1892)..(1892): n is a, c, g, or t
  misc_feature (1910)..(1910): n is a, c, g, or t
  misc_feature (1916)..(1917): n is a, c, g, or t
  misc_feature (1919)..(1919): n is a, c, g, or t
  misc_feature (1924)..(1925): n is a, c, g, or t
  misc_feature (1931)..(1931): n is a, c, g, or t
  misc_feature (1935)..(1935): n is a, c, g, or t
caggattgttttggcttctccctttcattttcatatgaattttaggatcagtttgtcaatttctgtaaaaaagccagctgggactttgcaagggattgtgttgaatttgtagattaatttgggaactattgtcatgtatattagtttcctactgctgctgtaacaaactcacagactgggtgtttaaaacaatacaagtttattatcttacagttctgggagtcagaataccaaaatgtgccttatatggctaaaataaaggtgtcagcagggctgtacttctggaggctgcaggggagtattcattttcttgtctttgaagcttctagaggcagcctgtatttcctgactcacagccccttcctccatctgcaaagtatatcattccaacctctgctttctttgtcgcatttccttcttctgcctttgacctttttgtctccttcataaggattcttgtgattacattaggtccatgtagataacccaagataatcttcataactttatcacatctaccagttccttttgccaggtaaggtaacatattcacaggttctggagattagacatagaattcttttggggaccattattctatttactgcattatcttaacaatattaaatcttccaatccatgcacatgggatgtcttttcatttaagtctcctttaatttatttcaatgatgttttgcagttttcaatgtacaagtcttacatttaatttgttaaatttactccaaaatattttattattttttgtgcttttgtaaatgganttgttttcttaattttatttttggattgctcattgctagtgtagagaaatacaaatgattttttgcatattgatctcaagaaatcttgttaaactcggagtttctttttggaatgatgaaaatattctgaattagatcgtagtgatggttatgcaacagtgaatatcctaaaaaatcacagaattgtatactttaaaggggcgaattttatggtctatgaattgtatctcaataaagtcattattaacaaacaaactataccatttgggaatggccatcaaaaattaaaatgtgaattnttctctcaaaatgaggttggaggggtgtgagaggaaagttggggaccagaagtgcccatgttttgatacattctcttattacttccagatgggaactctanaagttgcatatcctgattttgtatgtttggtggaagaacttctcttcatagctcttttgttcctngacacaccaaactcctgaatggcagagggctttggcttttgttctctacctgagtcattctctccccagatccttacatggcaggctccttcttgccattcaggtcttggttatgagaggacttccctgccaatcaaatctaatctaaagcagcttctccaatgcaatcgttctttatcataccactgtgttttttctgtcaggaactggaatgattttctttattaattgcttacttgcttgtatatttcttccctgtaaaatgtaagctctatcacagcagggatctatactgtttcattcactataatatatctccaacttctaggatatagctggcacatagaagatgatcactaaatttttattgaatgaatgacgcatatcattaaggagaaaagttggccaggcgcagtggctcacgcctgtaatcccagcacttttggaggccaaggtgggtggatcacctgaggtcaggaattcaagaccagtctgaccaatatggtgaaaccctgtctctactaaaaatacaaaaattagccagtcatggtggcacgtgcctgtagtcccagctacgggggaggctgcgacaggagaattgcttgaacccaggaggnngaggttncagtgagcngagatcgtncnactgcactccagcctggntgacanngngagannctgtcncaanaaataataataatttttcataaaaagaaaataagttctcaccgagaccaatacaatgaaacactatccatccactctcagagtgaccaggcaaattacatgatctctcagcatctcccttttatcatctttaaaatggtgataataatattatcaacctcctagggttgttgaaaatttaaaagactaaattcctggaaagaatttaaaagactgtcctacacagtaagtctgcaataaacatcagtcagtagtaatagaggtagtactggtagcagcagcagtagcagctgcagcagcaaagctctatgctgtaactatggccaattctgttctaagtcaaaaagagtcaggcaaattgcacacaacatcttcacatggcactgttactgtgctcgaaagatttgatctctcatacttaacagtctgaaggtaacctgtttctttgatttgaagttggttgaaaagcatagatggtattgatgacatgttacatacttatgggtcagcccaagaaagaccagggaacacctaatttccctaaataagaagaaatttatgaggggatctccaagcctagtaacagtgccagggagcatgcattctgagggccaaagtctgcattttgaaggccaagatctgtgtgctaagcgccctgggaacagcttaggctgccaaaaatgctgcgttagccagaagccttgctgtccagctgagccagctcttggctaaaccacca

SEQ ID NO: 407367 - DNA, 1759 bp, Homo sapiens
  misc_feature (782)..(782): n is a, c, g, or t
  misc_feature (1081)..(1081): n is a, c, g, or t
  misc_feature (1182)..(1182): n is a, c, g, or t
  misc_feature (1247)..(1247): n is a, c, g, or t
caggattgttttggcttctccctttcattttcatatgaattttaggatcagtttgtcaatttctgtaaaaaagccagctgggactttgcaagggattgtgttgaatttgtagattaatttgggaactattgtcatgtatattagtttcctactgctgctgtaacaaactcacagactgggtgtttaaaacaatacaagtttattatcttacagttctgggagtcagaataccaaaatgtgccttatatggctaaaataaaggtgtcagcagggctgtacttctggaggctgcaggggagtattcattttcttgtctttgaagcttctagaggcagcctgtatttcctgactcacagccccttcctccatctgcaaagtatatcattccaacctctgctttctttgtcgcatttccttcttctgcctttgacctttttgtctccttcataaggattcttgtgattacattaggtccatgtagataacccaagataatcttcataactttatcacatctaccagttccttttgccaggtaaggtaacatattcacaggttctggagattagacatagaattcttttggggaccattattctatttactgcattatcttaacaatattaaatcttccaatccatgcacatgggatgtcttttcatttaagtctcctttaatttatttcaatgatgttttgcagttttcaatgtacaagtcttacatttaatttgttaaatttactccaaaatattttattattttttgtgcttttgtaaatgganttgttttcttaattttatttttggattgctcattgctagtgtagagaaatacaaatgattttttgcatattgatctcaagaaatcttgttaaactcggagtttctttttggaatgatgaaaatattctgaattagatcgtagtgatggttatgcaacagtgaatatcctaaaaaatcacagaattgtatactttaaaggggcgaattttatggtctatgaattgtatctcaataaagtcattattaacaaacaaactataccatttgggaatggccatcaaaaattaaaatgtgaattnttctctcaaaatgaggttggaggggtgtgagaggaaagttggggaccagaagtgcccatgttttgatacattctcttattacttccagatgggaactctanaagttgcatatcctgattttgtatgtttggtggaagaacttctcttcatagctcttttgttcctngacacaccaaactcctgaatggcagagggctttggcttttgttctctacctgagtcattctctccccagatccttacatggcaggctccttcttgccattcaggtcttggttatgagaggacttccctgccaatcaaatctaatctaaagcagcttctccaatgcaatcgttctttatcataccactgtgttttttctgtcaggaactggaatgattttctttattaattgcttacttgcttgtatatttcttccctgtaaaatgtaagctctatcacagcagggatctatactgtttcattcactataatatatctccaacttctaggatatagctggcacatagaagatgatcactaaatttttattgaatgaatgacgcatatcattaaggagaaaagttggccaggcgcagtggctcacgcctgtaatcccagcacttttggaggccaagcattattgtggtaatagataacgaatacaagaatcaaagggaaggatgagtattctgg

SEQ ID NO: 407368 - DNA, 958 bp, Homo sapiens
aaatgaagtttaataatatattttatttaacccaatgtacactattaaaaaataacccaatattttcaacatttaatcaatgtaaaaatggagatattacatgtgtgtatatataatacataaaattaataatataggaataatgaataatatatattatatgtaaaatatgtattttttataccaagtttttaaaatctgaggaatatttcacacttacagcacatgttaatttggactaatcacacatttcaagtgctcagtagacatagtggatagtgaagacctaaagtacctttttttctttgtttttaattgtagacagagtcttatttcagaggtgggtactatgaaatcacagactgttggcagatgtttgagtacaatgactttaatttcactcttgactaatgctaatgtcattttcattcccaggaagcctgtcttgctacagtttggtggagggtcaagaaagatgattcagaagtatgtcttttaagagtcttggtgacacgcacagagcccagtgactttagtctgggtgtggtgagctgacctcagagtctattgtgtgagtgtttttcacttttgagtttgttttacttttgtggtctccccagccttatttgtgagtgcaatctaaggaaagtatatttgttttgcaagcacactatggtttgctcagatttttaaatgacatatgtaggattacaccctctttattctgtcagtgtttccattaaaaattcaaactttctgggatttattacacagccataacaaattgctccaggcagaaacttggcaaaccctctttagtgtgggagaaaaattcttttcatcattttagaaaagataaaaataaataaatgtttaccaactcaacttactcatgtgattttgtgatagggaagacattcaattaaaatacacattatatcttcacatttgtttgtcg

SEQ ID NO: 407369 - DNA, 744 bp, Homo sapiens
tcttcttcaccccaaccccacccacatgctggaagactacttctgaagagggaagctgctggtgcatcgggcgcccagcagagggagctgaggagggccgaggaggacgccgacaccagctgacgccccgtgcaggagtgtaatgtacttgtgctctctgaggcctggagccagaagccagatgtttttctgggatgacgaggaggcggttctagaactctgaagcctgtcttgctacagtttggtggagggtcaagaaagatgattcagaagtatgtcttttaagagtcttggtgacacgcacagagcccagtgactttagtctgggtgtggtgagctgacctcagagtctattgtgtgagtgtttttcacttttgagtttgttttacttttgtggtctccccagccttatttgtgagtgcaatctaaggaaagtatatttgttttgcaagcacactatggtttgctcagatttttaaatgacatatgtaggattacaccctctttattctgtcagtgtttccattaaaaattcaaactttctgggatttattacacagccataacaaattgctccaggcagaaacttggcaaaccctctttagtgtgggagaaaaattcttttcatcattttagaaaagataaaaataaataaatgtttaccaactcaacttactcatgtgattttgtgatagggaagacattcaattaaaatacacattatatcttcacatttgtttgtcg

SEQ ID NO: 407370 - DNA, 302 bp, Homo sapiens
cttcacaggaggccctgttttgagaggtgcatgaacatgtggctcacgttcaacaacaaacactcaggagaggggacagaatgttcaggacacaccgaatttccaagacgtacagatctctccaagcatcccaaaaggcgtatgttcctggtggggccgagggcctgctcttggagacagatggcgagcagcggtcagcagctactgagagctcaacttcccctctagagacaggctctgccgctcaagtccacctgggtcttggctctctgaatcctgtccgagggtggcgaacttgaggc

SEQ ID NO: 407371 - DNA, 287 bp, Homo sapiens
agaacatacaaatcccttgacttctaatgtagttattttacaacatcctttattagggaatatgtatttaagcagcttgattcatcagcccaaaagtcataaattgtacccattccaacacaaatccctgattgtggtgtcagtgaaggtagagttttctttgtctttttgtttcctaatgcatcctcaggactaaacatttcatagcatatttctggacttctgccttgagcttcctatttgaaatttgctctgtcattctttctctgtgttgactctgtagggtt

SEQ ID NO: 407372 - DNA, 395 bp, Homo sapiens
cgcaggcaaatgtgtgtgtgtgtgggggggggaatagctagccttaaacaaaaatgtgcatgtgtaaatatgttgtgtatgtatgtatttgcaggaatactatcagaataaagtttacagaggttggggttggcatatgatatgaagttttatataagaaacctcattactctaagttataaaatgcagaacttagtatttaaaatactgaataagccttcaataagattggagaaaaaagttatatggttttctccttgctttagtctgcgagtatgtgtttcttttagtctcatatttttcaaaatcattacccagtttgtagtcaattaagtgtttcctggttaaatgaagttgttttataattgtatatgtttttgcatctcctttaaacc

SEQ ID NO: 407373 - DNA, 382 bp, Homo sapiens
tctggcttcaagcagtcctctgccttggtatcccaaagtgttggaattacagacctgagcggccacgcctgggcgtgaaagtcttaagaaatgaaaaattatgagacataaagaataaatgaaaggaagttatgtttcaaacatggtagtaaggatggagtagagggaaagggtcaagttagatgtgaagagacgagagtaagaagcttgaaaagagcacatacgtattgttacatgtgctgacaacagcaatcatacccagtgcttattaactgctgtgggcaaggcatgcactgctgtcttgacatttattttgtcacctaatttcacagtaatcttatgaaacagaggcccttgttttctgcagctcacgggaggaagg

SEQ ID NO: 407374 - DNA, 760 bp, Homo sapiens
gctggatgacagatcgtcagtgcagaatgagacacgaggtgcctgtgtttattcatgcaggaggagtgtttgcagaagtgccgggaacaagaggtggtggagcaaagcatctctttcctggtttccttctgctctgaactcaagtagtacccaccccctattcttcccctcttttgagtctgtttcactgagggcacggctggtaggagtaacgttgtccagcattaaaacagagcatcagtaatgtctaggaaaatgttaactttaacaacaccactaatcagtttagagaatatttgagcgtgtagcacttgctgatcattcattcagaaaatgaattgcctgccataaactaataagcatgatttggtttatgttttgatttaattatctctgagtagatgctgcttgaagtaatgactgtaatcacttttgccaagcataccccccgtttataatttaagaaaaaaaatttttttttttttgagatggggccttgttatgttggccaggctggtcttgaactcctggcctcaagcagtcctccccacctggtgtctcaaagcactgggattacaggcatgggccaacatactgaacataatgattcaaacatagaaaaaaaagtctcctggtagttcagttcccccatgccccaggagtttagtacaggggtgtccagtcttttggcttccctgggccacattcccttgggccacacataaaatacactaacactaacaatagttgatgagctaaa

SEQ ID NO: 407375 - DNA, 336 bp, Homo sapiens
gaggggaaactgaggcttggaaaaggcacatggtcccatgtagcgtcactgtggctcttcggactcttccaggtccctctgcctgtcctgggcctgccattgttccacctccaggtctgcccactgcctgcacctctcctccccgtctcaccttgccctgcactgcagctgccacgacctccagcagccctttagaccaacgtcctaaagcgataatgccatgatgttcctggctttttcaaaacccttttcctagagtgtgttaaccagaatggcagtcccacgaggatctctgtgatgaaagggcttcatggtcaaatagtttgggaaacgtgg

SEQ ID NO: 407376 - DNA, 2777 bp, Homo sapiens
  misc_feature (1315)..(1315): n is a, c, g, or t
  misc_feature (1458)..(1458): n is a, c, g, or t
  misc_feature (1516)..(1516): n is a, c, g, or t
tttatgcatcatggtttgatatatgcttgaaatatttactaaattagatattgctgcatgtggtccatcccacatataaatggaaaagagaaacttaacatagttcataaattaaaatatttggtttcagctgtattcatattgaaaccataaaagaatcagaattactgtgggtttatgattgtcaggttaccaccatcactacaaattttctgataacaacatattagtattctgataaggtttgtggcttctttgcaaggatatttgaatactactcaacacactacataatggttaactattgttgtctttattttaaggaaggcatgaatattgttagatttgcccctaagtaattgagtgatcatttttatatacaagaaaatcagagtagaatgcaaaatttggaacaggaactcaataatacttataaataagttgattcaaagaaatgtttcaatttcttgacattgaattcatgatgttttgcttttaacatgtgatttttaaaaaatactgttatgtgtacaggggaaggctaacctgagactttcccttcatgcgtattcttcctgtgcactgcaaaaggaaactgtgtgactgctttccttcctgactggccatcacatagggttactggcagatgccaggaatccaaggactaaaggaataaagggtgtgtgttatagtacctgcgctaagagatactgtcaaactcagaggcacccctcctcctccatgtcttaaccctagaattgttttagaacttcttatggataagtgtttggattaagggagatctgggaaatgggatttgaattttaagcaagtgagccctggggatggctagctgcccaaagtctctaggaccccaaagagattatgagagagaacgttgagaggtctggaatgaattatacatactcttataatgaactttctccaacttgtccttgagcagctgtctccatcccatccctcaagtgctttggaacccacatcttataacaatggaaagatagataaccttttattttaatgtgtttatttttattttaatgtatttaagtagtttaaacactttcagcgaaaacgcattgtatttctcactccattcctcaatccagatgtataactaaagtaccatagtgctgtccattattagcccattttgtgttttaacctatacagtttgaggaacaagaaacctacctgacatcaagattatactatcagtgaagccagagaagctatacttattcattgtagacattcttatctttttaaattttttatattaaaaaaaaaaaanaggctgggcattgtgtatcacgcctgtaatcccagtgctttgggaggccgaggtgggtggatcacgaacgaggtcaggagttcaagaccagcctggccaagatggtgaaaccccatctctactaaaaatacaaaaattagccnggtgcagtggcaggtgcctgtaatcccagctactcggagggctgacgcaggagaatcncttgaactcaggggtcggaggttgcagtgagccaagatcacgccactgcactctagcctgagtgacagagtgagactctgtctcaaaagaaaaaaaggaaaaataatggggtctcactatgttgcccaggctggtctcaaactcctggactcaagcaatccttgcatctcgtcctcccaaagtgctgagattacaggcatgggccattgtacccggctatcttatcttctttatatagatatctaataagatgtaaaatactgacctgcattatctccatgttaacatttacacttcaaaatctgtaaacggacccacgttcatacgcgtgaacagaaatctttcagcaacaaaagagaaaattgtatttctcgatagaaaggaagtggtcagatcatgccagccaaacaaatctgtcaggctttgaaatatagaaccgttaggtaagatactgagataaaggataaagtaagatcagcctaaatgtttcagtctagttaagttgatttgtatattacttagaaatttcattttcagggaaatagttttcagatttaaataactgtaaagagctgagttattctttgacttggatttaaaaaaaaagaaaaaaagtgtcctgaagtcatttcctgccagtttgtccccccaactttttttcctgctcttcctgtaactggttcttgttacggcaatgtagctgtatatttaaatcctaagagactcgcttattgtgagtaggcagggtcagtagtctgctgaaacaagcacaggaaacttgaaacacctaggggctattttaaaaatcccttgccactgacattttagttagaattctaaagagagaatgggctgtttggatactgagctccagtacaaaagagctggggtttttacaccgacttgcaaaccactaaaatcatttgacctggtgttgtgtcacttgggtattctgaagcatcagatgaaaactaatatccaccctgcaaggttggcaggcaacaattgtacctgtgaagtgagcatctatcaaagaattggggaaggaaggccgggcgcagtggctcacgcctgtaatcccagccagtactttgggaggccaaggcgggcagatcacgacgtcatgagatcgagaccgtcctggctaacacagtgaaaccacgtctctactaaaaatccaaaaattagctgggcatggtggcgggagcctgaaattccagctactcaagagctgaggcaacagactcggttggggatccta

SEQ ID NO: 407377 - DNA, 617 bp, Homo sapiens
gtggcctccaaaataaacaacaggactgctcagtagtcagagtgaattttgggtggggtttgaaagagttccagctttcctctgctaatggtgacataaaatgttcatttcatacccatgcatatacactgatgtatacatgtagttgaggaggcagtggcagaagccagaaggctttctctgccatgagctcctcctaggagccctgggttgcagagggtgaggactgctaggaaagtccgtcagttaaggccgaagggacattagctttgccttaaaccacattggctgtgcttgcctttgtgtcttcacctgatttaatgggttttagctcacactctccgaatctatttacctccaagtcagttaaggcagactgtactgttgacaaagctaagcagaacagaatttccccatggcttctagcttcaaggaatcccagctatttatccatcaccaagaaatgaagccccatgggtggctgacggttcatttactccagcccagggtgttggatttcaattagtgcattcgcttttccctctaggcagagctcaccctttaaagtcgctccttggcctgctaactgtcttaagatgcactttcccatctcaaca

SEQ ID NO: 407378 - DNA, 269 bp, Homo sapiens
tttataggtaggtatccaaatggcctagctatctggatagagaccagcagaagaggtaggaaccaggcacagactatagagtgccttgggtataccagtgtgcacgcatgtgcgcgcgcgcgtgtgtgtgtgtgtgtgcgcggagaaagagagagaaatttagctcatatatagtgagtaatttttatatatcaaattgtgttaaaggtacaaacactgtgactcggaatctaaagatcccttctctctctgttggtgctttcttattc

SEQ ID NO: 407379 - DNA, 325 bp, Homo sapiens
ggtttcacactcactagctcacgtttgtgtgtaacaaactaatggctgtgtttgtaggtcctttccaagggcctaggggtctactgtgccaagtaccaggagggtgaacaacaccatgggataaacgtgggaaatcttctaagaacaaccatctcacttgaaaaatggagggaaaaaaaactccacaatttttatattaaaacaattaagaattacatttcacaatacaatggaaacctagcattatttgtttatttgtttatttttcttgagacaaggtctcactctgtcacccaggctggagtgcagtggtgcaatctcagct

SEQ ID NO: 407380 - DNA, 888 bp, Homo sapiens
ttcaggaaatctcgaattcagacgtaagcctaaccctgcattagaaaaaatgttcaccgggttagagcagtggtattcctggggatctttatgctaaggatctgagttacatactcctgggaggtaggagagaaggcctcatttcattccctctggcgtgctgtcaatcaggcaattattgctaatattgactttccctttgtaggtatgttcagaactgttaagtcacaactggagagtaagttcccacttgtttataattcccttttagtctgagcagaggacagtctgttcacggctaggaatcaagttgaaagttggaattctgtagccctggccgaggcaggttttgctgtaagaaatcttttcagtttagcaccaacatcttcctaggtttcctgtctagacagtgcaaagcagtggaacatgcgagaaacgaaaaagccatggaaagggagggagacatgcttgcaaataggcctcaaaaatggaggtctcccactttattggtatcagaattacttggagagttttttagaagggtagatccccaggccccgcccccacctccaaagtcctgagcagctggaggtacacagtcatttggagggggaggaaaactgatggattctacctgaggcaaaaagatgagggaaaggaacaaagaaaaagggctgaaaaaaggtctataaacacatgggtggaaatgagcaaaagcacagaagaaacataaaataacaaacgtggctcatggagctgagtggaacagcagcagccaggcatatgacctcggtgagaaagcaccatgttgcacgaggcttcataaattctggttctccctggagtctctgcttctagaacacattagccacacaaaatcctcaaaaa

SEQ ID NO: 407381 - DNA, 1425 bp, Homo sapiens
gcacgaatatgatcgctgggaagagataggtccgcgatgcaaggggtgattggtgcacagatcgacggcgtagtgtggcgaaacgctactggagtgtgggtggtgggtgccggatggatggacagtaccgcgtgggaatgttgcgcgagcaagtaagtatgagagactaatgatgagaagcgtaaggagatgtgggagagaagaggaggcagtgagcgtcagtgattgagaagtgctgcctataggggacgtctacggtggggcagaagttcatgtgaacggagcgtagatttataggttctctgttgaggatgttcttcgaagcgtcgccgccgctggtttttctgttgagtcgtgtgttgtggaagatgattctgttttttgttgtgtggagggatttttggtgttgggctaatgggcgttctgaggtagcaggagagctccagtgagataccaagaatgttaatgaaagcaattcgtggcaaacagtgtgggcttgtctgcaccggaggtcataatggcactggtctgcgtgtgtgtgccacgtgaagtctccatgagcacacgtggtggttaaaatgtatggctttgattcaggagcgatttgcagcaggtggtcaacccaagtgtaggtttataggaccttgtttgtcagccgtttgttgcggttgattcctttacctgcatcttgtgttgcctcaggtagaatccatcagtttgtcctcacacctcccaatatgactggtgtaccagccagactgcttcaggactttggagatggggggcggggacctggggatggtacccttctaaaactctccaagtaattctgataccaataaagtgggagacctccatttgtgaggcctatttgccaagcatgtctccctcccgtgtccatggctttttcgtttcatcgcatcttcctaggtttcctgtctagacagtgcaaagcagtggaacatgcgagaaacgaaaaagccatggaaagggagggagacatgcttgcaaataggcctcaaaaatggaggtctcccactttattggtatcagaattacttggagagttttttagaagggtagatccccaggccccgcccccacctccaaagtcctgagcagctggaggtacacagtcatttggagggggaggaaaactgatggattctacctgaggcaaaaagatgagggaaaggaacaaagaaaaagggctgaaaaaaggtctataaacacatgggtggaaatgagcaaaagcacagaagaaacataaaataacaaacgtggctcatggagctgagtggaacagcagcagccaggcatatgacctcggtgagaaagcaccatgttgcacgaggcttcataaattctggttctccctggagtctctgcttctagaacacattagccacacaaaatcctcaaaaa

SEQ ID NO: 407382 - DNA, 393 bp, Homo sapiens
gtgataagtaaagaccagaaggaagtgagggagacagccatatagacatttgggaaatttggcctaggcagccaaaatagcagatgccgaagcgcggaggcagggagtaagctcggccagcctctgccttgagctcagcctcatgcccaagctcccctcgccatacctttggaaacttttgctgtttagttctggggggtcatgggcttggtccccagaggcctgggcccaccctgtcaacccaggcctcagtgtgccaaccaacatcagaaatggcccactggaggcagcctggtcctgtggggcacaaccgtccaactcagggtgggcagtgcgggaagacagcctggggcagaggctcagcccaggccaggggccgggaacagggccctg

SEQ ID NO: 407383 - DNA, 460 bp, Homo sapiens
tctgaggctctgcattgttggaggaagggtcagaggggctggagaggaagaaacaatgcaaatatgaggcagcagaagggaaatcgaggtactgggggcttccagcctcatgctgcttgctctctcctgaatccatcgttggtctttctgtcctaatccgaccactccatcgccagcctccattcctctgaatgttgatagaagagctccggactctttccagctttccagacttttccactcacacagactcaagggtcctcccaactgtcttgtgaaaagaggccatcccattccacaggaggggaaactgaggcttggaaaaggcacatggtcccatgtagcgtcactgtggctcttcggactcttccaggtccctctgcctgtcctgggcctgccattgttccacctccaggtctgcccactgcctgcacctctcctccccgtctcaccttgccct

SEQ ID NO: 407384 - DNA, 432 bp, Homo sapiens
tgagatatttccttgacttaggttgtaatatccatctcttttaaaaaaagaattttacattttccttttgaataagatttatttttaaactgctttgttttagccatggggatcatcagaaaagatagagtacacatttctcctttaacagttatctttagccaggcgtggtgcttcacgcctgtaatcccagtgctttgggtggccaaggccagaggattacttgaggccaggagtttgagacaagcatgggcaacagtgagacctcctctctacaaattttttttagaaaattggctggagatggaggacgcatttgtagtcctaactactcaggaggctgatgaggaggattccttgagcctaggagttcaaggttacagtgagctatgatcatgccagtgcactccagcctagatgacacagcaagac

SEQ ID NO: 407385 - DNA, 172 bp, Homo sapiens
atgaggggacatgggatttaagtttgttacactacagctctcagccagcacactgccatgatctggctcatggccacaactctgccctcgtctctagtgtcctgcatagcttagtttctcccattttcagagagcagtctcaggaagtagcacactgatcactcacaccaag

SEQ ID NO: 407386 - DNA, 293 bp, Homo sapiens
cctgaagcagatttagacttcattttctgacacctctcgtcctttcatgcgaagggaaaaaattactcatttagccttcgtgttgtcttgtatgagctcttgtattgtcaaggacaagagaaatgtgcagttgcttttaaggttagatattccttctcattgctgggacctgagattttttaaatggattctcgttcccaaaaggtaatgttttctggaaagcagttccaaaacataaggatgctcatggaagcatattcttttgaaggaacctccgctggactgcccctaca

SEQ ID NO: 407387 - DNA, 395 bp, Homo sapiens
aatttaacctgtgtttcataattcagtaagccggatagtacccacggatcagtagttctgatggccccagcctgtcacgtgtcctctggggatcctttgattgttatcctcccaaagtgctcattcccagaaaatggattaatcaggccagtgaaagcctcaggctccataataaagtcccatgggcctacttatcttcctcttctggggtgcatgcaggttggccaccttagccatgccctagaagaggaaggaagccaaacagaagtgttcttcccaaccctgggtcccagatgcccactccttactgcgctctgggcctctctccttcctgtctggctagtccattgttctctgccttctagaaagagggccctcccatcaatagctgaagt

SEQ ID NO: 407388 - DNA, 509 bp, Homo sapiens
cagaatggtaaaattcatgattggtttagagcaaggccacagtatcaggcttacatccatattatatgacagagaaattaacttttattatattttatccactttaatttggggcagttttactattttactcacaaccaaatttaatcttaaacgctacaactagattgtcacatgtaaaaagtaataaccatcattatatcttttatgttctgtaattccaaagcacggatctgtagagaacagagtgtctatcccatgcatgttgtcatgtacttatcccacaccctattgaaatcacagtacccataagggagactttttttttcttcaagaatatgtatttctgccacatctatgattctccagaatgagatgacagaaaatgctaaactattgttaaatgactatatgtagttccacttctggatggtagatgggggggctctgcaaactcattttctaataaaactggcaaaaaaaaatgtataaaaaccttgccatttgag

SEQ ID NO: 407389 - DNA, 302 bp, Homo sapiens
gcacacctgtagtcccaggtactctggagattgaggtgggaggattgcttgagcccagtagtttgaggctgcagtgaggtgtgatcatgcctctgcacttcagcttgggaaacagagtaagaccatgtctcaaaaagaacaaaaaaagactttcttatttgtctgatatacctgtatattaccttatgaaagaagcagaaatccccattttgcagataagaaaaccaaagcccagagaaatgaagcggcttgtccccaagattgcttagcgaatgatggagctgggaaaagcccaatcttcc

SEQ ID NO: 407390 - DNA, 1989 bp, Homo sapiens
cggccgctgcccgtcgcccgggactccccgccctccctcgcgaccccgcgccggggcgggcggcgcttgcggcgggcagggggcgggcaggggagagggggctcgtccgggggtagccgcctcctctgcagcctgccggcgcctcgaagcccggacctgcctccgcctcttcctccagcggctccatcccgcctcccgtgcctcgtcctcccgccgcctccgccgccgcgcccccggtggctgcctcggcggaccggggagggggcccaccgcgtcgaccgcccgctcggctcggctcggcccggcccgggaggcgtgcatgcccctgctgcccgcggcgctcaccagcagcatgctctatttccagatggtgatcatggcagggacggtgatgctggcgtactacttcgagtatacggacacgttcaccgtgaacgtgcagggcttcttctgccacgacagcgcctaccgcaaaccctacccgggcccggaggacagcagcgccgtgccccccgtgctcctctactcgctggccgccggggtccccgtgctcgtgataatagttggagaaactgctgtcttttgcctacaactagccacaagggattttgaaaaccaggaaaaaactattttaactggagactgttgctatataaacccgctggtgcgccgaactgtccgatttcttggaatttatacatttggactgtttgctacagatatctttgtaaatgctggacaagtagtcacaggaaatctggccccacatttccttgccctgtgtaagcccaattatacagcacttggatgtcagcagtatacacaattcatcagtggggaagaggcctgtactggcaacccagatctcatcatgagagcccgaaaaacctttccatccaaagaagcagctctcagtgtctatgcagctatgtatctgaccatgtacatcaccaacacaatcaaagccaagggaaccagacttgctaagccagttctatgcttgggcttaatgtgtttggcatttcttactggactcaacagagtagcagaatatcgaaatcattggtcagatgttatagcaggctttctggttggaatatctatagcagtatttctggttgtgtgcgtggtgaataatttcaaagggagacaagcagaaaatgagcatatacacatggataatctggcacagatgccaatgatcagcattcctcgagtagaaagtcctttggaaaaggtaacatctgtacagaaccacatcactgccttcgcagaagtcacatgatatcgaagcagatggtttttcactgcattggacatcatccctttttaccatccattcataacacccaaagtttgtttgattgcaagtgaagtttataaagttgtttaataatttttataattttaaaatcaatgtcaacctatctgtttcccccactagactgtgagctcctcgagggcaggattgtctttttttttctgtgtccccagcacttacaacaaagcctagcacaaagtaggtgttcaacaaaaatgtgatgaccaaatgaacaaaattcttaaataaaacattcactttagtttctcacagaatcattgcaattatgttaaaagaaatctctacataaatcgtatttgtgtatgaaaaccttctattttgggctagttatttttttaatcttcatatatctattcagcagtatgccatatttaatttgaagtggactttgaaagtcatgggggtttttattttgttattcagcatgacattatttccattctaacatttcagtgtgtgaaattactttatttttagaaagtatgttctatagtaaaataatgtttccacattatattatgttatatttcacttaaaatactattcatactatacattctaagactggtgcttctgcttttgaaggggaaaatgccaatttttactgtaataagtaatgtatcataattaaaaattatttatttgga

SEQ ID NO: 407391 - DNA, 4124 bp, Homo sapiens
cggccgctgcccgtcgcccgggactccccgccctccctcgcgaccccgcgccggggcgggcggcgcttgcggcgggcagggggcgggcaggggagagggggctcgtccgggggtagccgcctcctctgcagcctgccggcgcctcgaagcccggacctgcctccgcctcttcctccagcggctccatcccgcctcccgtgcctcgtcctcccgccgcctccgccgccgcgcccccggtggctgcctcggcggaccggggagggggcccaccgcgtcgaccgcccgctcggctcggctcggcccggcccgggaggcgtgcatgcccctgctgcccgcggcgctcaccagcagcatgctctatttccagatggtgatcatggcagggacggtgatgctggcgtactacttcgagtatacggacacgttcaccgtgaacgtgcagggcttcttctgccacgacagcgcctaccgcaaaccctacccgggcccggaggacagcagcgccgtgccccccgtgctcctctactcgctggccgccggggtccccgtgctcgtgataatagttggagaaactgctgtcttttgcctacaactagccacaagggattttgaaaaccaggaaaaaactattttaactggagactgttgctatataaacccgctggtgcgccgaactgtccgatttcttggaatttatacatttggactgtttgctacagatatctttgtaaatgctggacaagtagtcacaggaaatctggccccacatttccttgccctgtgtaagcccaattatacagcacttggatgtcagcagtatacacaattcatcagtggggaagaggcctgtactggcaacccagatctcatcatgagagcccgaaaaacctttccatccaaagaagcagctctcagtgtctatgcagctatgtatctgaccatgtacatcaccaacacaatcaaagccaagggaaccagacttgctaagccagttctatgcttgggcttaatgtgtttggcatttcttactggactcaacagagtagcagaatatcgaaatcattggtcagatgttatagcaggctttctggttggaatatctatagcagtatttctggttgtgtgcgtggtgaataatttcaaagggagacaagcagaaaatgagcatatacacatggataatctggcacagatgccaatgatcagcattcctcgagtagaaagtcctttggaaaaggtaacatctgtacagaaccacatcactgccttcgcagaagtcacatgatatcgaagcagatggtttttcactgcattggacatcatccctttttaccatccattcataacacccaaagtttgtttgattgcaagtgaagtttataaagttgtttaataatttttataattttaaaatcaatgtcaacctatctgtttcccccactagactgtgagctcctcgagggcaggattgtctttttttttctgtgtccccagcacttacaacaaagcctagcacaaagtaggtgttcaacaaaaatgtgatgaccaaatgaacaaaattcttaaataaaacattcactttagtttctcacagaatcattgcaattatgttaaaagaaatctctacataaatcgtatttgtgtatgaaaaccttctattttgggctagttatttttttaatcttcatatatctattcagcagtatgccatatttaatttgaagtggactttgaaagtcatgggggtttttattttgttattcagcatgacattatttccattctaacatttcagtgtgtgaaattactttatttttagaaagtatgttctatagtaaaataatgtttccacattatattatgttatatttcacttaaaatactattcatactatacattctaagactggtgcttctgcttttgaaggggaaaatgccaatttttactgtaataagtaatgtatcataattaaaaattatttatttggacttcttctcctgacaattgtggcttaattcatgacttgtttttgaatgcaggcagtatttagggtagtttaaatgagtaaattcagcactggtaccttattattgagtaatttcccatgggtagcagtgtctcaagagtggtcaaaagctccactcttaggcttttttactactaaagattccacataatttaaatgggaaagaactataccctgacacataatttaaattatataaatgctagaaatatggttaatgtattttactttgcatttgtgtagtactttatagtttacaaagcatatttacaccaattattttatgtaatcctcataataacctggtataaacatgaagggtatggctttatttttatagataagaaaaatgaagccaagacagggtaaataacatgccaaatcacaaactagtaagagacatagttgaagcttaaattcaagttttctggccctgaactcatattcctttctaatatagcacagctgtcatctcattttggacactgaggcctttcagagctcagtagaatcctgggcaactacctatggttcaaaaaataaagaaatgccagaatacaaatatgaaagctctgctgtattttaaatgtttatgttttaagaatgaacacttttcaaatataaaactatataataattataatccagttttaagataatatcaagagtctagatgtgaggctttttgtgaaagagaagcctaaattcagcatctccccttccaccctcacccccaggtcccagcctcccactcagcagagtgcccaagggacataccttacatttagcatgtagaattccagattacaatcgccataatataaggaaggtgagctcctcaacaataactttgcaataattaaaactaccctaagtaactttggcttatatggcaaagtaactttggcagtaattgactgaaatgaacctttctaaactttacggtactaaagaaagcaaacttttaatttcctctgtaatttcaacagagatcagcaaataaatataaccaaagattgtccattactccccaaatagatgttatttgcccatttctatcactgtggaagctaaaacacttctactagggccaaaaagagaaaagaaaagaaaatttctactaatttcagacctctagagcaattcagtcctgttggaaatttagaacatgaagaaactttgaatgtcttgaccctttttaaagattttttaggcaataacagtaatagggaattcacttattgagaatgaaagtgaaggggatgatcctaatgtcttagaaagctagattactagtaaggcttccagacttctatcagttctattgattctacatcagacttccaagcagccaagcaggaatgtttttcctgttggaagccttagccatatattcttatgtcaaggttgcttctttgcaccttgctaaacctgatacgaatgcaggagttttaaattcttcaaaaactcagatttaacccagaaccagagtaaagtcacctctactatttacacatcataggctcaagattgtacagtgagtgatgctgtcatgaagaaaattcagatgaaaaaggcaagatacatgtgaataaggcaaaagccagaaaatagcccttattcatgatgctgttactgagaataatgaaaatcatatttcagaaaatattaccatgtaaatatgtacatatgtagtctagtaaaagcaggcaaacacatatctttctgataaaaacatcctccctttttattcctacttacttggggcccaggtcagtataatttagtcaacttgaaaatttcggtagtctctgtttgcatggcagaaattctgcacatgttttatctgattcctgtgataacttaaaaggctcttttatgttaaaagagaggtgaatcttctttgacagactttgtattttccacttctaactgggcctctcttttctcaggatctatcctagccaaatatctcagttacatttaccatacagtttcctttgtgaaagaacagtaggggaggaaataattctctgctgtgtattgtatttttcaaataaaaatttaaaaattcaattgaaaactgaattttgactt

SEQ ID NO: 407392 - DNA, 424 bp, Homo sapiens
tcttttctcttgtgttgctctttgaaagggacctttttgtgagatactgccataagctagggtaggtcattttaatgccctgtatcaagcattcacatgagtagacatcttcaaaagaatttcacatataggtggtaaatgtgactttgattagccttatgaatgcttgtcagtgtatgatgtatttttacacttttgttctttttaatatgattagaaagtagaagggttattatggtgaggaaatgagtaaggttgggaatgataattcactgtattatgtgtctgacatatccctattcctactgtttgtagaatatcaaagcacactaaggtccaggtgcagtggttcacgcctgtaatctcagcactttgggaggccgaggcaggtggatcacctgaggtcaggagttcgagaccagac

SEQ ID NO: 407393 - DNA, 478 bp, Homo sapiens
tcgcctgcccatgttcttgattaactgtcaaatcagtcaggctcaaacttttgaaaattttaacgccctctttttttctcccttctcatgtataaaatgagttctgcacgtttttttcttgaaattatctttttcttcttctccctagttcaagcttctaccatatcatgtgtggatagttgcaaaaccgacagagtgtccagtttttccctggcccaatccactttgtgtggatacttctcatactaatcttctttaaatgctattttcatcgatgcctccaaaaaccataatgagcccctgtttcttataaattatgtcccactcctctcttggcttagctctccaaaagccagcaccacccctgggagccagctttctaatccccaacacaaacctcctgcttcagtctatctggcttgctcttgggcccttgagttatccatgctggtgtctgcctctgaaactttgtattgtc

SEQ ID NO: 407394 - DNA, 783 bp, Homo sapiens
aagctgaggactggtcaggttgtttttatgtggtggatactactggcacgtgagatggaatcttgtttttcctatgggaatggtggtggttgattagacaagtaataggtctattaaaaaaatttcaggaggtatctacttagttgatttagctgacaacaaaagagctaacattagatttcacactgttttctattaaaaagcaaactttgctgattactttggaagaatccctgatttgggggtagcagagtaacttttaattggagaagctgggaaagcaaacccattttgtttcattatttgcattttataaagtgagctaatgcttgcactccattttttttaatcaaccctttcaatgtaattacaaaatgaaattcatggttgaaaaacaaaagagggcagatataactgagaggttttgtgctaaggcttatattgttacacatgtaaataatgaaaatattgttatatatcaccagatctttttaatgaatttggtcattgtgttcctttgcagtgcaagtgtcttgtgcttcgtaaagtgcccatttgtttcctccatttcaatccaaccccccctccccttccaacccaaaggaaagtgacaaagttctgttccatcagccttgctaatcccaagctaggcccacttacagtttacagtctcctgtggctcttgatcagttgtccaagcctccgtcgctcccacaaccatcttcccctggcaagtctgtgcgataaatcattcaaggtgtattgaaaatagtcactttgcta

SEQ ID NO: 407395 - DNA, 307 bp, Homo sapiens
gctcacttccttctttaaaaaaaaatgcccacagtaattccaaatccatatggccagaagtggaaaatatccacaaaataagcttagcagggacagtgttcagtgtctgctttgccatctattgactttcttcaatatatggtaatataagtaacctctaataaagttatcacagtctttattaccagccacataaattaatcaattaaaacattctcagaagaataattgcatttgccttgtagttcaaaataacttcattacacttttttcagaacatcgctttcctctaatattagtctttaga

SEQ ID NO: 407396 - DNA, 537 bp, Homo sapiens
agaaaggaggctgagagctgtgactgcctgcagggtttccagctgacccactccctgggtggggggactgggtctgggatgggtaccctcctcatcagcaagatccgggaggagtacccagacaggatcataaacacattcagcatcctgccctcgcccaaggtgtctcagagcagtttacagcaatgttcaggcgcaaggccttcctccactggtacacgggcgagggcatggatgagatggaattcaccgaggccgagagcaacatgaatgacctggtgtctgaatatcagcaatatcaggatgccacggccaaggaggaggaggatgaggagtatgctgaggaggaggtggcctagaactctccttttctaggtaaagcgggggaggcagtgtgtattcttcactgtgttgtgacagctatgtgtcactacgcacttgttcatttgtgtcttcacatctcctgctgctgcattttaaagcacttttatagtgtgcagttttgactaataaagtattctcacagcaaaaaattca

SEQ ID NO: 407397 - DNA, 480 bp, Homo sapiens
ccccgacaacgtaaaaacagccgtctgtgacatcccaccccggggggctaaaaatgtcaggcagcttcattgggaataatgcggccatccaggaactcttcacgtgtgtctcagagcagtttacagcaatgttcaggcgcaaggccttcctccactggtacacgggcgagggcatggatgagatggaattcaccgaggccgagagcaacatgaatgacctggtgtctgaatatcagcaatatcaggatgccacggccaaggaggaggaggatgaggagtatgctgaggaggaggtggcctagaactctccttttctaggtaaagcgggggaggcagtgtgtattcttcactgtgttgtgacagctatgtgtcactacgcacttgttcatttgtgtcttcacatctcctgctgctgcattttaaagcacttttatagtgtgcagttttgactaataaagtattctcacagcaaaaaattca

SEQ ID NO: 407398 - DNA, 224 bp, Homo sapiens
agaaaggaggctgagagctgtgactgcctgcagggtttccagctgacccactccctgggtggggggactgggtctgggatgggtaccctcctcatcagcaagatccgggaggagtacccagacaggatcataaacacattcagcatcctgccctcgcccaaggtgtcagacaccgtggtggagccctacaacgccaccctctcagtccaccagctcatagaaaa

SEQ ID NO: 407399 - DNA, 988 bp, Homo sapiens
ggtgtgatttctttttattagggaggtgggagggggatgttgggaggcatggggggtgattaaattatcatttccaaggtgcaagtgtttatttttcaaatctataagtacatagttccaccattttggcacaagacaaaatactcatgctaagcaaaggaagagaaagacaaagccagtttttgttgcttttctaaagcaacaaataattctccaaagaaggggatgaaaatgctagttcctttaagcacttactgactgtaaagttggtccctgcttaaattcatacccatagttttgagtcggtatgacaccactgcagtgtgagcaaggtgaatccgtgtgccatgcatggaccaccttgggataccgcagcaccatcaacatccgccttgctgatggaagccacacacgctgcccagcccacagcagtcgcacgcagccgatgggctcggactcttagctggcaggctaggacacacagtgaacattaatgtactgtgaatcgttcctgataagtgaataaaacattgtgaccaaacaatcagcttattcacttatcaggaatcgactgttctgctaatttgctgttgttgtttttcatctctgttgtagttcactatttttgctgtgttctgttttctcctctcatgcttgggcaaatcactgggaatattatcttcatgtgaccatgaaacgtttctattgagtgaaaatgatatcttaacaaaatctatgcacttgctatcaggaacacaatactggatgtgtcttatatatattgaactatatagtactcgatttcttaaataaagcttaagaaaggactctgttgtgtgtaaagttaatgtgattatttttcaaagcagtgtttctaaggggtatttttgttcttttaagtcttgagtgatacaggatatttttcattaaaattatatcactggctttatgacttaatattcaataaattgactttggaaacaaaagt

SEQ ID NO: 407400 - DNA, 975 bp, Homo sapiens
ggtgtgatttctttttattagggaggtgggagggggatgttgggaggcatggggggtgattaaattatcatttccaaggtgcaagtgtttatttttcaaatctataagtacatagttccaccattttggcacaagacaaaatactcatgctaagcaaaggaagagaaagacaaagccagtttttgttgcttttctaaagcaacaaaattaaattccttcccaaaggaaagggggattgaccaattgcttaagtttcccttttttaaaaggccaaccttttaccttggaaccttggttaacaaggtttggggttccccttggccttctaaaaaatttccaattaaccccccaattaaggtttttgtggaaggtttccggggttaattagaaccaaccccaaccttggccaaggttggttagacaggccaaatgggttggaaaattccccggtttggttggccccaattggccaattggtgaaccccaaccctgtgggggagaattaacccggccaaggccaacccaattccaaaaccaattccccggccctttggccttggaattggggacaacgccccaaccaaccaaccggccttggccccccaagggccccccaaccaaggccaaggttcccggccaacctgccaagcccggacttggggggcttccctggggaaccttcctttttaaggccttgtggccaaggggcctttaaggtggaaaccacaccaaccaacggttggaacaccaattttcaactttggttaacccttgggtggaacaaattcccggttctccccctttggaattacaaaggtctgcaacacttacaaaacaacccacttttggtttggaacccgaaaaaacccaaaattccaaggcctttaattttcccaccttttaatctccaagcggacaactccggcaacctaggtctccttggccttaaaatttttggcgtcggcttggttaggt

SEQ ID NO: 407401 - DNA, 824 bp, Homo sapiens
ggtgtgatttctttttattagggaggtgggagggggatgttgggaggcatggggggtgattaaattatcatttccaaggtgcaagtgtttatttttcaaatctataagtacatagttccaccattttggcacaagacaaaatactcatgctaagcaaaggaagagaaagacaaagccagtttttgttgcttttctaaagcaacaaataattctccaaagaaggggatgaaaatgctagttcctttaagcacttactgactgtaaagttggtccctgcttaaattcatacccatagttttgagtcggtatgacaccactgcagtgtgagcaaggtgaatccgtgtgccatgcatggaccaccttgggataccgcagcaccatcaacatccgccttgctgatggaagccacacacgctgcccagcccacagcagtcgcacgcagccgatgggctcggactcttagctggcaggctaggacacacagtgaacattaatgtactgtgaatcgttcctgataagtgaataaaacattgtgaccaaacaatcagcttattcacttatcaggaatcgactgttctgctaatttgctgttgttgtttttcatctctgttgtagttcactatttttgctgtgttctgttttctcctctcatgcttgggcaaatcactgggaatattatcttcatgtgaccatgaaacgtttctattgagtgaaaatgatatcttaacaaaatctatgcacttgctatcaggaacacaatactggatgtgtcttatatatattgaactatatagtactcgatttcttaaataaagcttaagaaa

SEQ ID NO: 407402 - DNA, 406 bp, Homo sapiens
ggtgtgatttctttttattagggaggtgggagggggatgttgggaggcatggggggtgattaaattatcatttccaaggtgcaagtgtttatttttcaaatctataagtacatagttccaccattttggcacaagacaaaatactcatgctaagcaaaggaagagaaagacaaagccagtttttgttgcttttctaaagcaacaaataattctccaaagaaggggatgaaaatgctagttcctttaagcacttactgactgtaaagttggtccctgcttaaattcatacccatagttttgagtcggtatgacaccactgcagtgtgagcaaggtgaatccgtgtgccatgcatggaccaccttgggataccgcagcgttgcagcgtccactacgggatcctctaga

SEQ ID NO: 407403 - DNA, 1797 bp, Homo sapiens
  misc_feature (925)..(925): n is a, c, g, or t
  misc_feature (983)..(983): n is a, c, g, or t
  misc_feature (1605)..(1605): n is a, c, g, or t
  misc_feature (1608)..(1608): n is a, c, g, or t
catgtccagaagcaatccacagtttgagaaaccaagtttgggtaagatttctggggtccattgctggtttacagggataatcagacagactatttgaaatctatcaggatgatgatgatttctgtcaggcctgatggggctcagctcatgaatagcatgggggttctgggatcagctccctgggacagggcaggcctggaggggtcacctgtaaaaagttggtaagcaggggcattgtcaccaggcttcctcttccatgtcaatggagtctggaggcagagttggaatccagctctgcacctttttgctgtgcaccctcaggcgggtcagcaacctctctgaacacacacccagtctacaaaatagaagaaaaaccctataaggtggtttttggcaggggagaggacatgggaagagattgaataaattagttgtccatcctagcatagagcccagaacaaggcactgaaaagacttcttaaatttttttgtccaacaacatcttggacagttctcatttatgtcaacatgcctggtcctgattttgttggtcatatttgcatgtcatattttaaaccatgaagcataataaccaactaagtaagaaagccctggcaaaaaagctgagaggtctggtgcagtggatcacgcctgtgatcccagcacgtttggaagccgaggtgggcagattgcttgagcccaggagttcgagaccagcctggacaaaatggcaaaaccccatctctgctaaaagtacaaaaagcagctggatgtggtggcactcacctgtaatcccaggtactcaagagactaagacacgagaatcacttgaacccaggagacacagggtgcagtgagcctcctgcactccagcctgggtgacagagtgagactctgtctccaaaaaaaaaaaaaaaaaaaaaanttgctgagaaagccctaattgttgttgttgttgttgttgttgttgttgttgttattgntgaaatggggtctcgctatgttgcccaggctggtcttgaactcctgggctcaagcaatcctcctgcctcagcctcccaaaacgttgggattacaggcatgagccacctcacccagcccccttgtagttttaactgtgttctacagtaaccctagaatttgcctccttattttctattaaaatgagacatacttgaacaatattcagtcaaaatagaaatatatacagtcaaaagcaactgccacataattgccaaaacttggaagcaaccaagaagtccttcagtaggtggatagacaaaaactaatggaatattatttagggctagaaataaatgagccatcacgtcacaaagagacatggagaaaccttccatgcatattactaagtgaaagaggccactctgaaaagactacctattgtttgattccaactatatgacattctagaaaagttaaaactatggagacagtaaaaaggtcagtggttgccaggggctgggaggacagagggatgaaaaggtggaacagggaggatttcagggcggtgaaactactctgtgtgatattacactggcggatgcatgtcactgtgcacttgtccagacccacagaatgtgcacnccnaagtgtgaaccctcgtatggactatgaactctaagcaataatgacatgtccgtgtagggtcatcagttacacatgtaccagtctgatgtgggatgatggtagtaagggaccctgtgcctgtgtggtgggaggaggtgtgtgggaactctgtacttctactcacttttgctgtgaacctaaaactgctct

SEQ ID NO: 407404 - DNA, 252 bp, Homo sapiens
attagggttggagctgtcctggacattgcaggctgtttagcagcatctgtggcctctatccgtttgatgttagtaggaccttctgtctcactagtaacaacccagaatacatccagacactgcctggtgtcccatggcaggcagagctgcccctgatggagaccattgatgtttatcattagattactctccataggttatctgtactaattgactttctcactgctactctgtaggtgtgctgtgccctct

SEQ ID NO: 407405 - DNA, 370 bp, Homo sapiens
gtctaaaataaagtgctccttaaacattgtttctcaaatcttccttttttgcctccagagatgtgttgatgacccatgcccacaggacatatatcgccctttgacctctaatgttgccctaattgccacttcctctgtctcctccagaaaacacagatgtagactcagacttccatctggactaataggaggagacaggctgtgaagagtgtgtgtgtgtgtgtgtgtgtgtgtgtgtgtgtgtgtgtgtgtgttggtggtggtgggacaggaaggtggtgcggatgtttaaaaatgttgggaccacgcattcaggacagaatggaagtgtctgggctttggcatccacccacccactctagggtccaga

SEQ ID NO: 407406 - DNA, 535 bp, Homo sapiens
gccaccacggaaaccgttagtttcacattttcctagaaggaattgaggggagtggggtggaccgcgatgcattttaaaggttgggaaagagctaagccattggattccttttcttgaaggaaggagtggaattgtgtaagataattgatacagataactttttcaccctaaaaaattctaacacttctttcagcagttaaatgccaaatttagtgtgtacctgttttacttcattctttagctgtaggttggagtggtgtgagcgatctgcagaactggcattagaggggcagaagaagtagacctgataattaaagtttatgccttaacattttagatctggtttctgatatgctctcttagtaaatctgagtgtgtctttaaaaacgtaaacccaaagcaatttaaagtttctctttaaactttgcaactcgcgaatgagaagattgaaattatttgtaggtaattgcactattccgattttttaatgtatgaggcaaacaaataaattctatgtacagtgtgctgtgaatgg

SEQ ID NO: 407407 - DNA, 176 bp, Homo sapiens
ggactagtttttatctccgagatccagcctgctgtctagggtactcgtgcatgtgagtaaaacttccaagaatgccacctccctacgtatctcccctacactgctctcctcctgcattccctgtgactctaaagtgaggcctaaggctctgatgggatcacccagcttccaccaca

SEQ ID NO: 407408 - DNA, 510 bp, Homo sapiens
cagagggacttccttattatgctgactcaatcagattgaaatttcctgttttcaggggaaaaaaatggtctgcttgggatctgtctgtttccttaaagtttcagtatgattgtgtaacatttggcatgagtgactctattgtggtttaatctggtttgttggagtctagtgcgtgagctcactccaaaacaatgacctcccacaatttttgtttacacacacacacacacacacacacacacacacacacggtatatattcactttttttacccctattggttctctttctctggagaaccctgaataatatgccaactttcctctttcctctataatcaacttcaatgaatatttctgtacatgtatccttgtgctcatgtcaaaaaaagcatttatgattatccttatgagtaaaattgctgcttctaagggtctaaacatcattatgaaatattgtaatattgctctccaaataaatcataccaatttattgtctaaaaaaaatgta

SEQ ID NO: 407409 - DNA, 267 bp, Homo sapiens
gcaggtgagcttgcactctaaggctgaagacagttctgggtcagacacttggagtatcatttataatctgaaagttctgcttttcatacctaattccctagcattctgctttttaaatgatcatgggatgtttgataaatgaatgcatgaatgccatttcttttaggtaaagactggtttactcttctaattccattttgcctaaactagccttgagttgtttgtgttccccaagtgtttactcccagcaagatggaggcagcccac

SEQ ID NO: 407410 - DNA, 1320 bp, Homo sapiens
actgtgaacgataactgccttacttttctttatacttccccaacctgggtacccatccacatcagtatattttatttttgcatgttttttatgcaaaccaatatgtgattttttttttttttttttttgagacagagtcttgccctgtcgcccaggctggagtgcagtggcgtgatctcggctcactgcaagctccgcctcccgggttcacgccattctcctgtctcagcctcccaagtagctgggactacaggcacccgccaccccgtccggctaattttttgtatttttagtagagacggggtttcaccgtgttagccaggatggtctcaatatcctgacctcgtgatccgcctgcctcagcctcccaaagtgctgggattacaggcgtgagccactgcacccggccaatatgtgatattttatattggattttatttaaactcagttatgaaccttacatggaatgatagttaattcactttcttatttagttgattttattatttagaacagtggttgtttacccaaaacattgagcagataatccagagttccctcatttttcttccaagctcatagttccccctattttaaacatcttgactggccaggtgctgtgcctcatacctgtaattctaccacttagagaggctgaaatgggaggatagcttggactcaggagttggaggccagcctaggcaacatagcaaggccctgtttcaaaaaaaaaaaaaatgttttaaaccaaggaaaccatattgactgtgtgtagtgtatcctataattgatgcaagaatatattacatgtgaacacgatgaaaattgaagaagccaatattattattacctaaagtccatcttttacatgaaacttcactctttttgggctgtggtttaagacaactacgtgtgtcatgtatccaccatcacagtcttatacagaagcgtgtcacaggcctcaaaatcccctgtgctcttcctaatcatagctctcccctccctcttctgccacccctatttatccctggcaacaaatgataatgttcctgcctcggttttgcattttccagaatattaaatatttggaatgatgctgtaagtggccatttcagacttgcttcctcgatgtaaaaatatgcattgaaggtctctcgatacctttgttgcttgacaactcatgtattttttatttttatttatttatctaaaaaaaattttgtttttgaatggtgtgaacccaggaggcggagcttgcagtgagctgagatggcgccactgcactctagcctgggtgacggagcaagactccatctcaga

SEQ ID NO: 407411 - DNA, 463 bp, Homo sapiens
gaaacaaagagagccattctcttttctggaaccaggaactcccagcgtagcgcagatgtaaaaggccacacagctgatgtgaagtccccataacacagagaacaccgttggcctccgagagtggaatctaatcggccttgctgatctcactgtgggaagtttctgcctcttcttctgtgtcgtttttatctcccagacccgtgggagctgaaggctgccgagtgtggattagtgcacactgccccactcccggcccgttgtgcttcttggtttagtgtgacagtttcagaacaacaaagccctttctccgctcgctgccagcaagggcgtgcttggggctgccaagctgcaaccccggggttctgcaggcaccctgggtctgggctgtgggaaagtcccgctaaccagtacgagccctgcctgtgctcttcaaaagccagctagggttgaccacttggaccat

SEQ ID NO: 407412 - DNA, 479 bp, Homo sapiens
aaaagggttatagcagtacccagtaatcctactgcatcccccagtgcaatccctctccccgtttcctaaagagaggtatttcacgctttctgtttcccctgacatcaacaactcctcccaattcccttactcccagctaatgaatgccctttctccttatttcatggagaaaatagacacaatcagaagagaaattctgtatgttctcatagccacatctaccctcccacctgcatttgtgtccatatgccctgccttccctcctgttactcctgtttgcttcctggacttgtccttgcttctacctaaattaattccccacaattgtgcagtagatgccatcccctcttgcctacttcaggatatttccctagcaattggtccctctctttcatgcataattaaattttccctctctactgaattatcctcgtcagcattcaagtgtgctgtaatttcttacatctcaacaaaaaaaa

SEQ ID NO: 407413 - DNA, 408 bp, Homo sapiens
ttgatgtagaattcaggtctggggaggccaccagtcccctgcccacattagttattctgtgacaccattttcctgtctgcatgatctctttagacccaaggactctgctgcttcgaagtctttcttagagttttacactccatggaaaggctgagtgctggcacattgaagtgttaaaagacttttttgaagactatgatgtggaaaatggtgatgagactggaaaatggtgatgagacaggaaaatgtgagcaaagttctaggctgattggtagagaaggcctgtctgagggggtgtgtcttctgcttgcaccatagaaggtgagatcaaacgtcctactcaaaactggtttcaatgtggatgaagccacacaggcattgagagggttgaaaaggtttatttactca

SEQ ID NO: 407414 - DNA, 1212 bp, Homo sapiens
caaaatttgaaaatacatcaatgactaagcaactttaatcctaagtatatactcaacagaaatgtcttcacttgcatgtgaagagacatacagaagaatgcaccataattggttaatagctttaaagtggaaacagcccactgaaatatcaacaataaaatggataaatatattttatccatttaatagaatatagaagtgaatatgaacaaacgataaacaccacagatcattttcagaaatataatggtgaaaatatacattacataatttcattcatgtaagactcaaaactaggcaaaaatgatgtatggttagaaatcagaagagtggttacatttggggaacagtgacaggatagttactgggagctctcataagaaggtttctatttcctgggtgctggatacagggacactctgtgataaatcactcatttttgcatatatctatatttcaattttttaaaagggtggtccttaaaagattatgatttagggtttaccaccttgcccctctccatcaattcaaatatttcttccagttcagatcccacaccttacatgaagcctttcccaaccatttcagccagaaggaatttctctttcttcctggtttttatgccatgttctctgggaggtagtgtaatatagtggaaatagtataggctaaggaacttggactttaatctgtgtggcaataaagagcagaagagtgactcggtcagacttgtatctacctaccacaaatttaaccaattttacttatatttctctgtgaacaaatatgaaaatttatacacatatattaaatataaatatatagcttttataccacggaatactactcagccataaaaagaaatgaaataatggcattcacagcaacttggatggagttggagaccattattctaagtgaagtaactcaggaatggaaaaccaaacatcattatgttctcacttataagtgggagctaagctatgaagatgcaaaggcttaagaatgatacagtggacttgggaactttgttgggggcgggtgagaggggggtgagggataaaagactacgcattggctacagtgtacattgctcaggtgacaggtgcaccagaatctcagaaatcatcactaaagaacttatccatgtaaccaaaacccacctgttccccacaaactattgaaataaaaatttaagaatacataaaatgt

SEQ ID NO: 407415 - DNA, 675 bp, Homo sapiens
ctttagtgttttcaggtgagattgcctaaatattaacccttttcttggcgatgcctgtgtttcttatcgaaagattgaacggtatcaccagtaaaaatgagccaactggctattaatggttaatacagcccctccccccaagttcagcttcttttttcttctcctgtccccctcccaacatgttcctgtctcttttctctttttctcaagactatagttgttaggagtcgcttataagtcttataaaatattttgatatcaattacttcccatcaataactatatgtaattaaatttaaattattaagctttttgggtttttttccccccgtaataaaagaatatagttctaaaatcctgattatggtccacactgcataccatctgtgcaattaccaactcagacttaaggttctatatttctgtgtttttgtctctccccagtatgattctatatcttctttactggtgctgggggttttaggtcaccttttacataaaccctgcagagtggtcacattgatcaagttaatgtttcaatatttacaatgtgggaaaatgaaagtgtaatgcctcaggttgtgagtacttaagacgctaaaggctcggcttagttgagtccctatatattgtacttaaaagtatttagcagtggtagagcaacgattttataga

SEQ ID NO: 407416 - DNA, 770 bp, Homo sapiens
gcggcggggaatgcggccaaagcccgggaagctgctgcgggggcgatggctgcgccgagcccggggccccgcgaggtcctggccccctcccctgaggctggatgcagagcagtcacctccagccggcgggggcttctctggcgcctccgagacaagcagtctcgcctgggcctgtttgagatcagcccggggcatgaactgcatgggatgacgtgcatgatgcaggcagggctgtgggctgccacccaggtctccatggaccacccacccacggggccgccctcccgggacgatttctcggaggtcctaacccaggttcacgagggcttcgagctgggcacgctggccggccccgcctttgcctggctgcgccgctccctgggcctggcggaggaggactatcaggctgcgctgggccccggcggcccctacctgcagttcctcagcacctccaagagcaaggccagcttcttcctgtcgtgagcttgcggcaggggtggggcaggggtgggagtggtacccctggctgggagggcagaattcccagtggcggggaaggccccctgaagagagaaacagagcggccctaatctgggagggtcagggccggatggtggacagatcggggaggagaggagggcgagggccgaaggcgagagaggcggtgccgagacctgggagcgagatccacgtgcacaggtcggggaagggggccgggtgggagccgctccagccaggcctgggcagtgacctctttctcttgcccccca

SEQ ID NO: 407417 - DNA, 1766 bp, Homo sapiens
gtttaggggtgggatcgggtcgggatccggaccagccaaggaagggtccaggtgccgcggatcttgagaaggaggcgtggcctggcgctgggattggcgccggatgcaccccgggttgtggagtttggggatcctcatccggcgccctctccccttccaggagtgcacagtctgcgggtggaccggggaaagaagacgtacttcatcgtcatgcagagcgtcttctaccccgccggccgcatctccgagaggtgagtatgacatcaaaggctgcgaggtgagccgctgggtggatcccgcccctgagggcagcccccttgttctggtgctgaaggacctcaactttcagggcaagaccatcaacctggggccccagcggagctggttcctccgccagatggaactggataccaccttcctccgggagctcaacgtgctggattacagcctcctgatagccttccaacgtctccacgaggatgagaggggcccgggcagcagcctcatcttccgcacggccaggtctgtgcaaggggcacagagcccggaagagtcgagagcccaaaaccgccggctgctgcccgacgcccccaacgccctacacatcctggacgggcccgagcagcgctatttcctgggcgtcgtggatctcgccacagtctacgggctccgcaagcggctggagcacctgtggaagacactgcgctacccaggccggaccttctccactgtcagcccggctcgctacgcccgtcgcctctgccagtgggtggaggcgcacacggagtgacgggcgcccggccccactctccggatctggacgatgggctcacgccaggaacgccggttcccccgggcccgggcatctcgcctgcgcttcctcctgatggtcgccagagggcagcatcccctaactaataccgtaaccgcgcagtcccgtttgacggtggtgccgtgcccagcatcgtgccaaggactcccctactttagctcatttaatcctcaaaaaatgctattattctctttttacagaccatgaaatggaggctcagggggtgaagggactgatcaagatcattcagcaataaatgctggaaccaggactcaaccatggcttttggattccggagcctgtattcttaaccaccagctcctgcagcttggtcctcatgatctgggcaaggggggaggctgaaggctgcagccctcttgtcatccagatggggaaactgaggcccagagactttaaggggcgtaagcacgggtaagtggcaaggtcggccctgagtacccaggcctcccggccccctgctcctggcctgatactctagggatgcaggtgggagaagcaggggtcctgggggctgcctggagctctgggaggcattctgaacggggtctactactgatctcaggtgagctctgccctcctctgaaagtcacttttctcatcagttaaatgggggcaagggtccgtggtccgaccaaggtcttggcttcacagacatcaccaggagcctgcatgcccctgatcactccttctccttcctccaggaaactccagcctggcctctgaccccagttcaatccgaccatgcccaagcccaagcgggcctttcctccagaactgctccggggcctggctgtgtgactggagcaaggtgctaaacctctctgtgcctcgctggtctaatctgtaaaatgaaggaatggaaacagacctcattaactcattaaatatttgttgagcacctgccatgtgacag

SEQ ID NO: 407418 - DNA, 2210 bp, Homo sapiens
gcggcggggaatgcggccaaagcccgggaagctgctgcgggggcgatggctgcgccgagcccggggccccgcgaggtcctggccccctcccctgaggctggatgcagagcagtcacctccagccggcgggggcttctctggcgcctccgagacaagcagtctcgcctgggcctgtttgagatcagcccggggcatgaactgcatgggatgacgtgcatgatgcaggcagggctgtgggctgccacccaggtctccatggaccacccacccacggggccgccctcccgggacgatttctcggaggtcctaacccaggttcacgagggcttcgagctgggcacgctggccggccccgcctttgcctggctgcgccgctccctgggcctggcggaggaggactatcaggctgcgctgggccccggcggcccctacctgcagttcctcagcacctccaagagcaaggccagcttcttcctgtcccacgaccagcgcttcttcctgaagacccaggggcgccgagaggtgcaggctctgctcgcccacctgccccgctacgtgcagcacctgcagcggcacccgcactcgctgctggcgcggttgctgggagtgcacagtctgcgggtggaccggggaaagaagacgtacttcatcgtcatgcagagcgtcttctaccccgccggccgcatctccgagaggtgagtatgacatcaaaggctgcgaggtgagccgctgggtggatcccgcccctgagggcagcccccttgttctggtgctgaaggacctcaactttcagggcaagaccatcaacctggggccccagcggagctggttcctccgccagatggaactggataccaccttcctccgggagctcaacgtgctggattacagcctcctgatagccttccaacgtctccacgaggatgagaggggcccgggcagcagcctcatcttccgcacggccaggtctgtgcaaggggcacagagcccggaagagtcgagagcccaaaaccgccggctgctgcccgacgcccccaacgccctacacatcctggacgggcccgagcagcgctatttcctgggcgtcgtggatctcgccacagtctacgggctccgcaagcggctggagcacctgtggaagacactgcgctacccaggccggaccttctccactgtcagcccggctcgctacgcccgtcgcctctgccagtgggtggaggcgcacacggagtgacgggcgcccggccccactctccggatctggacgatgggctcacgccaggaacgccggttcccccgggcccgggcatctcgcctgcgcttcctcctgatggtcgccagagggcagcatcccctaactaataccgtaaccgcgcagtcccgtttgacggtggtgccgtgcccagcatcgtgccaaggactcccctactttagctcatttaatcctcaaaaaatgctattattctctttttacagaccatgaaatggaggctcagggggtgaagggactgatcaagatcattcagcaataaatgctggaaccaggactcaaccatggcttttggattccggagcctgtattcttaaccaccagctcctgcagcttggtcctcatgatctgggcaaggggggaggctgaaggctgcagccctcttgtcatccagatggggaaactgaggcccagagactttaaggggcgtaagcacgggtaagtggcaaggtcggccctgagtacccaggcctcccggccccctgctcctggcctgatactctagggatgcaggtgggagaagcaggggtcctgggggctgcctggagctctgggaggcattctgaacggggtctactactgatctcaggtgagctctgccctcctctgaaagtcacttttctcatcagttaaatgggggcaagggtccgtggtccgaccaaggtcttggcttcacagacatcaccaggagcctgcatgcccctgatcactccttctccttcctccaggaaactccagcctggcctctgaccccagttcaatccgaccatgcccaagcccaagcgggcctttcctccagaactgctccggggcctggctgtgtgactggagcaaggtgctaaacctctctgtgcctcgctggtctaatctgtaaaatgaaggaatggaaacagacctcattaactcattaaatatttgttgagcacctgccatgtgacag

SEQ ID NO: 407419 - DNA, 2023 bp, Homo sapiens
gagtctgggaacgtgcctggcttgaactcatggcctggtgctggtgatccagagtggatgagatacactcaggccttgccgtgggtcactcttgtccccctggcatccctgggaggggccgccctcccgggacgatttctcggaggtcctaacccaggttcacgagggcttcgagctgggcacgctggccggccccgcctttgcctggctgcgccgctccctgggcctggcggaggaggactatcaggctgcgctgggccccggcggcccctacctgcagttcctcagcacctccaagagcaaggccagcttcttcctgtcccacgaccagcgcttcttcctgaagacccaggggcgccgagaggtgcaggctctgctcgcccacctgccccgctacgtgcagcacctgcagcggcacccgcactcgctgctggcgcggttgctgggagtgcacagtctgcgggtggaccggggaaagaagacgtacttcatcgtcatgcagagcgtcttctaccccgccggccgcatctccgagaggtgagtatgacatcaaaggctgcgaggtgagccgctgggtggatcccgcccctgagggcagcccccttgttctggtgctgaaggacctcaactttcagggcaagaccatcaacctggatggaactggataccaccttcctccgggagctcaacgtgctggattacagcctcctgatagccttccaacgtctccacgaggatgagaggggcccgggcagcagcctcatcttccgcacggccaggtctgtgcaaggggcacagagcccggaagagtcgagagcccaaaaccgccggctgctgcccgacgcccccaacgccctacacatcctggacgggcccgagcagcgctatttcctgggcgtcgtggatctcgccacagtctacgggctccgcaagcggctggagcacctgtggaagacactgcgctacccaggccggaccttctccactgtcagcccggctcgctacgcccgtcgcctctgccagtgggtggaggcgcacacggagtgacgggcgcccggccccactctccggatctggacgatgggctcacgccaggaacgccggttcccccgggcccgggcatctcgcctgcgcttcctcctgatggtcgccagagggcagcatcccctaactaataccgtaaccgcgcagtcccgtttgacggtggtgccgtgcccagcatcgtgccaaggactcccctactttagctcatttaatcctcaaaaaatgctattattctctttttacagaccatgaaatggaggctcagggggtgaagggactgatcaagatcattcagcaataaatgctggaaccaggactcaaccatggcttttggattccggagcctgtattcttaaccaccagctcctgcagcttggtcctcatgatctgggcaaggggggaggctgaaggctgcagccctcttgtcatccagatggggaaactgaggcccagagactttaaggggcgtaagcacgggtaagtggcaaggtcggccctgagtacccaggcctcccggccccctgctcctggcctgatactctagggatgcaggtgggagaagcaggggtcctgggggctgcctggagctctgggaggcattctgaacggggtctactactgatctcaggtgagctctgccctcctctgaaagtcacttttctcatcagttaaatgggggcaagggtccgtggtccgaccaaggtcttggcttcacagacatcaccaggagcctgcatgcccctgatcactccttctccttcctccaggaaactccagcctggcctctgaccccagttcaatccgaccatgcccaagcccaagcgggcctttcctccagaactgctccggggcctggctgtgtgactggagcaaggtgctaaacctctctgtgcctcgctggtctaatctgtaaaatgaaggaatggaaacagacctcattaactcattaaatatttgttgagcacctgccatgtgacag

SEQ ID NO: 407420 - DNA, 1712 bp, Homo sapiens
gtttaggggtgggatcgggtcgggatccggaccagccaaggaagggtccaggtgccgcggatcttgagaaggaggcgtggcctggcgctgggattggcgccggatgcaccccgggttgtggagtttggggatcctcatccggcgccctctccccttccaggagtgcacagtctgcgggtggaccggggaaagaagacgtacttcatcgtcatgcagagcgtcttctaccccgccggccgcatctccgagaggtgagtatgacatcaaaggctgcgaggtgagccgctgggtggatcccgcccctgagggcagcccccttgttctggtgctgaaggacctcaactttcagggcaagaccatcaacctggggccccagcggagctggttcctccgccagatggaactggataccaccttcctccgggagctcaacgtgctggattacagcctcctgatagccttccaacgtctccacgaggatgagaggggcccgggcagcagcctcatcttccgcacggccaggtctgtgcaaggggcacagagcccggaagagtcgagagcccaaaaccgccggctgctgcccgacgcccccaacgccctacacatcctggacgggcccgagcagcgctatttcctgggcgtcgtggatctcgccacagtctacgggctccgcaagcggctggagcacctgtggaagacactgcgctacccaggccggaccttctccactgtcagcccggctcgctacgcccgtcgcctctgccagtgggtggaggcgcacacggagtgacgggcgcccggccccactctccggatctggacgatgggctcacgccaggaacgccggttcccccgggcccgggcatctcgcctgcgcttcctcctgatggtcgccagagggcagcatcccctaactaataccgtaaccgcgcagtcccgtttgacggtggtgccgtgcccagcatcgtgccaaggactcccctactttagctcatttaatcctcaaaaaatgctattattctctttttacagaccatgaaatggaggctcagggggtgaagggactgatcaagatcattcagcaataaatgctggaaccaggactcaaccatggcttttggattccggagcctgtattcttaaccaccagctcctgcagcttggtcctcatgatctgggcaaggggggaggctgaaggctgcagccctcttgtcatccagatggggaaactgaggcccagagactttaaggggcgtaagcacgggtaagtggcaaggtcggccctgagtacccaggcctcccggccccctgctcctggcctgatactctagggatgcaggtgggagaagcaggggtcctgggggctgcctggagctctgggaggcattctgaactcatcagttaaatgggggcaagggtccgtggtccgaccaaggtcttggcttcacagacatcaccaggagcctgcatgcccctgatcactccttctccttcctccaggaaactccagcctggcctctgaccccagttcaatccgaccatgcccaagcccaagcgggcctttcctccagaactgctccggggcctggctgtgtgactggagcaaggtgctaaacctctctgtgcctcgctggtctaatctgtaaaatgaaggaatggaaacagacctcattaactcattaaatatttgttgagcacctgccatgtgacag

SEQ ID NO: 407421 - DNA, 1049 bp, Homo sapiens
gcggcggggaatgcggccaaagcccgggaagctgctgcgggggcgatggctgcgccgagcccggggccccgcgaggtcctggccccctcccctgaggctggatgcagagcagtcacctccagccggcgggggcttctctggcgcctccgagacaagcagtctcgcctgggcctgtttgagatcagcccggggcatgaactgcatgggatgacgtgcatgatgcaggcagggctgtgggctgccacccaggtctccatggaccacccacccacggggccgccctcccgggacgatttctcggaggtcctaacccaggttcacgagggcttcgagctgggcacgctggccggccccgcctttgcctggctgcgccgctccctgggcctggcggaggaggactatcaggctgcgctgggccccggcggcccctacctgcagttcctcagcacctccaagagcaaggccagcttcttcctgtcccacgaccagcgcttcttcctgaagacccaggggcgccgagaggtgcaggctctgctcgcccacctgccccgctacgtgcagcacctgcagcggcacccgcactcgctgctggcgcggttgctgggagtgcacagtctgcgggtggaccggggaaagaagacgtacttcatcgtcatgcagagcgtcttctaccccgccggccgcatctccgagaggtgagtatgacatcaaaggctgcgagggtgaagtttagaagggtgtccctgctgccctctgcctgagttattaagagcccagattcggccgggcgccgtggctcacgcctgtaattccagcactttgggaggccgagacaggtggattacgaggtcaggagttcaagaccagcctggccaagatgctgaaactctgtctctacgaaaaacacacaaattagccaggcgtggtggtacccgcctataatcccagctactcaggaggctgaggcaggagaatcgcttgaacccaggcggcagaggttgcagtgagccgagatggcgccactgcactccagcctgtgcgacagagca

SEQ ID NO: 407422 - DNA, 841 bp, Homo sapiens
tcactccctgtcccggcccccagacgtacttcatcgtcatgcagagcgtcttctaccccgccggccgcatctccgagaggtgagtggcctaagcaggtttgggcccccatcccagccgaaactcgcggcccgaagcacccacactcactagccagacggtgaaaccgaggcccaggaaggagaaggggcgttcccaagatctggtgggtcagagacagtgacgcccacacccagcatctctggagcactcagtgtgcgttaggcgccgtgttgggcccttcgcatgctttttaattcccagaaggacgctgaggggcagctcttatcctccttcctagatgagaaaccgaggaaggagaaggccacacagctaacatgtggggagcagggactcagacccagcctctgactgcacgtaaccccctgtgccctccagcgctgactctacccacaggttccccgccccccggccattggctgcccccaagccgtcctgttgccaccgcctggggttggatccctgtgtctgggacaccctcaggggtgacaaggtgtccagaggcaggcacaggcagggctcaagcctgggctgggccaccagtggcctgagtgtgaatgcctgctctgctcttatctttaactcagaaacaataataggccggggttcagctatagggccgggcatggtgcgtcacgcttgtaatcacagcacttttggaggccaaggcaggaggattacttgagcccaggagttggagaccaccctgggcaatagagtgagaccctgcctctacaaaaaatgaaaaagttagctgggtgtgatggcacgtgcctgtagtcc

SEQ ID NO: 407423 - DNA, 1706 bp, Homo sapiens
gtttaggggtgggatcgggtcgggatccggaccagccaaggaagggtccaggtgccgcggatcttgagaaggaggcgtggcctggcgctgggattggcgccggatgcaccccgggttgtggagtttggggatcctcatccggcgccctctccccttccaggagtgcacagtctgcgggtggaccggggaaagaaggtatgacatcaaaggctgcgaggtgagccgctgggtggatcccgcccctgagggcagcccccttgttctggtgctgaaggacctcaactttcagggcaagaccatcaacctggggccccagcggagctggttcctccgccagatggaactggataccaccttcctccgggagctcaacgtgctggattacagcctcctgatagccttccaacgtctccacgaggatgagaggggcccgggcagcagcctcatcttccgcacggccaggtctgtgcaaggggcacagagcccggaagagtcgagagcccaaaaccgccggctgctgcccgacgcccccaacgccctacacatcctggacgggcccgagcagcgctatttcctgggcgtcgtggatctcgccacagtctacgggctccgcaagcggctggagcacctgtggaagacactgcgctacccaggccggaccttctccactgtcagcccggctcgctacgcccgtcgcctctgccagtgggtggaggcgcacacggagtgacgggcgcccggccccactctccggatctggacgatgggctcacgccaggaacgccggttcccccgggcccgggcatctcgcctgcgcttcctcctgatggtcgccagagggcagcatcccctaactaataccgtaaccgcgcagtcccgtttgacggtggtgccgtgcccagcatcgtgccaaggactcccctactttagctcatttaatcctcaaaaaatgctattattctctttttacagaccatgaaatggaggctcagggggtgaagggactgatcaagatcattcagcaataaatgctggaaccaggactcaaccatggcttttggattccggagcctgtattcttaaccaccagctcctgcagcttggtcctcatgatctgggcaaggggggaggctgaaggctgcagccctcttgtcatccagatggggaaactgaggcccagagactttaaggggcgtaagcacgggtaagtggcaaggtcggccctgagtacccaggcctcccggccccctgctcctggcctgatactctagggatgcaggtgggagaagcaggggtcctgggggctgcctggagctctgggaggcattctgaacggggtctactactgatctcaggtgagctctgccctcctctgaaagtcacttttctcatcagttaaatgggggcaagggtccgtggtccgaccaaggtcttggcttcacagacatcaccaggagcctgcatgcccctgatcactccttctccttcctccaggaaactccagcctggcctctgaccccagttcaatccgaccatgcccaagcccaagcgggcctttcctccagaactgctccggggcctggctgtgtgactggagcaaggtgctaaacctctctgtgcctcgctggtctaatctgtaaaatgaaggaatggaaacagacctcattaactcattaaatatttgttgagcacctgccatgtgacag

SEQ ID NO: 407424 - DNA, 2140 bp, Homo sapiens
gagtctgggaacgtgcctggcttgaactcatggcctggtgctggtgatccagagtggatgagatacactcaggccttgccgtgggtcactcttgtccccctggcatccctgggaggggccgccctcccgggacgatttctcggaggtcctaacccaggttcacgagggcttcgagctgggcacgctggccggccccgcctttgcctggctgcgccgctccctgggcctggcggaggaggactatcaggctgcgctgggccccggcggcccctacctgcagttcctcagcacctccaagagcaaggccagcttcttcctgtcccacgaccagcgcttcttcctgaagacccaggggcgccgagaggtgcaggctctgctcgcccacctgccccgctacgtgcagcacctgcagcggcacccgcactcgctgctggcgcggttgctgggagtgcacagtctgcgggtggaccggggaaagaaggtgggtgaagccgaggcgaggtggctgggcggagcgggcggctggagggcgacagccggcctccctcactccctgtcccggcccccagacgtacttcatcgtcatgcagagcgtcttctaccccgccggccgcatctccgagaggtgagtatgacatcaaaggctgcgaggtgagccgctgggtggatcccgcccctgagggcagcccccttgttctggtgctgaaggacctcaactttcagggcaagaccatcaacctggggccccagcggagctggttcctccgccagatggaactggataccaccttcctccgggagctcaacgtgctggattacagcctcctgatagccttccaacgtctccacgaggatgagaggggcccgggcagcagcctcatcttccgcacggccaggtctgtgcaaggggcacagagcccggaagagtcgagagcccaaaaccgccggctgctgcccgacgcccccaacgccctacacatcctggacgggcccgagcagcgctatttcctgggcgtcgtggatctcgccacagtctacgggctccgcaagcggctggagcacctgtggaagacactgcgctacccaggccggaccttctccactgtcagcccggctcgctacgcccgtcgcctctgccagtgggtggaggcgcacacggagtgacgggcgcccggccccactctccggatctggacgatgggctcacgccaggaacgccggttcccccgggcccgggcatctcgcctgcgcttcctcctgatggtcgccagagggcagcatcccctaactaataccgtaaccgcgcagtcccgtttgacggtggtgccgtgcccagcatcgtgccaaggactcccctactttagctcatttaatcctcaaaaaatgctattattctctttttacagaccatgaaatggaggctcagggggtgaagggactgatcaagatcattcagcaataaatgctggaaccaggactcaaccatggcttttggattccggagcctgtattcttaaccaccagctcctgcagcttggtcctcatgatctgggcaaggggggaggctgaaggctgcagccctcttgtcatccagatggggaaactgaggcccagagactttaaggggcgtaagcacgggtaagtggcaaggtcggccctgagtacccaggcctcccggccccctgctcctggcctgatactctagggatgcaggtgggagaagcaggggtcctgggggctgcctggagctctgggaggcattctgaacggggtctactactgatctcaggtgagctctgccctcctctgaaagtcacttttctcatcagttaaatgggggcaagggtccgtggtccgaccaaggtcttggcttcacagacatcaccaggagcctgcatgcccctgatcactccttctccttcctccaggaaactccagcctggcctctgaccccagttcaatccgaccatgcccaagcccaagcgggcctttcctccagaactgctccggggcctggctgtgtgactggagcaaggtgctaaacctctctgtgcctcgctggtctaatctgtaaaatgaaggaatggaaacagacctcattaactcattaaatatttgttgagcacctgccatgtgacag

SEQ ID NO: 407425 - DNA, 1725 bp, Homo sapiens
gtttaggggtgggatcgggtcgggatccggaccagccaaggaagggtccaggtgccgcggatcttgagaaggaggcgtggcctggcgctgggattggcgccggatgcaccccgggttgtggagtttggggatcctcatccggcgccctctccccttccaggagtgcacagtctgcgggtggaccggggaaagaagacgtacttcatcgtcatgcagagcgtcttctaccccgccggccgcatctccgagaggtgaggggcagagtgtgtggagcaccgtggctggcacatgatgagcgctcaggtgggggcactgatgctccggcagggccccagcggagctggttcctccgccagatggaactggataccaccttcctccgggagctcaacgtgctggattacagcctcctgatagccttccaacgtctccacgaggatgagaggggcccgggcagcagcctcatcttccgcacggccaggtctgtgcaaggggcacagagcccggaagagtcgagagcccaaaaccgccggctgctgcccgacgcccccaacgccctacacatcctggacgggcccgagcagcgctatttcctgggcgtcgtggatctcgccacagtctacgggctccgcaagcggctggagcacctgtggaagacactgcgctacccaggccggaccttctccactgtcagcccggctcgctacgcccgtcgcctctgccagtgggtggaggcgcacacggagtgacgggcgcccggccccactctccggatctggacgatgggctcacgccaggaacgccggttcccccgggcccgggcatctcgcctgcgcttcctcctgatggtcgccagagggcagcatcccctaactaataccgtaaccgcgcagtcccgtttgacggtggtgccgtgcccagcatcgtgccaaggactcccctactttagctcatttaatcctcaaaaaatgctattattctctttttacagaccatgaaatggaggctcagggggtgaagggactgatcaagatcattcagcaataaatgctggaaccaggactcaaccatggcttttggattccggagcctgtattcttaaccaccagctcctgcagcttggtcctcatgatctgggcaaggggggaggctgaaggctgcagccctcttgtcatccagatggggaaactgaggcccagagactttaaggggcgtaagcacgggtaagtggcaaggtcggccctgagtacccaggcctcccggccccctgctcctggcctgatactctagggatgcaggtgggagaagcaggggtcctgggggctgcctggagctctgggaggcattctgaacggggtctactactgatctcaggtgagctctgccctcctctgaaagtcacttttctcatcagttaaatgggggcaagggtccgtggtccgaccaaggtcttggcttcacagacatcaccaggagcctgcatgcccctgatcactccttctccttcctccaggaaactccagcctggcctctgaccccagttcaatccgaccatgcccaagcccaagcgggcctttcctccagaactgctccggggcctggctgtgtgactggagcaaggtgctaaacctctctgtgcctcgctggtctaatctgtaaaatgaaggaatggaaacagacctcattaactcattaaatatttgttgagcacctgccatgtgacag

SEQ ID NO: 407426 - DNA, 226 bp, Homo sapiens
cttaaccaaaccacaaccgcctataagacttaattcaaatgtaccctccatgaaactttctctgactgactttattgccatactcatctcatagggttagtggtgcttttttccttctttaaaatatcaagtcctcctttccccctaaaaactccacattcagccttgtatgatgattagatatgcacttgagagccagcttctgtatctcatgtctttttaagaa

SEQ ID NO: 407427 - DNA, 756 bp, Homo sapiens
agcggagcgcgcatgcgcggtcgcctttgtgtgggtcgagcagcggcggcggcggcggcagtggcggtcccactggcaggcgggcaagaggggagtccgggcggcggccggcgtgggagccgggggaccaccatggtaaagaagcggaaaggccgcgtcgtgatcgactcggacacagaggacagcggcagcgacgagaacctggatcaggagctcttgtccctggcaaagcgaaagcgcagtgactctgaggagaaggagccgcctgtgagtcagcctgcagcctcgtcagactcggagacgtctgacagtgacgatgagtggacatttgggagcaataaaaataagaagaaaggaaaagccagaaaaatagagaagaaaggaaccatgaagaaacaggccaacaaaactgcctcctcaggcagttcagacaaagacagttcagctgagagctcagcccctgaggaaggtgaagtgtcagactctgacagcaacagctcctcttccagttcagattcagactcttcctcagaagatgaagagttccatgatggctatggagaagacctcatgggagatgaggaagacagggcccgtctggaacagatgacagagaaagagagagagcaagaactgttcaatcgcatagagaagagggaggtgttgaaaagaagattgaaatcaagaaaaaattaaaacagccaaaagaaaaacaaaaaaaaatgggggatattgtgggggggggaaaggggttga

SEQ ID NO: 407428 - DNA, 4635 bp, Homo sapiens
agcggagcgcgcatgcgcggtcgcctttgtgtgggtcgagcagcggcggcggcggcggcagtggcggtcccactggcaggcgggcaagaggggagtccgggcggcggccggcgtgggagccgggggaccaccatggtaaagaagcggaaaggccgcgtcgtgatcgactcggacacagaggacagcggcagcgacgagaacctggatcaggagctcttgtccctggcaaagcgaaagcgcagtgactctgaggagaaggagccgcctgtgagtcagcctgcagcctcgtcagactcggagacgtctgacagtgacgatgagtggacatttgggagcaataaaaataagaagaaaggaaaagccagaaaaatagagaagaaaggaaccatgaagaaacaggccaacaaaactgcctcctcaggcagttcagacaaagacagttcagctgagagctcagcccctgaggaaggtgaagtgtcagactctgacagcaacagctcctcttccagttcagattcagactcttcctcagaagatgaagagttccatgatggctatggagaagacctcatgggagatgaggaagacagggcccgtctggaacagatgacagagaaagagagagagcaagaactgttcaatcgcatagagaagagggaggtgttgaaaagaagatttgaaatcaagaaaaaactaaaaacagccaaaaagaaagaaaagaaagaaaagaagaaaaagcaagaagaggagcaagaaaagaaaaaactgacacagattcaagaatctcaggtaacatcccacaacaaggaacggcgttccaagcgggatgagaaactagacaagaaatctcaagccatggaggagctaaaagcagagcgagaaaaacgaaagaacagaacagctgagctccttgccaaaaaacagccattaaaaaccagtgaggtctactctgatgatgaagaggaggaagaggatgacaaatccagtgaaaagtcagaccgctcatcacgaacatcatcgtctgatgaagaagaggagaaagaagagatccctcccaaatcccaaccagtttccttacctgaagaattgaatcgggttcgattatcacggcataagctagaacgctggtgtcacatgcccttctttgctaaaactgtcacaggatgttttgtgcggattggcatcggaaaccacaacagcaaaccagtttaccgggtcgctgagattacgggtgttgtggaaactgccaaagtttaccaactaggtggcaccagaacaaacaaagggctgcaactacggcatggcaatgaccaacgcgtgttccgtttagagtttgtctcaaaccaagaattcaccgaaagtgagtttatgaagtggaaagaagcgatgttctctgctggcatgcagttgcccactctagatgaaatcaataaaaaggaattatctattaaagaagctcttaattataaattcaatgatcaggacattgaagagattgtaaaagagaaagaaaggttcagaaaagctccacccaactacgctatgaagaagactcagctactgaaggaaaaggccatggctgaggacctgggggatcaggacaaggccaaacaaatccaagatcaactgaatgagctggaggaacgggcagaggccctggaccgccagcggaccaagaacatatccgctatcagttacatcaaccagcggaaccgggagtggaacattgtagagtctgagaaggcccttgtggctgaaagtcacaacatgaaaaaccaacagatggatccctttactcggcggcagtgcaagcctaccatcgtttctaattccagagacccagctgttcaagctgccatcttggcccagctgaatgcaaaatacggttctggagtgttaccagatgctccaaaggaaatgagcaagggtcaaggcaaagataaagatttgaattctaagtcagccagtgacctctcagaagatctgttcaaagtacacgattttgatgtgaagattgacttacaagttcccagctcagagtcaaaggctttagccatcacctccaaggctccgccagccaaggatggggctccaaggagatctctgaacttggaagactacaaaaaacgacgagggcttatttgagcacacccagcctgctgcttctgaccctgcatgccccatcgcagcgtcccacctttcctcctttcctttgatttagcctctttgggctggagcagctgttgaactgggaagagactctaaactgccagtcatctgtaatataaaccatttgctgtatagacctcctttgtctgcacaccatctcccaccagcctcccctcccccagggccccacccagtgtgggcctgggctctcttgggctttatccatgtctttagatttgtgtttgccttttgtttttttaaccgcgcagttcattggccactctgcacgcattcagtattaccatggagctgggaatcttgctggagcccctggggcaatagcagcagcaccaggcggtctcctctacagactgccttggcccacccattgaacattcggcacgtgaccttgtggggggagcggggattgggcacctgcgatcctctttcctctcttcatctttctcttctgcccttctttttggaagaaggggtttcaaaaccagtttagtttccaaaaagtgtacatttgtggggggggggggtctaatttgagagcgagagtgtgtatgtgtgtgtgtgtaagtgtgtggatttttttatcatttttttaaaatgcagtactctttgtatcagtctgtcatgggtctatagctgtttcagatttttttcagctgtacttgagcatctgaaactgcaagaaagaaactcattaaatgtgattcttcttactaaacaggcctgactgctgtagctgtgtaacttccccattcccacctactcttcccatcctttcccaactttggagaaaactccccagtttagccccctgacctgcaggctgtgtcctggcaggtgtgggagggaagcccatggccaggtaccagggagggcagtgaatgtcttgctcttcccatgggtacagcccacagcttcttggctgaacgtagaacttctttttctcacccagtataccagcctcttcctggtgattctgttttgctgctttggcaagaactacattttgtttttaagagaaatttctgaatatgaatgtggagagcaaacacaaaaagatttaggttacgccgggtgcagtagctcacgcctgtaatcccagcactttgggaggcctaggcgggtggatcacctgaggtcaggagttcaagaccaatctgactaacacggtgaaaccccatctctactaaaactacaaaacttagccgggcatggtggtgcgtgcctgtaatcccagctactcggggggctgagacaggagaatcccttgaacctgggaggcggaggttgtggtgagccaagatcgtgccactgcactccagtctgggtgacagagtgagactccgcctcaaaaagatttaggttgcaaatgtttcaagcatgtgcagttttgtgtgtgtgtatacatatatatggtcagcatatatattgtgcagctagggcgaagccagcagaggtgtgtgtatgtctttatgaaatgtttgaaaagagataagctgactgcttgataatcactctcaggtgtaaagctccaagtgtaaataaaagtggcatttaacaaatctttcagaacaaagtacagctgactatatataccaagagctaagctaaaggaacagctgagagctccgatctccacgagagactaatctaaaagctctgctttgtacttcctcaccctgctttcgtacaaggaagggggacgatgggaaatcatggacttgtaagttgtatttaaacataaaaatgaacttggtaacttctgggtttagtagagcctcagtgtcgctttaacttagtttactttttttttatttttaaagcagcaatggatggttttaaaggagtattatgattgtaaaattgctaaatatgactgtaacacagctttgtggtagctgtgacacagttcacttgggcaaaggagtggtgatggactcgttaaaatcatatatacttgaatagtccattgaccgaaactctttatagactattgtgtaaatgtggaatcacagactgttaacattgcctggacttcagcagagtcctggagctgctgggacctctcctatcatgatgaacttggacttttttttttgatttctggttttaaaaaacataaaattatagaatccagataattcgctggagtcattctgatccaccatgtagatctgtatttagtatcatttggatttggagaagtgttgattacattatggctgtgtaataaaatttttattaaaactgcaaaaaaaaaaaaaaaaaaaaaaaaaaaaaaaaaaaaaaaaaaaaaaaaaaaaaaaaaaacaagaaacaaacgaagaaaaaaaaaaaaaaaaagggggggggaggtagggaaaaacagacagcagaagcggggaccagaaatgtaatgagacccacagtcataaagaaaagaaggcagcccccaaaaaggacatgaac

SEQ ID NO: 407429 - DNA, 4304 bp, Homo sapiens
tcagcaagggacaaagtcctgccgtggcttccttgctgtccctttgaccaagtgaccctgcttctccttcagggtctctgcatgtgttttttcctttgctggaatgctctttggtggtatagctcggggtatagctgataccaccatggtaaagaagcggaaaggccgcgtcgtgatcgactcggacacagaggacagcggcagcgacgagaacctggatcaggagctcttgtccctggcaaagcgaaagcgcagtgactctgaggagaaggagccgcctgtgagtcagcctgcagcctcgtcagactcggagacgtctgacagtgacgatgaggtgaagtgtcagactctgacagcaacagctcctcttccagttcagattcagactcttcctcagaagatgaagagttccatgatggctatggagaagacctcatgggagatgaggaagacagggcccgtctggaacagatgacagagaaagagagagagcaagaactgttcaatcgcatagagaagagggaggtgttgaaaagaagatttgaaatcaagaaaaaactaaaaacagccaaaaagaaagaaaagaaagaaaagaagaaaaagcaagaagaggagcaagaaaagaaaaaactgacacagattcaagaatctcaggtaacatcccacaacaaggaacggcgttccaagcgggatgagaaactagacaagaaatctcaagccatggaggagctaaaagcagagcgagaaaaacgaaagaacagaacagctgagctccttgccaaaaaacagccattaaaaaccagtgaggtctactctgatgatgaagaggaggaagaggatgacaaatccagtgaaaagtcagaccgctcatcacgaacatcatcgtctgatgaagaagaggagaaagaagagatccctcccaaatcccaaccagtttccttacctgaagaattgaatcgggttcgattatcacggcataagctagaacgctggtgtcacatgcccttctttgctaaaactgtcacaggatgttttgtgcggattggcatcggaaaccacaacagcaaaccagtttaccgggtcgctgagattacgggtgttgtggaaactgccaaagtttaccaactaggtggcaccagaacaaacaaagggctgcaactacggcatggcaatgaccaacgcgtgttccgtttagagtttgtctcaaaccaagaattcaccgaaagtgagtttatgaagtggaaagaagcgatgttctctgctggcatgcagttgcccactctagatgaaatcaataaaaaggaattatctattaaagaagctcttaattataaattcaatgatcaggacattgaagagattgtaaaagagaaagaaaggttcagaaaagctccacccaactacgctatgaagaagactcagctactgaaggaaaaggccatggctgaggacctgggggatcaggacaaggccaaacaaatccaagatcaactgaatgagctggaggaacgggcagaggccctggaccgccagcggaccaagaacatatccgctatcagttacatcaaccagcggaaccgggagtggaacattgtagagtctgagaaggcccttgtggctgaaagtcacaacatgaaaaaccaacagatggatccctttactcggcggcagtgcaagcctaccatcgtttctaattccagagacccagctgttcaagctgccatcttggcccagctgaatgcaaaatacggttctggagtgttaccagatgctccaaaggaaatgagcaagggtcaaggcaaagataaagatttgaattctaagtcagccagtgacctctcagaagatctgttcaaagtacacgattttgatgtgaagattgacttacaagttcccagctcagagtcaaaggctttagccatcacctccaaggctccgccagccaaggatggggctccaaggagatctctgaacttggaagactacaaaaaacgacgagggcttatttgagcacacccagcctgctgcttctgaccctgcatgccccatcgcagcgtcccacctttcctcctttcctttgatttagcctctttgggctggagcagctgttgaactgggaagagactctaaactgccagtcatctgtaatataaaccatttgctgtatagacctcctttgtctgcacaccatctcccaccagcctcccctcccccagggccccacccagtgtgggcctgggctctcttgggctttatccatgtctttagatttgtgtttgccttttgtttttttaaccgcgcagttcattggccactctgcacgcattcagtattaccatggagctgggaatcttgctggagcccctggggcaatagcagcagcaccaggcggtctcctctacagactgccttggcccacccattgaacattcggcacgtgaccttgtggggggagcggggattgggcacctgcgatcctctttcctctcttcatctttctcttctgcccttctttttggaagaaggggtttcaaaaccagtttagtttccaaaaagtgtacatttgtggggggggggggtctaatttgagagcgagagtgtgtatgtgtgtgtgtgtaagtgtgtggatttttttatcatttttttaaaatgcagtactctttgtatcagtctgtcatgggtctatagctgtttcagatttttttcagctgtacttgagcatctgaaactgcaagaaagaaactcattaaatgtgattcttcttactaaacaggcctgactgctgtagctgtgtaacttccccattcccacctactcttcccatcctttcccaactttggagaaaactccccagtttagccccctgacctgcaggctgtgtcctggcaggtgtgggagggaagcccatggccaggtaccagggagggcagtgaatgtcttgctcttcccatgggtacagcccacagcttcttggctgaacgtagaacttctttttctcacccagtataccagcctcttcctggtgattctgttttgctgctttggcaagaactacattttgtttttaagagaaatttctgaatatgaatgtggagagcaaacacaaaaagatttaggttacgccgggtgcagtagctcacgcctgtaatcccagcactttgggaggcctaggcgggtggatcacctgaggtcaggagttcaagaccaatctgactaacacggtgaaaccccatctctactaaaactacaaaacttagccgggcatggtggtgcgtgcctgtaatcccagctactcggggggctgagacaggagaatcccttgaacctgggaggcggaggttgtggtgagccaagatcgtgccactgcactccagtctgggtgacagagtgagactccgcctcaaaaagatttaggttgcaaatgtttcaagcatgtgcagttttgtgtgtgtgtatacatatatatggtcagcatatatattgtgcagctagggcgaagccagcagaggtgtgtgtatgtctttatgaaatgtttgaaaagagataagctgactgcttgataatcactctcaggtgtaaagctccaagtgtaaataaaagtggcatttaacaaatctttcagaacaaagtacagctgactatatataccaagagctaagctaaaggaacagctgagagctccgatctccacgagagactaatctaaaagctctgctttgtacttcctcaccctgctttcgtacaaggaagggggacgatgggaaatcatggacttgtaagttgtatttaaacataaaaatgaacttggtaacttctgggtttagtagagcctcagtgtcgctttaacttagtttactttttttttatttttaaagcagcaatggatggttttaaaggagtattatgattgtaaaattgctaaatatgactgtaacacagctttgtggtagctgtgacacagttcacttgggcaaaggagtggtgatggactcgttaaaatcatatatacttgaatagtccattgaccgaaactctttatagactattgtgtaaatgtggaatcacagactgttaacattgcctggacttcagcagagtcctggagctgctgggacctctcctatcatgatgaacttggacttttttttttgatttctggttttaaaaaacataaaattatagaatccagataattcgctggagtcattctgatccaccatgtagatctgtatttagtatcatttggatttggagaagtgttgattacattatggctgtgtaataaaatttttattaaaactgca

SEQ ID NO: 407430 - DNA, 5022 bp, Homo sapiens
agcggagcgcgcatgcgcggtcgcctttgtgtgggtcgagcagcggcggcggcggcggcagtggcggtcccactggcaggcgggcaagaggggagtccgggcggcggccggcgtgggagccgggggaccaccatggtaaagaagcggaaaggccgcgtcgtgatcgactcggacacagaggacagcggcagcgacgagaacctggatcaggagctcttgtccctggcaaagcgaaagcgcagtgactctgaggagaaggagccgcctgtgagtcagcctgcagcctcgtcagactcggagacgtctgacagtgacgatgagtggacatttgggagcaataaaaataagaagaaaggaaaagccagaaaaatagagaagaaaggaaccatgaagaaacaggccaacaaaactgcctcctcaggcagttcagacaaagacagttcagctgagagctcagcccctgaggaaggtgaagtgtcagactctgacagcaacagctcctcttccagttcagattcagactcttcctcagaagatgaagagttccatgatggctatggagaagacctcatgggagatgaggaagacagggcccgtctggaacagatgacagagaaagagagagagcaagaactgttcaatcgcatagagaagagggaggtgttgaaaagaagatttgaaatcaagaaaaaactaaaaacagccaaaaagaaagaaaagaaagaaaagaagaaaaagcaagaagaggagcaagaaaagaaaaaactgacacagattcaagaatctcaggtaacatcccacaacaaggaacggcgttccaagcgggatgagaaactagacaagaaatctcaagccatggaggagctaaaagcagagcgagaaaaacgaaagaacagaacagctgagctccttgccaaaaaacagccattaaaaaccagtgaggtctactctgatgatgaagaggaggaagaggatgacaaatccagtgaaaagtcagaccgctcatcacgaacatcatcgtctgatgaagaagaggagaaagaagagatccctcccaaatcccaaccagtttccttacctgaagaattgaatcgggttcgattatcacggcataagctagaacgctggtgtcacatgcccttctttgctaaaactgtcacaggatgttttgtgcggattggcatcggaaaccacaacagcaaaccagtttaccgggtcgctgagattacgggtgttgtggaaactgccaaagtttaccaactaggtggcaccagaacaaacaaagggctgcaactacggcatggcaatgaccaacgcgtgttccgtttagagtttgtctcaaaccaagaattcaccgaaagtgagtttatgaagtggaaagaagcgatgttctctgctggcatgcagttgcccactctagatgaaatcaataaaaaggaattatctattaaagaagctcttaattataaattcaatgatcaggacattgaagagattgtaaaagagaaagaaaggttcagaaaagctccacccaactacgctatgaagaagactcagctactgaaggaaaaggccatggctgaggacctgggggatcaggacaaggccaaacaaatccaagatcaactgaatgagctggaggaacgggcagaggccctggaccgccagcggaccaagaacatatccgctatcagttacatcaaccagcggaaccgggagtggaacattgtagagtctgagaaggcccttgtggctgaaagtcacaacatgaaaaaccaacagatggatccctttactcggcggcagtgcaagcctaccatcgtttctaattccagagacccagctgttcaagctgccatcttggcccagctgaatgcaaaatacggttctggagtgttaccagatgctccaaaggaaatgagcaagggtcaaggcaaagataaagatttgaattctaagtcagccagtgacctctcagaagatctgttcaaagtacacgattttgatgtgaagattgacttacaagttcccagctcagagtcaaaggctttagccatcacctccaaggctccgccagccaaggatggggctccaaggagatctctgaacttggaagactacaaaaaacgacgagggcttatttgagcacacccagcctgctgcttctgaccctgcatgccccatcgcagcgtcccacctttcctcctttcctttgatttagcctctttgggctggagcagctgttgaactgggaagagactctaaactgccagtcatctgtaatataaaccatttgctgtatagacctcctttgtctgcacaccatctcccaccagcctcccctcccccagggccccacccagtgtgggcctgggctctcttgggctttatccatgtctttagatttgtgtttgccttttgtttttttaaccgcgcagttcattggccactctgcacgcattcagtattaccatggagctgggaatcttgctggagcccctggggcaatagcagcagcaccaggcggtctcctctacagactgccttggcccacccattgaacattcggcacgtgaccttgtggggggagcggggattgggcacctgcgatcctctttcctctcttcatctttctcttctgcccttctttttggaagaaggggtttcaaaaccagtttagtttccaaaaagtgtacatttgtggggggggggggtctaatttgagagcgagagtgtgtatgtgtgtgtgtgtaagtgtgtggatttttttatcatttttttaaaatgcagtactctttgtatcagtctgtcatgggtctatagctgtttcagatttttttcagctgtacttgagcatctgaaactgcaagaaagaaactcattaaatgtgattcttcttactaaacaggcctgactgctgtagctgtgtaacttccccattcccacctactcttcccatcctttcccaactttggagaaaactccccagtttagccccctgacctgcaggctgtgtcctggcaggtgtgggagggaagcccatggccaggtaccagggagggcagtgaatgtcttgctcttcccatgggtacagcccacagcttcttggctgaacgtagaacttctttttctcacccagtataccagcctcttcctggtgattctgttttgctgctttggcaagaactacattttgtttttaagagaaatttctgaatatgaatgtggagagcaaacacaaaaagatttaggttacgccgggtgcagtagctcacgcctgtaatcccagcactttgggaggcctaggcgggtggatcacctgaggtcaggagttcaagaccaatctgactaacacggtgaaaccccatctctactaaaactacaaaacttagccgggcatggtggtgcgtgcctgtaatcccagctactcggggggctgagacaggagaatcccttgaacctgggaggcggaggttgtggtgagccaagatcgtgccactgcactccagtctgggtgacagagtgagactccgcctcaaaaagatttaggttgcaaatgtttcaagcatgtgcagttttgtgtgtgtgtatacatatatatggtcagcatatatattgtgcagctagggcgaagccagcagaggtgtgtgtatgtctttatgaaatgtttgaaaagagataagctgactgcttgataatcactctcaggtgtaaagctccaagtgtaaataaaagtggcatttaacaaatctttcagaacaaagtacagctgactatatataccaagagctaagctaaaggaacagctgagagctccgatctccacgagagactaatctaaaagctctgctttgtacttcctcaccctgctttcgtacaaggaagggggacgatgggaaatcatggacttgtaagttgtatttaaacataaaaatgaacttggtaacttctgggtttagtagagcctcagtgtcgctttaacttagtttactttttttttatttttaaagcagcaatggatggttttaaaggagtattatgattgtaaaattgctaaatatgactgtaacacagctttgtggtagctgtgacacagttcacttgggcaaaggagtggtgatggactcgttaaaatcatatatacttgaatagtccattgaccgaaactctttatagactattgtgtaaatgtggaatcacagactgttaacattgcctggacttcagcagagtcctggagctgctgggacctctcctatcatgatgaacttggacttttttttttgatttctggttttaaaaaacataaaattatagaatccagataattcgctggagtcattctgatccaccatgtagatctgtatttagtatcatttggatttggagaagtgttgattacattatggctgtgtaataaaatttttattaaaactgcatcacactgtagccactttgccaccacctccccacatgtagccgctgaaacccccacgagatgccaatgcacacagcagggagaaaagccaaccaaagaagaccgaagggtatctttccacccgagtagcctctgtagtgattgggaccaagactaaggacttgtctccaatctcagctgaggcagtgcctctgaaccaagatcttggtcaggcattaagacactggctttgtcctaccaactaggatttcttggtggttcacactatttcttgtgctggggaattccctcattgggcccctcctccctccacagtgtggtttcagtgttgaagggtgcagcacccaaggttgtttttatgcattttttcagttccttccaagaagcaaaaaggccagtgtccatctgcctagttcataatgtttataggtctgtttgtctgtcttgcttctggcaggtgtagggaaagtctactgcctgccactcccttcaaaaagaatgtttttgcttttgtgaagtcctgacttgccactcaaactgtaccaatattgtaaataaatgttatgccattttaaaaaagggat

SEQ ID NO: 407431 - DNA, 3752 bp, Homo sapiens
agactgatgcagatgaaccctatagcttagctcccacatatgagtgaaaatatatgatgcttggttttccattcttgagttacttaacttcgaatgatagtctccaattctatacaggttgctgtgaatatcattatttccttcctttttatggcagcctcatttgaaacagctcatactactggtcaggaacaggatcctattacaagtctttgctggtgcttcatttacttctcctcctaggccagtcacatgtactttggttaagttttgaggagttgatattatttttctgtcttgttctgtttttatgatgaacattttttccagtgcccctttgttcctcttaggaaagaagagatccctcccaaatcccaaccagtttccttacctgaagaattgaatcgggttcgattatcacggcataagctagaacgctggtgtcacatgcccttctttgctaaaactgtcacaggatgttttgtgcggattggcatcggaaaccacaacagcaaaccagtttaccgggtcgctgagattacgggtgttgtggaaactgccaaagtttaccaactaggtggcaccagaacaaacaaagggctgcaactacggcatggcaatgaccaacgcgtgttccgtttagagtttgtctcaaaccaagaattcaccgaaagtgagtttatgaagtggaaagaagcgatgttctctgctggcatgcagttgcccactctagatgaaatcaataaaaaggaattatctattaaagaagctcttaattataaattcaatgatcaggacattgaagagattgtaaaagagaaagaaaggttcagaaaagctccacccaactacgctatgaagaagactcagctactgaaggaaaaggccatggctgaggacctgggggatcaggacaaggccaaacaaatccaagatcaactgaatgagctggaggaacgggcagaggccctggaccgccagcggaccaagaacatatccgctatcagttacatcaaccagcggaaccgggagtggaacattgtagagtctgagaaggcccttgtggctgaaagtcacaacatgaaaaaccaacagatggatccctttactcggcggcagtgcaagcctaccatcgtttctaattccagagacccagctgttcaagctgccatcttggcccagctgaatgcaaaatacggttctggagtgttaccagatgctccaaaggaaatgagcaagggtcaaggcaaagataaagatttgaattctaagtcagccagtgacctctcagaagatctgttcaaagtacacgattttgatgtgaagattgacttacaagttcccagctcagagtcaaaggctttagccatcacctccaaggctccgccagccaaggatggggctccaaggagatctctgaacttggaagactacaaaaaacgacgagggcttatttgagcacacccagcctgctgcttctgaccctgcatgccccatcgcagcgtcccacctttcctcctttcctttgatttagcctctttgggctggagcagctgttgaactgggaagagactctaaactgccagtcatctgtaatataaaccatttgctgtatagacctcctttgtctgcacaccatctcccaccagcctcccctcccccagggccccacccagtgtgggcctgggctctcttgggctttatccatgtctttagatttgtgtttgccttttgtttttttaaccgcgcagttcattggccactctgcacgcattcagtattaccatggagctgggaatcttgctggagcccctggggcaatagcagcagcaccaggcggtctcctctacagactgccttggcccacccattgaacattcggcacgtgaccttgtggggggagcggggattgggcacctgcgatcctctttcctctcttcatctttctcttctgcccttctttttggaagaaggggtttcaaaaccagtttagtttccaaaaagtgtacatttgtggggggggggggtctaatttgagagcgagagtgtgtatgtgtgtgtgtgtaagtgtgtggatttttttatcatttttttaaaatgcagtactctttgtatcagtctgtcatgggtctatagctgtttcagatttttttcagctgtacttgagcatctgaaactgcaagaaagaaactcattaaatgtgattcttcttactaaacaggcctgactgctgtagctgtgtaacttccccattcccacctactcttcccatcctttcccaactttggagaaaactccccagtttagccccctgacctgcaggctgtgtcctggcaggtgtgggagggaagcccatggccaggtaccagggagggcagtgaatgtcttgctcttcccatgggtacagcccacagcttcttggctgaacgtagaacttctttttctcacccagtataccagcctcttcctggtgattctgttttgctgctttggcaagaactacattttgtttttaagagaaatttctgaatatgaatgtggagagcaaacacaaaaagatttaggttacgccgggtgcagtagctcacgcctgtaatcccagcactttgggaggcctaggcgggtggatcacctgaggtcaggagttcaagaccaatctgactaacacggtgaaaccccatctctactaaaactacaaaacttagccgggcatggtggtgcgtgcctgtaatcccagctactcggggggctgagacaggagaatcccttgaacctgggaggcggaggttgtggtgagccaagatcgtgccactgcactccagtctgggtgacagagtgagactccgcctcaaaaagatttaggttgcaaatgtttcaagcatgtgcagttttgtgtgtgtgtatacatatatatggtcagcatatatattgtgcagctagggcgaagccagcagaggtgtgtgtatgtctttatgaaatgtttgaaaagagataagctgactgcttgataatcactctcaggtgtaaagctccaagtgtaaataaaagtggcatttaacaaatctttcagaacaaagtacagctgactatatataccaagagctaagctaaaggaacagctgagagctccgatctccacgagagactaatctaaaagctctgctttgtacttcctcaccctgctttcgtacaaggaagggggacgatgggaaatcatggacttgtaagttgtatttaaacataaaaatgaacttggtaacttctgggtttagtagagcctcagtgtcgctttaacttagtttactttttttttatttttaaagcagcaatggatggttttaaaggagtattatgattgtaaaattgctaaatatgactgtaacacagctttgtggtagctgtgacacagttcacttgggcaaaggagtggtgatggactcgttaaaatcatatatacttgaatagtccattgaccgaaactctttatagactattgtgtaaatgtggaatcacagactgttaacattgcctggacttcagcagagtcctggagctgctgggacctctcctatcatgatgaacttggacttttttttttgatttctggttttaaaaaacataaaattatagaatccagataattcgctggagtcattctgatccaccatgtagatctgtatttagtatcatttggatttggagaagtgttgattacattatggctgtgtaataaaatttttattaaaactgca

SEQ ID NO: 407432 - DNA, 2753 bp, Homo sapiens
tgagcttatggtgaatgagaggaggggctggaggtgcagttctgtggtgcatgctttctgtttcaggctgaaagtcacaacatgaaaaaccaacagatggatccctttactcggcggcagtgcaagcctaccatcgtttctaattccagagacccagctgttcaagctgccatcttggcccagctgaatgcaaaatacggttctggagtgttaccagatgctccaaaggaaatgagcaagggtcaaggcaaagataaagatttgaattctaagtcagccagtgacctctcagaagatctgttcaaagtacacgattttgatgtgaagattgacttacaagttcccagctcagagtcaaaggctttagccatcacctccaaggctccgccagccaaggatggggctccaaggagatctctgaacttggaagactacaaaaaacgacgagggcttatttgagcacacccagcctgctgcttctgaccctgcatgccccatcgcagcgtcccacctttcctcctttcctttgatttagcctctttgggctggagcagctgttgaactgggaagagactctaaactgccagtcatctgtaatataaaccatttgctgtatagacctcctttgtctgcacaccatctcccaccagcctcccctcccccagggccccacccagtgtgggcctgggctctcttgggctttatccatgtctttagatttgtgtttgccttttgtttttttaaccgcgcagttcattggccactctgcacgcattcagtattaccatggagctgggaatcttgctggagcccctggggcaatagcagcagcaccaggcggtctcctctacagactgccttggcccacccattgaacattcggcacgtgaccttgtggggggagcggggattgggcacctgcgatcctctttcctctcttcatctttctcttctgcccttctttttggaagaaggggtttcaaaaccagtttagtttccaaaaagtgtacatttgtggggggggggggtctaatttgagagcgagagtgtgtatgtgtgtgtgtgtaagtgtgtggatttttttatcatttttttaaaatgcagtactctttgtatcagtctgtcatgggtctatagctgtttcagatttttttcagctgtacttgagcatctgaaactgcaagaaagaaactcattaaatgtgattcttcttactaaacaggcctgactgctgtagctgtgtaacttccccattcccacctactcttcccatcctttcccaactttggagaaaactccccagtttagccccctgacctgcaggctgtgtcctggcaggtgtgggagggaagcccatggccaggtaccagggagggcagtgaatgtcttgctcttcccatgggtacagcccacagcttcttggctgaacgtagaacttctttttctcacccagtataccagcctcttcctggtgattctgttttgctgctttggcaagaactacattttgtttttaagagaaatttctgaatatgaatgtggagagcaaacacaaaaagatttaggttacgccgggtgcagtagctcacgcctgtaatcccagcactttgggaggcctaggcgggtggatcacctgaggtcaggagttcaagaccaatctgactaacacggtgaaaccccatctctactaaaactacaaaacttagccgggcatggtggtgcgtgcctgtaatcccagctactcggggggctgagacaggagaatcccttgaacctgggaggcggaggttgtggtgagccaagatcgtgccactgcactccagtctgggtgacagagtgagactccgcctcaaaaagatttaggttgcaaatgtttcaagcatgtgcagttttgtgtgtgtgtatacatatatatggtcagcatatatattgtgcagctagggcgaagccagcagaggtgtgtgtatgtctttatgaaatgtttgaaaagagataagctgactgcttgataatcactctcaggtgtaaagctccaagtgtaaataaaagtggcatttaacaaatctttcagaacaaagtacagctgactatatataccaagagctaagctaaaggaacagctgagagctccgatctccacgagagactaatctaaaagctctgctttgtacttcctcaccctgctttcgtacaaggaagggggacgatgggaaatcatggacttgtaagttgtatttaaacataaaaatgaacttggtaacttctgggtttagtagagcctcagtgtcgctttaacttagtttactttttttttatttttaaagcagcaatggatggttttaaaggagtattatgattgtaaaattgctaaatatgactgtaacacagctttgtggtagctgtgacacagttcacttgggcaaaggagtggtgatggactcgttaaaatcatatatacttgaatagtccattgaccgaaactctttatagactattgtgtaaatgtggaatcacagactgttaacattgcctggacttcagcagagtcctggagctgctgggacctctcctatcatgatgaacttggacttttttttttgatttctggttttaaaaaacataaaattatagaatccagataattcgctggagtcattctgatccaccatgtagatctgtatttagtatcatttggatttggagaagtgttgattacattatggctgtgtaataaaatttttattaaaactgca

SEQ ID NO: 407433 - DNA, 3048 bp, Homo sapiens
  misc_feature (2984)..(2984): n is a, c, g, or t
  misc_feature (3017)..(3017): n is a, c, g, or t
agcggagcgcgcatgcgcggtcgcctttgtgtgggtcgagcagcggcggcggcggcggcagtggcggtcccactggcaggcgggcaagaggggagtccgggcggcggccggcgtgggagccgggggaccaccatggtaaagaagcggaaaggccgcgtcgtgatcgactcggacacagaggacagcggcagcgacgagaacctggatcaggagctcttgtccctggcaaagcgaaagcgcagtgactctgaggagaaggagccgcctgtgagtcagcctgcagcctcgtcagactcggagacgtctgacagtgacgatgagtggacatttgggagcaataaaaataagaagaaaggaaaagccagaaaaatagagaagaaaggaaccatgaagaaacaggccaacaaaactgcctcctcaggcagttcagacaaagacagttcagctgagagctcagcccctgaggaaggtgaagtgtcagactctgacagcaacagctcctcttccagttcagattcagactcttcctcagaagatgaagagttccatgatggctatggagaagacctcatgggagatgaggaagacagggcccgtctggaacagatgacagagaaagagagagagcaagaactgttcaatcgcatagagaagagggaggtgttgaaaagaagatttgaaatcaagaaaaaactaaaaacagccaaaaagaaagaaaagaaagaaaagaagaaaaagcaagaagaggagcaagaaaagaaaaaactgacacagattcaagaatctcaggtaacatcccacaacaaggaacggcgttccaagcgggatgagaaactagacaagaaatctcaagccatggaggagctaaaagcagagcgagaaaaacgaaagaacagaacagctgagctccttgccaaaaaacagccattaaaaaccagtgaggtctactctgatgatgaagaggaggaagaggatgacaaatccagtgaaaagtcagaccgctcatcacgaacatcatcgtctgatgaagaagaggagaaagaagagatccctcccaaatcccaaccagtttccttacctgaagaattgaatcgggttcgattatcacggcataagctagaacgctggtgtcacatgcccttctttgctaaaactgtcacaggatgttttgtgcggattggcatcggaaaccacaacagcaaaccagtttaccgggtcgctgagattacgggtgttgtggaaactgccaaagtttaccaactaggtggcaccagaacaaacaaagggctgcaactacggcatggcaatgaccaacgcgtgttccgtttagagtttgtctcaaaccaagaattcaccgaaagtgagtttatgaagtggaaagaagcgatgttctctgctggcatgcagttgcccactctagatgaaatcaataaaaaggaattatctattaaagaagctcttaattataaattcaatgatcaggacattgaagagattgtaaaagagaaagaaaggttcagaaaagctccacccaactacgctatgaagaagactcagctactgaaggaaaaggccatggctgaggacctgggggatcaggacaaggccaaacaaatccaagatcaactgaatgagctggaggaacgggcagaggccctggaccgccagcggaccaagaacatatccgctatcagttacatcaaccagcggaaccgggagtggaacattgtagagtctgagaaggcccttgtggctgaaagtcacaacatgaaaaaccaacagatggatccctttactcggcggcagtgcaagcctaccatcgtttctaattccagagacccagctgttcaagctgccatcttggcccagctgaatgcaaaatacggttctggagtgttaccagatgctccaaaggaaatgagcaagggtcaaggcaaagataaagatttgaattctaagtcagccagtgacctctcagaagatctgttcaaagtacacgattttgatgtgaagattgacttacaagttcccagctcagagtcaaaggctttagccatcacctccaaggctccgccagccaaggatggggctccaaggagatctctgaacttggaagactacaaaaaacgacgagggcttatttgagcacacccagcctgctgcttctgaccctgcatgccccatcgcagcgtcccacctttcctcctttcctttgatttagcctctttgggctggagcagctgttgaactgggaagagactctaaactgccagtcatctgtaatataaaccatttgctgtatagacctcctttgtctgcacaccatctcccaccagcctcccctcccccagggccccacccagtgtgggcctgggctctcttgggctttatccatgtctttagatttgtgtttgccttttgtttttttaaccgcgcagttcattggccactctgcacgcattcagtattaccatggagctgggaatcttgctggagcccctggggcaatagcagcagcaccaggcggtctcctctacagactgccttggcccacccattgaacattcggcacgtgaccttgtggggggagcggggattgggcacctgcgatcctctttcctctcttcatctttctcttctgcccttctttttggaagaaggggtttcaaaaccagtttagtttccaaaaagtgtacatttgtggggggggggggtctaatttgagagcgagagtgtgtatgtgtgtgtgtgtaagtgtgtggatttttttatcatttttttaaaatgcagtactctttgtatcagtctgtcatgggtctatagctgtttcagatttttttcagctgtacttgagcatctgaaactgcaagaaagaaactcattaaatgtgattcttcttactaccactgggagcacaatgcccacatcattttaagaagagtttatgtgcagcatttaaatccactgtgtttttccttgttaantaaaacagacatgggctttgatttttttcatantattagaccatatctcataaaaccttttgaa

SEQ ID NO: 407434 - DNA, 1940 bp, Homo sapiens
tgcgtcgggccagtcaggataagatgacacatggtcttgagatgtctcctacgagaatcctggttcatgattagtgtcttgagattctcaccatactcatcatatacacagcccgaggcaggtcaagcacgtacgtctgccttcctagaaacgaatagtaccgaggaattgcgcagttgactggacgtgtcgagttgaacatgaagcactctattcagacgagtgagtgccagaaccgaggctccgaatattcaaaacttactgcacccgagactggaagagagagcaagaactgttcaatcgcatagagaagagggaggtgttgaaaagaagatttgaaatcaagaaaaaactaaaaacagccaaaaagaaagaaaagaaagaaaagaagaaaaagcaagaagaggagcaagaaaagaaaaaactgacacagattcaagaatctcaggtaacatcccacaacaaggaacggcgttccaagcgggatgagaaactagacaagaaatctcaagccatggaggagctaaaagctgagctccttgccaaaaaacagccattaaaaaccatgaatgtcttgctcttcccatgggtacagcccacagcttcttggctgaacgtagaacttctttttctcacccagtataccagcctcttcctggtgattctgttttgctgctttggcaagaactacattttgtttttaagagaaatttctgaatatgaatgtggagagcaaacacaaaaagatttaggttacgccgggtgcagtagctcacgcctgtaatcccagcactttgggaggcctaggcgggtggatcacctgaggtcaggagttcaagaccaatctgactaacacggtgaaaccccatctctactaaaactacaaaacttagccgggcatggtggtgcgtgcctgtaatcccagctactcggggggctgagacaggagaatcccttgaacctgggaggcggaggttgtggtgagccaagatcgtgccactgcactccagtctgggtgacagagtgagactccgcctcaaaaagatttaggttgcaaatgtttcaagcatgtgcagttttgtgtgtgtgtatacatatatatggtcagcatatatattgtgcagctagggcgaagccagcagaggtgtgtgtatgtctttatgaaatgtttgaaaagagataagctgactgcttgataatcactctcaggtgtaaagctccaagtgtaaataaaagtggcatttaacaaatctttcagaacaaagtacagctgactatatataccaagagctaagctaaaggaacagctgagagctccgatctccacgagagactaatctaaaagctctgctttgtacttcctcaccctgctttcgtacaaggaagggggacgatgggaaatcatggacttgtaagttgtatttaaacataaaaatgaacttggtaacttctgggtttagtagagcctcagtgtcgctttaacttagtttactttttttttatttttaaagcagcaatggatggttttaaaggagtattatgattgtaaaattgctaaatatgactgtaacacagctttgtggtagctgtgacacagttcacttgggcaaaggagtggtgatggactcgttaaaatcatatatacttgaatagtccattgaccgaaactctttatagactattgtgtaaatgtggaatcacagactgttaacattgcctggacttcagcagagtcctggagctgctgggacctctcctatcatgatgaacttggacttttttttttgatttctggttttaaaaaacataaaattatagaatccagataattcgctggagtcattctgatccaccatgtagatctgtatttagtatcatttggatttggagaagtgttgattacattatggctgtgtaataaaatttttattaaaactgca

SEQ ID NO: 407435 - DNA, 473 bp, Homo sapiens
ttgctgctttgaggaaaaccccactagctgctgatgggtcggctgtggtgcttgtgatgttagtttggtaggtgggaaagaatctggcagtaggactctgtgagtgtcaagcaatctctaaaacaacttattttctctctcagtccagagacccagctgttcaagctgccatcttggcccagctgaatgcaaaatacggttctggagtgttaccagatgctccaaaggaaatgagcaaggcaagtgtggtaccaccctgttgcctgctgagtgaggctgctggctgagataccgaacaagtaccttgtctagtttgggcttgatttttccaccttgaggaacagggagtccctcttggagtcccttctccatcccagttatttacagatataatcaacagacaaccttaattccaaacctgacaccactacttgcctagggccttgactatgtccttcagcagctggcttcca

SEQ ID NO: 407436 - DNA, 4439 bp, Homo sapiens
agcggagcgcgcatgcgcggtcgcctttgtgtgggtcgagcagcggcggcggcggcggcagtggcggtcccactggcaggcgggcaagaggggagtccgggcggcggccggcgtgggagccgggggaccaccatggtaaagaagcggaaaggccgcgtcgtgatcgactcggacacagaggacagcggcagcgacgagaacctggatcaggagctcttgtccctggcaaagcgaaagcgcagtgactctgaggagaaggagccgcctgtgagtcagcctgcagcctcgtcagactcggagacgtctgacagtgacgatgagtggacatttgggagcaataaaaataagaagaaaggaaaagccagaaaaatagagaagaaaggaaccatgaagaaacaggccaacaaaactgcctcctcaggcagttcagacaaagacagttcagctgagagctcagcccctgaggaaggtgaagtgtcagactctgacagcaacagctcctcttccagttcagattcagactcttcctcagaagatgaagagttccatgatggctatggagaagacctcatgggagatgaggaagacagggcccgtctggaacagatgacagagaaagagagagagcaagaactgttcaatcgcatagagaagagggaggtgttgaaaagaagatttgaaatcaagaaaaaactaaaaacagccaaaaagaaagaaaagaaagaaaagaagaaaaagcaagaagaggagcaagaaaagaaaaaactgacacagattcaagaatctcaggtaacatcccacaacaaggaacggcgttccaagcgggatgagaaactagacaagaaatctcaagccatggaggagctaaaagcagagcgagaaaaacgaaagaacagaacagctgagctccttgccaaaaaacagccattaaaaaccagtgaggtctactctgatgatgaagaggaggaagaggatgacaaatccagtgaaaagtcagaccgctcatcacgaacatcatcgtctgatgaagaagaggagaaagaagagatccctcccaaatcccaaccagtttccttacctgaagaattgaatcgggttcgattatcacggcataagctagaacgctggtgtcacatgcccttctttgctaaaactgtcacaggatgttttgtgcggattggcatcggaaaccacaacagcaaaccagtttaccgggtcgctgagattacgggtgttgtggaaactgccaaagtttaccaactaggtggcaccagaacaaacaaagggctgcaactacggcatggcaatgaccaacgcgtgttccgtttagagtttgtctcaaaccaagaattcaccgaaagtgagtttatgaagtggaaagaagcgatgttctctgctggcatgcagttgcccactctagatgaaatcaataaaaaggaattatctattaaagaagctcttaattataaattcaatgatcaggacattgaagagattgtaaaagagaaagaaaggttcagaaaagctccacccaactacgctatgaagaagactcagctactgaaggaaaaggccatggctgaggacctgggggatcaggacaaggccaaacaaatccaagatcaactgaatgagctggaggaacgggcagaggccctggaccgccagcggaccaagaacatatccgctatcagttacatcaaccagcggaaccgggagtggaacattgtagagtctgagaaggcccttgtggctgaaagtcacaacatgaaaaaccaacagatggatccctttactcggcggcagtgcaagcctaccatcgtttctaattccagagacccagctgttcaagctgccatcttggcccagctgaatgcaaaatacggttctggagtgttaccagatgctccaaaggaaatgagcaagggtcaaggcaaagataaagatttgaattctaagtcagccagtgacctctcagaagatctgttcaaagtacacgattttgatgtgaagattgacttacaagttcccagctcagagtcaaaggctttagccatcacctccaaggctccgccagccaaggatggggctccaaggagatctctgaacttggaagactacaaaaaacgacgagggcttatttgagcacacccagcctgctgcttctgaccctgcatgccccatcgcagcgtcccacctttcctcctttcctttgatttagcctctttgggctggagcagctgttgaactgggaagagactctaaactgccagtcatctgtaatataaaccatttgctgtatagacctcctttgtctgcacaccatctcccaccagcctcccctcccccagggccccacccagtgtgggcctgggctctcttgggctttatccatgtctttagatttgtgtttgccttttgtttttttaaccgcgcagttcattggccactctgcacgcattcagtattaccatggagctgggaatcttgctggagcccctggggcaatagcagcagcaccaggcggtctcctctacagactgccttggcccacccattgaacattcggcacgtgaccttgtggggggagcggggattgggcacctgcgatcctctttcctctcttcatctttctcttctgcccttctttttggaagaaggggtttcaaaaccagtttagtttccaaaaagtgtacatttgtggggggggggggtctaatttgagagcgagagtgtgtatgtgtgtgtgtgtaagtgtgtggatttttttatcatttttttaaaatgcagtactctttgtatcagtctgtcatgggtctatagctgtttcagatttttttcagctgtacttgagcatctgaaactgcaagaaagaaactcattaaatgtgattcttcttactaaacaggcctgactgctgtagctgtgtaacttccccattcccacctactcttcccatcctttcccaactttggagaaaactccccagtttagccccctgacctgcaggctgtgtcctggcaggtgtgggagggaagcccatggccaggtaccagggagggcagtgaatgtcttgctcttcccatgggtacagcccacagcttcttggctgaacgtagaacttctttttctcacccagtataccagcctcttcctggtgattctgttttgctgctttggcaagaactacattttgtttttaagagaaatttctgaatatgaatgtggagagcaaacacaaaaagatttaggttacgccgggtgcagtagctcacgcctgtaatcccagcactttgggaggcctaggcgggtggatcacctgaggtcaggagttcaagaccaatctgactaacacggtgaaaccccatctctactaaaactacaaaacttagccgggcatggtggtgcgtgcctgtaatcccagctactcggggggctgagacaggagaatcccttgaacctgggaggcggaggttgtggtgagccaagatcgtgccactgcactccagtctgggtgacagagtgagactccgcctcaaaaagatttaggttgcaaatgtttcaagcatgtgcagttttgtgtgtgtgtatacatatatatggtcagcatatatattgtgcagctagggcgaagccagcagaggtgtgtgtatgtctttatgaaatgtttgaaaagagataagctgactgcttgataatcactctcaggtgtaaagctccaagtgtaaataaaagtggcatttaacaaatctttcagaacaaagtacagctgactatatataccaagagctaagctaaaggaacagctgagagctccgatctccacgagagactaatctaaaagctctgctttgtacttcctcaccctgctttcgtacaaggaagggggacgatgggaaatcatggacttgtaagttgtatttaaacataaaaatgaacttggtaacttctgggtttagtagagcctcagtgtcgctttaacttagtttactttttttttatttttaaagcagcaatggatggttttaaaggagtattatgattgtaaaattgctaaatatgactgtaacacagctttgtggtagctgtgacacagttcacttgggcaaaggagtggtgatggactcgttaaaatcatatatacttgaatagtccattgaccgaaactctttatagactattgtgtaaatgtggaatcacagactgttaacattgcctggacttcagcagagtcctggagctgctgggacctctcctatcatgatgaacttggacttttttttttgatttctggttttaaaaaacataaaattatagaatccagataattcgctggagtcattctgatccaccatgtagatctgtatttagtatcatttggatttggagaagtgttgattacattatggctgtgtaataaaatttttattaaaactgca

SEQ ID NO: 407437 - DNA, 4385 bp, Homo sapiens
agcggagcgcgcatgcgcggtcgcctttgtgtgggtcgagcagcggcggcggcggcggcagtggcggtcccactggcaggcgggcaagaggggagtccgggcggcggccggcgtgggagccgggggaccaccatggtaaagaagcggaaaggccgcgtcgtgatcgactcggacacagaggacagcggcagcgacgagaacctggatcaggagctcttgtccctggcaaagcgaaagcgcagtgactctgaggagaaggagccgcctgtgagtcagcctgcagcctcgtcagactcggagacgtctgacagtgacgatgagtggacatttgggagcaataaaaataagaagaaaggaaaagccagaaaaatagagaagaaaggaaccatgaagaaacaggccaacaaaactgcctcctcaggcagttcagacaaagacagttcagctgagagctcagcccctgaggaaggtgaagtgtcagactctgacagcaacagctcctcttccagttcagattcagactcttcctcagaagatgaagagttccatgatggctatggagaagacctcatgggagatgaggaagacagggcccgtctggaacagatgacagagaaagagagagagcaagaactgttcaatcgcatagagaagagggaggtgttgaaaagaagatttgaaatcaagaaaaaactaaaaacagccaaaaagaaagaaaagaaagaaaagaagaaaaagcaagaagaggagcaagaaaagaaaaaactgacacagattcaagaatctcaggtaacatcccacaacaaggaacggcgttccaagcgggatgagaaactagacaagaaatctcaagccatggaggagctaaaagcagagcgagaaaaacgaaagaacagaacagctgagctccttgccaaaaaacagccattaaaaaccagtgaggtctactctgatgatgaagaggaggaagaggatgacaaatccagtgaaaagtcagaccgctcatcacgaacatcatcgtctgatgaagaagaggagaaagaagagatccctcccaaatcccaaccagtttccttacctgaagaattgaatcgggttcgattatcacggcataagctagaacgctggtgtcacatgcccttctttgctaaaactgtcacaggatgttttgtgcggattggcatcggaaaccacaacagcaaaccagtttaccgggtcgctgagattacgggtgttgtggaaactgccaaagtttaccaactaggtggcaccagaacaaacaaagggctgcaactacggcatggcaatgaccaacgcgtgttccgtttagagtttgtctcaaaccaagaattcaccgaaagtgagtttatgaagtggaaagaagcgatgttctctgctggcatgcagttgcccactctagatgaaatcaataaaaaggaattatctattaaagaagctcttaattataaattcaatgatcaggacattgaagagattgtaaaagagaaagaaaggttcagaaaagctccacccaactacgctatgaagaagactcagctactgaaggaaaaggccatggctgaggacctgggggatcaggacaaggccaaacaaatccaagatcaactgaatgagctggaggaacgggcagaggccctggaccgccagcggaccaagaacatatccgctatcagttacatcaaccagcggaaccgggagtggaacattgtagagtctgagaaggcccttgtggctgaaagtcacaacatgaaaaaccaacagatggatccctttactcggcggcagtgcaagcctaccatcgtttctaattccagagacccagctgttcaagctgccatcttggcccagctgaatgcaaaatacggttctggagtgttaccagatgctccaaaggaaatgagcaagggtcaaggcaaagataaagatttgaattctaagtcagccagtgacctctcagaagatctgttcaaagtacacgattttgatgtgaagattgacttacaagttcccagctcagagtcaaaggctttagccatcacctccaaggctccgccagccaaggatggggctccaaggagatctctgaacttggaagactacaaaaaacgacgagggcttatttgagcacacccagcctgctgcttctgaccctgcatgccccatcgcagcgtcccacctttcctcctttcctttgatttagcctctttgggctggagcagctgttgaactgggaagagactctaaactgccagtcatctgtaatataaaccatttgctgtatagacctcctttgtctgcacaccatctcccaccagcctcccctcccccagggccccacccagtgtgggcctgggctctcttgggctttatccatgtctttagatttgtgtttgccttttgtttttttaaccgcgcagttcattggccactctgcacgcattcagtattaccatggagctgggaatcttgctggagcccctggggcaatagcagcagcaccaggcggtctcctctacagactgccttggcccacccattgaacattcggcacgtgaccttgtggggggagcggggattgggcacctgcgatcctctttcctctcttcatctttctcttctgcccttctttttggaagaaggggtttcaaaaccagtttagtttccaaaaagtgtacatttgtggggggggggggtctaatttgagagcgagagtgtgtatgtgtgtgtgtgtaagtgtgtggatttttttatcatttttttaaaatgcagtactctttgtatcagtctgtcatgggtctatagctgtttcagatttttttcagctgtacttgagcatctgaaactgcaagaaagaaactcattaaatgtgattcttcttactaaacaggcctgactgctgtagctgtgtaacttccccattcccacctactcttcccatcctttcccaactttggagaaggaagcccatggccaggtaccagggagggcagtgaatgtcttgctcttcccatgggtacagcccacagcttcttggctgaacgtagaacttctttttctcacccagtataccagcctcttcctggtgattctgttttgctgctttggcaagaactacattttgtttttaagagaaatttctgaatatgaatgtggagagcaaacacaaaaagatttaggttacgccgggtgcagtagctcacgcctgtaatcccagcactttgggaggcctaggcgggtggatcacctgaggtcaggagttcaagaccaatctgactaacacggtgaaaccccatctctactaaaactacaaaacttagccgggcatggtggtgcgtgcctgtaatcccagctactcggggggctgagacaggagaatcccttgaacctgggaggcggaggttgtggtgagccaagatcgtgccactgcactccagtctgggtgacagagtgagactccgcctcaaaaagatttaggttgcaaatgtttcaagcatgtgcagttttgtgtgtgtgtatacatatatatggtcagcatatatattgtgcagctagggcgaagccagcagaggtgtgtgtatgtctttatgaaatgtttgaaaagagataagctgactgcttgataatcactctcaggtgtaaagctccaagtgtaaataaaagtggcatttaacaaatctttcagaacaaagtacagctgactatatataccaagagctaagctaaaggaacagctgagagctccgatctccacgagagactaatctaaaagctctgctttgtacttcctcaccctgctttcgtacaaggaagggggacgatgggaaatcatggacttgtaagttgtatttaaacataaaaatgaacttggtaacttctgggtttagtagagcctcagtgtcgctttaacttagtttactttttttttatttttaaagcagcaatggatggttttaaaggagtattatgattgtaaaattgctaaatatgactgtaacacagctttgtggtagctgtgacacagttcacttgggcaaaggagtggtgatggactcgttaaaatcatatatacttgaatagtccattgaccgaaactctttatagactattgtgtaaatgtggaatcacagactgttaacattgcctggacttcagcagagtcctggagctgctgggacctctcctatcatgatgaacttggacttttttttttgatttctggttttaaaaaacataaaattatagaatccagataattcgctggagtcattctgatccaccatgtagatctgtatttagtatcatttggatttggagaagtgttgattacattatggctgtgtaataaaatttttattaaaactgca

SEQ ID NO: 407438 - DNA, 4420 bp, Homo sapiens
tctgggtaatgtagtgagagctattttgtaaccatgtggacagaacctagagctgcctgcctgtgggtgagttgggacaccaaggattaaggcagagccaagaacagaaagaagccagacttctgacaccatctgtgctgctgaatcaggcattccctgaggccagacctgcttctggacttttcagtcacgagctcttgtccctggcaaagcgaaagcgcagtgactctgaggagaaggagccgcctgtgagtcagcctgcagcctcgtcagactcggagacgtctgacagtgacgatgagtggacatttgggagcaataaaaataagaagaaaggaaaagccagaaaaatagagaagaaaggaaccatgaagaaacaggccaacaaaactgcctcctcaggcagttcagacaaagacagttcagctgagagctcagcccctgaggaaggtgaagtgtcagactctgacagcaacagctcctcttccagttcagattcagactcttcctcagaagatgaagagttccatgatggctatggagaagacctcatgggagatgaggaagacagggcccgtctggaacagatgacagagaaagagagagagcaagaactgttcaatcgcatagagaagagggaggtgttgaaaagaagatttgaaatcaagaaaaaactaaaaacagccaaaaagaaagaaaagaaagaaaagaagaaaaagcaagaagaggagcaagaaaagaaaaaactgacacagattcaagaatctcaggtaacatcccacaacaaggaacggcgttccaagcgggatgagaaactagacaagaaatctcaagccatggaggagctaaaagcagagcgagaaaaacgaaagaacagaacagctgagctccttgccaaaaaacagccattaaaaaccagtgaggtctactctgatgatgaagaggaggaagaggatgacaaatccagtgaaaagtcagaccgctcatcacgaacatcatcgtctgatgaagaagaggagaaagaagagatccctcccaaatcccaaccagtttccttacctgaagaattgaatcgggttcgattatcacggcataagctagaacgctggtgtcacatgcccttctttgctaaaactgtcacaggatgttttgtgcggattggcatcggaaaccacaacagcaaaccagtttaccgggtcgctgagattacgggtgttgtggaaactgccaaagtttaccaactaggtggcaccagaacaaacaaagggctgcaactacggcatggcaatgaccaacgcgtgttccgtttagagtttgtctcaaaccaagaattcaccgaaagtgagtttatgaagtggaaagaagcgatgttctctgctggcatgcagttgcccactctagatgaaatcaataaaaaggaattatctattaaagaagctcttaattataaattcaatgatcaggacattgaagagattgtaaaagagaaagaaaggttcagaaaagctccacccaactacgctatgaagaagactcagctactgaaggaaaaggccatggctgaggacctgggggatcaggacaaggccaaacaaatccaagatcaactgaatgagctggaggaacgggcagaggccctggaccgccagcggaccaagaacatatccgctatcagttacatcaaccagcggaaccgggagtggaacattgtagagtctgagaaggcccttgtggctgaaagtcacaacatgaaaaaccaacagatggatccctttactcggcggcagtgcaagcctaccatcgtttctaattccagagacccagctgttcaagctgccatcttggcccagctgaatgcaaaatacggttctggagtgttaccagatgctccaaaggaaatgagcaagggtcaaggcaaagataaagatttgaattctaagtcagccagtgacctctcagaagatctgttcaaagtacacgattttgatgtgaagattgacttacaagttcccagctcagagtcaaaggctttagccatcacctccaaggctccgccagccaaggatggggctccaaggagatctctgaacttggaagactacaaaaaacgacgagggcttatttgagcacacccagcctgctgcttctgaccctgcatgccccatcgcagcgtcccacctttcctcctttcctttgatttagcctctttgggctggagcagctgttgaactgggaagagactctaaactgccagtcatctgtaatataaaccatttgctgtatagacctcctttgtctgcacaccatctcccaccagcctcccctcccccagggccccacccagtgtgggcctgggctctcttgggctttatccatgtctttagatttgtgtttgccttttgtttttttaaccgcgcagttcattggccactctgcacgcattcagtattaccatggagctgggaatcttgctggagcccctggggcaatagcagcagcaccaggcggtctcctctacagactgccttggcccacccattgaacattcggcacgtgaccttgtggggggagcggggattgggcacctgcgatcctctttcctctcttcatctttctcttctgcccttctttttggaagaaggggtttcaaaaccagtttagtttccaaaaagtgtacatttgtggggggggggggtctaatttgagagcgagagtgtgtatgtgtgtgtgtgtaagtgtgtggatttttttatcatttttttaaaatgcagtactctttgtatcagtctgtcatgggtctatagctgtttcagatttttttcagctgtacttgagcatctgaaactgcaagaaagaaactcattaaatgtgattcttcttactaaacaggcctgactgctgtagctgtgtaacttccccattcccacctactcttcccatcctttcccaactttggagaaaactccccagtttagccccctgacctgcaggctgtgtcctggcaggtgtgggagggaagcccatggccaggtaccagggagggcagtgaatgtcttgctcttcccatgggtacagcccacagcttcttggctgaacgtagaacttctttttctcacccagtataccagcctcttcctggtgattctgttttgctgctttggcaagaactacattttgtttttaagagaaatttctgaatatgaatgtggagagcaaacacaaaaagatttaggttacgccgggtgcagtagctcacgcctgtaatcccagcactttgggaggcctaggcgggtggatcacctgaggtcaggagttcaagaccaatctgactaacacggtgaaaccccatctctactaaaactacaaaacttagccgggcatggtggtgcgtgcctgtaatcccagctactcggggggctgagacaggagaatcccttgaacctgggaggcggaggttgtggtgagccaagatcgtgccactgcactccagtctgggtgacagagtgagactccgcctcaaaaagatttaggttgcaaatgtttcaagcatgtgcagttttgtgtgtgtgtatacatatatatggtcagcatatatattgtgcagctagggcgaagccagcagaggtgtgtgtatgtctttatgaaatgtttgaaaagagataagctgactgcttgataatcactctcaggtgtaaagctccaagtgtaaataaaagtggcatttaacaaatctttcagaacaaagtacagctgactatatataccaagagctaagctaaaggaacagctgagagctccgatctccacgagagactaatctaaaagctctgctttgtacttcctcaccctgctttcgtacaaggaagggggacgatgggaaatcatggacttgtaagttgtatttaaacataaaaatgaacttggtaacttctgggtttagtagagcctcagtgtcgctttaacttagtttactttttttttatttttaaagcagcaatggatggttttaaaggagtattatgattgtaaaattgctaaatatgactgtaacacagctttgtggtagctgtgacacagttcacttgggcaaaggagtggtgatggactcgttaaaatcatatatacttgaatagtccattgaccgaaactctttatagactattgtgtaaatgtggaatcacagactgttaacattgcctggacttcagcagagtcctggagctgctgggacctctcctatcatgatgaacttggacttttttttttgatttctggttttaaaaaacataaaattatagaatccagataattcgctggagtcattctgatccaccatgtagatctgtatttagtatcatttggatttggagaagtgttgattacattatggctgtgtaataaaatttttattaaaactgca

SEQ ID NO: 407439 - DNA, 4044 bp, Homo sapiens
ataatcaggcaggtgtccttgtgtgattaaacacccaaaggaagactgtcttcctgagtccatgaccagcaccggagttttgggtccatggataaaacgcatctcctgtctctactagaaaagcaaaggacctgaaattaagagaaaggagagattgaagggtggcaccaagattgaaaggagaaagtggttaagggcccgtctggaacagatgacagagaaagagagagagcaagaactgttcaatcgcatagagaagagggaggtgttgaaaagaagatttgaaatcaagaaaaaactaaaaacagccaaaaagaaagaaaagaaagaaaagaagaaaaagcaagaagaggagcaagaaaagaaaaaactgacacagattcaagaatctcaggtaacatcccacaacaaggaacggcgttccaagcgggatgagaaactagacaagaaatctcaagccatggaggagctaaaagcagagcgagaaaaacgaaagaacagaacagctgagctccttgccaaaaaacagccattaaaaaccagtgaggtctactctgatgatgaagaggaggaagaggatgacaaatccagtgaaaagtcagaccgctcatcacgaacatcatcgtctgatgaagaagaggagaaagaagagatccctcccaaatcccaaccagtttccttacctgaagaattgaatcgggttcgattatcacggcataagctagaacgctggtgtcacatgcccttctttgctaaaactgtcacaggatgttttgtgcggattggcatcggaaaccacaacagcaaaccagtttaccgggtcgctgagattacgggtgttgtggaaactgccaaagtttaccaactaggtggcaccagaacaaacaaagggctgcaactacggcatggcaatgaccaacgcgtgttccgtttagagtttgtctcaaaccaagaattcaccgaaagtgagtttatgaagtggaaagaagcgatgttctctgctggcatgcagttgcccactctagatgaaatcaataaaaaggaattatctattaaagaagctcttaattataaattcaatgatcaggacattgaagagattgtaaaagagaaagaaaggttcagaaaagctccacccaactacgctatgaagaagactcagctactgaaggaaaaggccatggctgaggacctgggggatcaggacaaggccaaacaaatccaagatcaactgaatgagctggaggaacgggcagaggccctggaccgccagcggaccaagaacatatccgctatcagttacatcaaccagcggaaccgggagtggaacattgtagagtctgagaaggcccttgtggctgaaagtcacaacatgaaaaaccaacagatggatccctttactcggcggcagtgcaagcctaccatcgtttctaattccagagacccagctgttcaagctgccatcttggcccagctgaatgcaaaatacggttctggagtgttaccagatgctccaaaggaaatgagcaagggtcaaggcaaagataaagatttgaattctaagtcagccagtgacctctcagaagatctgttcaaagtacacgattttgatgtgaagattgacttacaagttcccagctcagagtcaaaggctttagccatcacctccaaggctccgccagccaaggatggggctccaaggagatctctgaacttggaagactacaaaaaacgacgagggcttatttgagcacacccagcctgctgcttctgaccctgcatgccccatcgcagcgtcccacctttcctcctttcctttgatttagcctctttgggctggagcagctgttgaactgggaagagactctaaactgccagtcatctgtaatataaaccatttgctgtatagacctcctttgtctgcacaccatctcccaccagcctcccctcccccagggccccacccagtgtgggcctgggctctcttgggctttatccatgtctttagatttgtgtttgccttttgtttttttaaccgcgcagttcattggccactctgcacgcattcagtattaccatggagctgggaatcttgctggagcccctggggcaatagcagcagcaccaggcggtctcctctacagactgccttggcccacccattgaacattcggcacgtgaccttgtggggggagcggggattgggcacctgcgatcctctttcctctcttcatctttctcttctgcccttctttttggaagaaggggtttcaaaaccagtttagtttccaaaaagtgtacatttgtggggggggggggtctaatttgagagcgagagtgtgtatgtgtgtgtgtgtaagtgtgtggatttttttatcatttttttaaaatgcagtactctttgtatcagtctgtcatgggtctatagctgtttcagatttttttcagctgtacttgagcatctgaaactgcaagaaagaaactcattaaatgtgattcttcttactaaacaggcctgactgctgtagctgtgtaacttccccattcccacctactcttcccatcctttcccaactttggagaaaactccccagtttagccccctgacctgcaggctgtgtcctggcaggtgtgggagggaagcccatggccaggtaccagggagggcagtgaatgtcttgctcttcccatgggtacagcccacagcttcttggctgaacgtagaacttctttttctcacccagtataccagcctcttcctggtgattctgttttgctgctttggcaagaactacattttgtttttaagagaaatttctgaatatgaatgtggagagcaaacacaaaaagatttaggttacgccgggtgcagtagctcacgcctgtaatcccagcactttgggaggcctaggcgggtggatcacctgaggtcaggagttcaagaccaatctgactaacacggtgaaaccccatctctactaaaactacaaaacttagccgggcatggtggtgcgtgcctgtaatcccagctactcggggggctgagacaggagaatcccttgaacctgggaggcggaggttgtggtgagccaagatcgtgccactgcactccagtctgggtgacagagtgagactccgcctcaaaaagatttaggttgcaaatgtttcaagcatgtgcagttttgtgtgtgtgtatacatatatatggtcagcatatatattgtgcagctagggcgaagccagcagaggtgtgtgtatgtctttatgaaatgtttgaaaagagataagctgactgcttgataatcactctcaggtgtaaagctccaagtgtaaataaaagtggcatttaacaaatctttcagaacaaagtacagctgactatatataccaagagctaagctaaaggaacagctgagagctccgatctccacgagagactaatctaaaagctctgctttgtacttcctcaccctgctttcgtacaaggaagggggacgatgggaaatcatggacttgtaagttgtatttaaacataaaaatgaacttggtaacttctgggtttagtagagcctcagtgtcgctttaacttagtttactttttttttatttttaaagcagcaatggatggttttaaaggagtattatgattgtaaaattgctaaatatgactgtaacacagctttgtggtagctgtgacacagttcacttgggcaaaggagtggtgatggactcgttaaaatcatatatacttgaatagtccattgaccgaaactctttatagactattgtgtaaatgtggaatcacagactgttaacattgcctggacttcagcagagtcctggagctgctgggacctctcctatcatgatgaacttggacttttttttttgatttctggttttaaaaaacataaaattatagaatccagataattcgctggagtcattctgatccaccatgtagatctgtatttagtatcatttggatttggagaagtgttgattacattatggctgtgtaataaaatttttattaaaactgca

SEQ ID NO: 407440 - DNA, 3841 bp, Homo sapiens
agcggagcgcgcatgcgcggtcgcctttgtgtgggtcgagcagcggcggcggcggcggcagtggcggtcccactggcaggcgggcaagaggggagtccgggcggcggccggcgtgggagccgggggaccaccatggtaaagaagcggaaaggccgcgtcgtgatcgactcggacacagaggacagcggcagcgacgagaacctggatcaggagctcttgtccctggcaaagcgaaagcgcagtgactctgaggagaaggagccgcctgtgagtcagcctgcagcctcgtcagactcggagacgtctgacagtgacgatgagtggacatttgggagcaataaaaataagaagaaaggaaaagccagaaaaatagagaagaaaggaaccatgaagaaacaggccaacaaaactgcctcctcaggcagttcagacaaagacagttcagctgagagctcagcccctgaggaaggtgaagtgtcagactctgacagcaacagctcctcttccagttcagattcagactcttcctcagaagatgaagagttccatgatggctatggagaagacctcatgggagatgaggaagacagggcccgtctggaacagatgacagagaaagagagagagcaagaactgttcaatcgcatagagaagagggaggtgttgaaaagaagatttgaaatcaagaaaaaactaaaaacagccaaaaagaaagaaaagaaagaaaagaagaaaaagcaagaagaggagcaagaaaagaaaaaactgacacagattcaagaatctcaggtaacatcccacaacaaggaacggcgttccaagcgggatgagaaactagacaagaaatctcaagccatggaggagctaaaagcagagcgagaaaaacgaaagaacagaacagctgagctccttgccaaaaaacagccattaaaaaccagtgaggtctactctgatgatgaagaggaggaagaggatgacaaatccagtgaaaagtcagaccgctcatcacgaacatcatcgtctgatgaagaagaggagaaagaagagatccctcccaaatcccaaccagtttccttacctgaagaattgaatcgggttcgattatcacggcataagctagaacgctggtgtcacatgcccttctttgctaaaactgtcacaggatgttttgtgcggattggcatcggaaaccacaacagcaaaccagtttaccgggtcgctgagattacgggtgttgtggaaactgccaaagtttaccaactaggtggcaccagaacaaacaaagggctgcaactacggcatggcaatgaccaacgcgtgttccgtttagagtttgtctcaaaccaagaattcaccgaaagtgagtttatgaagtggaaagaagcgatgttctctgctggcatgcagttgcccactctagatgaaatcaataaaaaggaattatctattaaagaagctcttaattataaattcaatgatcaggacattgaagagattgtaaaagagaaagaaaggttcagaaaagctccacccaactacgctatgaagaagactcagctactgaaggaaaaggccatggctgaggacctgggggatcaggacaaggccaaacaaatccaagatcaactgaatgagctggaggaacgggcagaggccctggaccgccagcggaccaagaacatatccgctatcagttacatcaaccagcggaaccgggagtggaacattgtagagtctgagaaggcccttgtggctgaaagtcacaacatgaaaaaccaacagatggatccctttactcggcggcagtgcaagcctaccatcgtttctaattccagagacccagctgttcaagctgccatcttggcccagctgaatgcaaaatacggttctggagtgttaccagatgctccaaaggaaatgagcaagggtcaaggcaaagataaagatttgaattctaagtcagccagtgacctctcagaagatctgttcaaagtacacgattttgatgtgaagattgacttacaagttcccagctcagagtcaaaggctttagccatcacctccaaggctccgccagccaaggatggggctccaaggagatctctgaacttggaagactacaaaaaacgacgagggcttatttgagcacacccagcctgctgcttctgaccctgcatgccccatcgcagcgtcccacctttcctcctttcctttgatttagcctctttgggctggagcagctgttgaactgggaagagactctaaatgcaagaaagaaactcattaaatgtgattcttcttactaaacaggcctgactgctgtagctgtgtaacttccccattcccacctactcttcccatcctttcccaactttggagaaaactccccagtttagccccctgacctgcaggctgtgtcctggcaggtgtgggagggaagcccatggccaggtaccagggagggcagtgaatgtcttgctcttcccatgggtacagcccacagcttcttggctgaacgtagaacttctttttctcacccagtataccagcctcttcctggtgattctgttttgctgctttggcaagaactacattttgtttttaagagaaatttctgaatatgaatgtggagagcaaacacaaaaagatttaggttacgccgggtgcagtagctcacgcctgtaatcccagcactttgggaggcctaggcgggtggatcacctgaggtcaggagttcaagaccaatctgactaacacggtgaaaccccatctctactaaaactacaaaacttagccgggcatggtggtgcgtgcctgtaatcccagctactcggggggctgagacaggagaatcccttgaacctgggaggcggaggttgtggtgagccaagatcgtgccactgcactccagtctgggtgacagagtgagactccgcctcaaaaagatttaggttgcaaatgtttcaagcatgtgcagttttgtgtgtgtgtatacatatatatggtcagcatatatattgtgcagctagggcgaagccagcagaggtgtgtgtatgtctttatgaaatgtttgaaaagagataagctgactgcttgataatcactctcaggtgtaaagctccaagtgtaaataaaagtggcatttaacaaatctttcagaacaaagtacagctgactatatataccaagagctaagctaaaggaacagctgagagctccgatctccacgagagactaatctaaaagctctgctttgtacttcctcaccctgctttcgtacaaggaagggggacgatgggaaatcatggacttgtaagttgtatttaaacataaaaatgaacttggtaacttctgggtttagtagagcctcagtgtcgctttaacttagtttactttttttttatttttaaagcagcaatggatggttttaaaggagtattatgattgtaaaattgctaaatatgactgtaacacagctttgtggtagctgtgacacagttcacttgggcaaaggagtggtgatggactcgttaaaatcatatatacttgaatagtccattgaccgaaactctttatagactattgtgtaaatgtggaatcacagactgttaacattgcctggacttcagcagagtcctggagctgctgggacctctcctatcatgatgaacttggacttttttttttgatttctggttttaaaaaacataaaattatagaatccagataattcgctggagtcattctgatccaccatgtagatctgtatttagtatcatttggatttggagaagtgttgattacattatggctgtgtaataaaatttttattaaaactgca

SEQ ID NO: 407441 - DNA, 2538 bp, Homo sapiens
agcggctttcctcttcacattccagggtcaaggcaaagataaagatttgaattctaagtcagccagtgacctctcagaagatctgttcaaagtacacgattttgatgtgaagattgacttacaagttcccagctcagagtcaaaggctttagccatcacctccaaggctccgccagccaaggatggggctccaaggagatctctgaacttggaagactacaaaaaacgacgagggcttatttgagcacacccagcctgctgcttctgaccctgcatgccccatcgcagcgtcccacctttcctcctttcctttgatttagcctctttgggctggagcagctgttgaactgggaagagactctaaactgccagtcatctgtaatataaaccatttgctgtatagacctcctttgtctgcacaccatctcccaccagcctcccctcccccagggccccacccagtgtgggcctgggctctcttgggctttatccatgtctttagatttgtgtttgccttttgtttttttaaccgcgcagttcattggccactctgcacgcattcagtattaccatggagctgggaatcttgctggagcccctggggcaatagcagcagcaccaggcggtctcctctacagactgccttggcccacccattgaacattcggcacgtgaccttgtggggggagcggggattgggcacctgcgatcctctttcctctcttcatctttctcttctgcccttctttttggaagaaggggtttcaaaaccagtttagtttccaaaaagtgtacatttgtggggggggggggtctaatttgagagcgagagtgtgtatgtgtgtgtgtgtaagtgtgtggatttttttatcatttttttaaaatgcagtactctttgtatcagtctgtcatgggtctatagctgtttcagatttttttcagctgtacttgagcatctgaaactgcaagaaagaaactcattaaatgtgattcttcttactaaacaggcctgactgctgtagctgtgtaacttccccattcccacctactcttcccatcctttcccaactttggagaaaactccccagtttagccccctgacctgcaggctgtgtcctggcaggtgtgggagggaagcccatggccaggtaccagggagggcagtgaatgtcttgctcttcccatgggtacagcccacagcttcttggctgaacgtagaacttctttttctcacccagtataccagcctcttcctggtgattctgttttgctgctttggcaagaactacattttgtttttaagagaaatttctgaatatgaatgtggagagcaaacacaaaaagatttaggttacgccgggtgcagtagctcacgcctgtaatcccagcactttgggaggcctaggcgggtggatcacctgaggtcaggagttcaagaccaatctgactaacacggtgaaaccccatctctactaaaactacaaaacttagccgggcatggtggtgcgtgcctgtaatcccagctactcggggggctgagacaggagaatcccttgaacctgggaggcggaggttgtggtgagccaagatcgtgccactgcactccagtctgggtgacagagtgagactccgcctcaaaaagatttaggttgcaaatgtttcaagcatgtgcagttttgtgtgtgtgtatacatatatatggtcagcatatatattgtgcagctagggcgaagccagcagaggtgtgtgtatgtctttatgaaatgtttgaaaagagataagctgactgcttgataatcactctcaggtgtaaagctccaagtgtaaataaaagtggcatttaacaaatctttcagaacaaagtacagctgactatatataccaagagctaagctaaaggaacagctgagagctccgatctccacgagagactaatctaaaagctctgctttgtacttcctcaccctgctttcgtacaaggaagggggacgatgggaaatcatggacttgtaagttgtatttaaacataaaaatgaacttggtaacttctgggtttagtagagcctcagtgtcgctttaacttagtttactttttttttatttttaaagcagcaatggatggttttaaaggagtattatgattgtaaaattgctaaatatgactgtaacacagctttgtggtagctgtgacacagttcacttgggcaaaggagtggtgatggactcgttaaaatcatatatacttgaatagtccattgaccgaaactctttatagactattgtgtaaatgtggaatcacagactgttaacattgcctggacttcagcagagtcctggagctgctgggacctctcctatcatgatgaacttggacttttttttttgatttctggttttaaaaaacataaaattatagaatccagataattcgctggagtcattctgatccaccatgtagatctgtatttagtatcatttggatttggagaagtgttgattacattatggctgtgtaataaaatttttattaaaactgca

SEQ ID NO: 407442 - DNA, 2381 bp, Homo sapiens
agcggagcgcgcatgcgcggtcgcctttgtgtgggtcgagcagcggcggcggcggcggcagtggcggtcccactggcaggcgggcaagaggggagtccgggcggcggccggcgtgggagccgggggaccaccatggtaaagaagcggaaaggccgcgtcgtgatcgactcggacacagaggacagcggcagcgacgagaacctggatcaggagctcttgtccctggcaaagcgaaagcgcagtgactctgaggagaaggagccgcctgtgagtcagcctgcagcctcgtcagactcggagacgtctgacagtgacgatgagtggacatttgggagcaataaaaataagaagaaaggaaaagccagaaaaatagagaagaaaggaaccatgaagaaacaggccaacaaaactgcctcctcaggcagttcagacaaagacagttcagctgagagctcagcccctgaggaaggtgaagtgtcagactctgacagcaacagctcctcttccagttcagattcagactcttcctcagaagatgaagagttccatgatggctatggagaagacctcatgggagatgaggaagacagggcccgtctggaacagatgacagagaaagagagagagcaagaactgttcaatcgcatagagaagagggaggtgttgaaaagaagatttgaaatcaagaaaaaactaaaaacagccaaaaagaaagaaaagaaagaaaagaagaaaaagcaagaagaggagcaagaaaagaaaaaactgacacagattcaagaatctcaggtaacatcccacaacaaggaacggcgttccaagcgggatgagaaactagacaagaaatctcaagccatggaggagctaaaagcagagcgagaaaaacgaaagaacagaacagctgagctccttgccaaaaaacagccattaaaaaccagtgaggtctactctgatgatgaagaggaggaagaggatgacaaatccagtgaaaagtcagaccgctcatcacgaacatcatcgtctgatgaagaagaggagaaagaagagatccctcccaaatcccaaccagtttccttacctgaagaattgaatcgggttcgattatcacggcataagctagaacgctggtgtcacatgcccttctttgctaaaactgtcacaggatgttttgtgcggattggcatcggaaaccacaacagcaaaccagtttaccgggtcgctgagattacgggtgttgtggaaactgccaaagtttaccaactaggtggcaccagaacaaacaaagggctgcaactacggcatggcaatgaccaacgcgtgttccgtttagagtttgtctcaaaccaagaattcaccgaaagtgagtttatgaagtggaaagaagcgatgttctctgctggcatgcagttgcccactctagatgaaatcaataaaaaggaattatctattaaagaagctcttaattataaattcaatgatcaggacattgaagagattgtaaaagagaaagaaaggttcagaaaagctccacccaactacgctatgaagaagactcagctactgaaggaaaaggccatggctgaggacctgggggatcaggacaaggccaaacaaatccaagatcaactgaatgagctggaggaacgggcagaggccctggaccgccagcggaccaagaacatatccgctatcagttacatcaaccagcggaaccgggagtggaacattgtagagtctgagaaggcccttgtggctgaaagtcacaacatgaaaaaccaacagatggatccctttactcggcggcagtgcaagcctaccatcgtttctaattccagagacccagctgttcaagctgccatcttggcccagctgaatgcaaaatacggttctggagtgttaccagatgctccaaaggaaatgagcaagggtcaaggcaaagataaagatttgaattctaagtcagccagtgacctctcagaagatctgttcaaagtacacgattttgatgtgaagattgacttacaagttcccagctcagagtcaaaggctttagccatcacctccaaggctccgccagccaaggatggggctccaaggagatctctgaacttggaagactacaaaaaacgacgagggcttatttgagcacacccagcctgctgcttctgaccctgcatgccccatcgcagcgtccacttctctttcttgatagctcttggtggacagttgtgactggaagaaactaactgcgtactgaaaaacctgtggtaactcttgtgcgacttccccagacccccaggccacagaggcggcgggggaacaaaagggccggaacgaaagagaaaacaggaatggggacacggccaccaaaagggccccca

SEQ ID NO: 407443 - DNA, 1808 bp, Homo sapiens
ttcacatgtcagaaaagttgttggtgtgcgtcccaatggggcgctgggagggaacaggacactcctggggagcggcagcaggaacccctgccaggaaggcctggggcacagtgagtgccagcaggggccatctgggcacagctggtgtctcggggtgggggggggggtgcagccccagcagggatcctaaggcagcaggagtagagccagctagaagctgagtggctgtggcatcattgtcactcgggtgggacgtgggtccatgagagcgtgcaattatgaccacactgtaactttgagcagagaaagtgggaatttggaactggattctctttagagccaggaagagcctcctgaggcggccagatgtctgctggtggccgcccagccacatgcttgtctgcctgagtgcaggtctaggaagcctctgggcatcccccagggtggggtctgggccgctgagctgtgtgctgctgctgggccaccgtgggccttaccttgacggtcactctgcctgctagggggtttccctggagctgtgggcatttccgtgcactgactgagcagaggcaagggctgccctgtccgccaggggcagggtttgcgggccttcctttccccacggcgaggcatgggtgaaagtggccatggcggcagggttaggggcaggtgaggagtgggagtcgcagcaccctaggggcctccatccgcagccttgggagactgacgctcctcgaacatgaatagaatgtggagaccacaacccccacacatgtcgttggttcaggtcgccctgctttgcctgcctaatggagcacatcttgctgccagaacctcactggcctctgggggtcggcaggtgcagagccacctggacgcctggagaccacctgggatgtttcctctgtgactgggaatggccttgacaacagagtccagccaagtctacgttattttctcatctcctgacaacactggatgtcatatttattagtcagcctggtctggagtgaaagaccgtccctagcgcatctcccacgcgccctgggctcctggtgtgctgggtgccagcctgggagcccagcgcttctgggtgatgccccagggctcagaggccctggatggctttggtctcgagacagctgggggaggggccctgcttctgattgtcctgggccccagcccccacctctgcaagggatcggtgtgatgtgctccataatcgggtggggtgtgtgtgtgtgtgtgtgtgtgtgtgtgtatgtatgcatgcgtctggcacatggcaaggcccaagccaacccggcaccccgtagatgggcagctacactgccacccaagcacggagatgtggccgcggcactgggtcccccagtgggtcccatgggggaagaacttccctttgctggggtgggcagcctgccctgagctatcaacactggatttgttgtcttctgcacagctactgtgaagataacgtaaggagaagtggtcagttttcattttataactgacacagttgggacaaaatatatacgtgtacatatatttaagacactaattgtgtgggagagtttagtagaggcctgtgcagacacaaggcaaacagcgtcagcagcgtgggggtctcctgggccagctcggcacctgtgggtgctctgaccctgggggtggggacagctccgtgctaaccccagcagacagttgttggtgcacagtgtctaggaggcgtgggaatgggtgctgtcttcctcttttcacatcatggcgacagtaataaagcccacctccagtggaaaaaaaaaaaa

SEQ ID NO: 407444 - DNA, 334 bp, Homo sapiens
actgaatgccagatatgtgcaagaatttgcgggaagtattgtagggaattcaatggtgacagatctaatctccaccttcaaagagtttgtaataggaaaatcagtcaaggaggcaaatattgaccacataaggaagactctataggctataaaggagaattccactaacattgcgattattatgtgaataactatccctccaattaattgaacataggccgcatgccaagcattctgccctgtgccatacaggtatcagtgccttcaatcctcacatctcccctgcgacttagttgatattttctttcacagatgagaactctgcggctcagca

SEQ ID NO: 407445 - DNA, 157 bp, Homo sapiens
agatattccagcatgaggtatttctttactgaaatgaaatgcaatcattattacatactaaattactaagataatttgagtctatttctggccttcttattctgttacattaatctttctgttggcttgcctaggtacctcactgttctaattactg

SEQ ID NO: 407446 - DNA, 766 bp, Homo sapiens
caaacagtcttcttaaatgtcaacatagcaatacaggcattttccctcattctcttttaatcaaacactttcctccaggctcctcatttttctacaaaaatcactaagtctcagtgacgttctagatttccttctctgtgccctgttctcaagggtcagcctcctcttcacactagagccatgttgggctttcctgttgggagtggggatgtgggagaagtcacctgatagactgagtcagtgcccccatggagccgacaggggaataagccaatgggttgagtgtggagaggtggaatttcaggcactaaggaactcagaggagtgccagggtatgcatggggtttgatgaagatatttggggccacgtaccttcccatgggctccttgggctctaccttgcgagggaccaattgctctgccctgatttgtttagtcctaaaagactcaggataagcactgggttttgcctcctggtagttccaaagtgtgccctgttgcttagagacaggggatggtgcctggagtgaagataaggttgtaaaggaaaccaagccacaaattcccttgtttttgttcaggttgctggacagaagagtaaaggatttttgctctgacagttggaagaaagtgttttcttttctgtgtgtgtttttaccaagttgatgtgttatccaagacacagccgagttagtacccacgttgacaaacagtgttgagttttgcatggctaccttcctcttaattctggtgttcctgatttagg

SEQ ID NO: 407447 - DNA, 647 bp, Homo sapiens
  misc_feature (471)..(471): n is a, c, g, or t
gacaaaatcatctaacacaaagcctactttaaaataaagtattgaatatctcatgtaatttattgaatactgtactgaaagtgaaaaacagaatggttgtatgagtactcaaagtatggtttctactgaattcatatcacttttgcaccattgtaaagtcaaaaaattgaaagttgaaccatcataaattagggaccatctgtacattacccatgtcaatgacaaataagacaaaactaatttctatttgctgttgaaattatttttattcacaaatctctccatcttgacattagtcaccattgaatctcaagtgcagcgtaaactgagaatgcatctataattatgggttgaattttgcatgagctacaggaggcagccaggtggggatacccactgtcctgggggcaggagacactggttttgatttttgcagtgatattaagatcaaatagctgagggatttttttnttttctttttggaacccgggttgtaggggagagaaagtgtagggtgggaaagagataagaagatgggagaaagtggatggggagctgatgataacttacatttgtgaaatggaattggagtttgataaataaaaaatactgattttattcaaccaaagacattatactttttctgc

SEQ ID NO: 407448 - DNA, 334 bp, Homo sapiens
gttttatccatgatgtctgcagcacagacaggttcagtaatttgctcatggtcacttgagataataaaaccccactctagggaacctctcatgcctgcttctggctgtcaccttccctctccactttcctcctgtccccttcctctccatctcctttatgaggccttctttgctgtcccatctcttctttgtatttttactttttattaatttttttttgtggggggggggaatggggtctcgctatgttgtgcaggctgatcttgaactcctggcctcgagctatcctactgtctcagcctgagtagctgggattacaggtgtgagccaccat

SEQ ID NO: 407449 - DNA, 835 bp, Homo sapiens
cagcctctcagcaagacgcaagggcctcccccagccggcatcaggccttgctaaagggtgaggagtctctagtttcggcccctcaccaacctcctctgaaaatgtcagagcaaccctcccctcctcccctggggcccagccctagagggggagagcagctcctccccagctgctgccaatttgcacctcattagcaacagcctctccccagtgacagtccctcagaaatcccagactgagcacctcgttggtgctaaatgaaatctgggtgtttgaggagaatgacatctgagctgctaggagaatgacaagtctcagggcttcccagaaaactgggagaacacaggctacagagaagagcattgttcctggaagaaacccacagcttcacgtccgtagttactgacaatcaaagggatattttgaaaggagttgatggctgcaaggtaaatgatgagctgaatgaatgcgacttaattgctgcagaatgccactggaagtcacagggggtgcctcctctacttggaatgcttgaaaaaaagatgtaaaattaccaattcacccctggtcacagacagagaattgggaaagatgaaatacctaaaaaaactcttaaaagtcctttagaagtaagaggaactaagaacaacattgtttaaaaattctgaagaaatacacgaatatgttaacttttctattgttgtaaagcaaaacagaataagcaacttccaggtcactatggtgagctggacacatacttttagcccagctctctccagaaactcccagtaagatgaaagtcaaggaaataaaagacatacatcagaaaaaaaaa

SEQ ID NO: 407450 - DNA, 802 bp, Homo sapiens
tataataatgaaaatgtgggcacagaaattaaaaatgcagtactcttacagtcattgctatgaaaatgaaatctatgctgaaacttacaatgtgttgataaaagtaatctaagaaaacataagtaaatagacccatctcttttcgattggagcattctgcattccagttttcccaaaattgttttgtacacttaataccattcctatcaaagtctcagcagggtttttttcttcttatttttaaagacatagatcatcttactctaaaactaattcggaaaggcacaggtgtagaacagctaaaccaactttgacaaggaaaataaagtgagaggaatcacccttgatgtgaaggcatattgcgtagttacattagtcaacatagtgtggaagaaggatagaaacaaaggttaacaaaacattatagagaaaccagaattagacaaaggtgtgaaaacaattaagtggagaaaaggtagccttctcaaatggcgctgggcatcctgaggtttaaaaaaaaagatcatggacttaatgtaaaatgtgaaactgcaaaacttttagaaaaaaaaaatatttagaatctaggaataggaaaatatttcttagacttgataccaaaaggacaatgtgtaaaaggaaaaattgataaattgcatatcattaaaattaaaaatgtgtgccttgtgaaaaccatgtgaatacaatgaaaagctacagatggagaaaatatttgtaaaccatatattcaacaaagatttctgtctagaatatataaaaactcctaaaacttaacagtaaa

SEQ ID NO: 407451 - DNA, 417 bp, Homo sapiens
tctcttatgaacttgataacaatacatctggttctaataatcctagaaatctctatttatagacattgaatatgttgttgaaattaaataaaatgcatgaacaaaatttcaagatacattgaggctttgctttctcaataaagtatactacaaagggaataaagaaattctttactcaaattaacggtgaattcttttgtcatgagaataggagtttatattcatttcagtgaaagcacataaattgttctagacaagaaaaacaaaactagcccaaggcaatattttcattatagaaaaaggcacatgtccatgaatatctagtttaatattaacaaaagtcactcaattagctatgcatgtgccattgttataaatatttattcacatctcagctaagtaacacttatatcttgt

SEQ ID NO: 407452 - DNA, 467 bp, Homo sapiens
aggcatttaaggaaggaatagggttctaaggcatcctatgcttccttctacttaaagacctttctcctccccccttctataaacaccccaagatctggctttaccccttactactagttcttattacaggcttctacagatccctgtcactccccattattcctggagatcttaggtcctgacttactgctgctttctccagtactactcctgtcatcattcctgatgtgtttaatattgatgtagagaatccttccagttgcatggcatcttaattccttgacttccttcctgtcttccaatgaccttgtcccacacacaatctcagccacttacccgacagtcattctctgggacctcatcattcctaacaaccctccatactctcaatttcaaatattccactctgggaaagcagatccattgcctcctatgattcttcattcccaaccaggacaagcagtcca

SEQ ID NO: 407453 - DNA, 386 bp, Homo sapiens
attaattatagtcaccagcctgtacagtagatctcttgaaattgtttctccttctaactgaaactttgtaccctttcaccaacatctcccattccacatcctcccattctcccccaggccctgctccagtccctgggaacaactgttctactctctgcttctataagtttgattttgtttttagattccacatatgtgtgagatcacatggtatttatctttcttgcctggcttatttcactaagcataatgtattctaggaacatccatattgtcataaatggaaggatatcccctttttaagcctgagtaggattctagtgtgtgtgtgtgtgtgtgtatataacattttctttattcatctgttgttagacacttaagttgat

SEQ ID NO: 407454 - DNA, 386 bp, Homo sapiens
aacctggccaacatggtgaaagtccatctctattaataaaaaaattttaattttaattttaattttaaaaaaagagagaggaggactgagaaatgtgtggggggtggggaggggctgtcctttaaaactgagtggctaaggccgggcacgatggctcatgcctgtaatcctagcactttgggaggccgaggcgggcagatcacctgaggtcagggggtcgaggccagcctgaccaacatggtgaaactctgtctctactaaaagtacaaaaattagccagggtggtggtgggtgcctgtaatcccagctacttgggaggctgaggcaggagaattgcttgaacccgggaggcagaggttgcagtgagctgagattgcccgttgcac

SEQ ID NO: 407455 - DNA, 792 bp, Homo sapiens
atttttcaaaacttttctattttcctactcaattttattgatgaaaattagaatgcagtcaagtgccagaaactggtatgtggacttttatggacattattgttaatgtttattttgctagagcagtatttgtgagttgaaaatatttatgtttaaaggtttatctgcatttaaggtttattttatatactttagtattttattttatatttttactttatttcccttttgtgtatattcatttacatttatttatgtatttatttatttgccataaaattttgttcccattgcacgttctagctaggtttctatacaaaaatataaaattcttgtacaattatcttatatcagtttaccttactgaattttcttatttccaatttttttttcagattcttatcttgcattttccggtgaaacaaccatgttatgaaataattatatttttattttgaaaatatatactgcattatatattcttgctttatgacattggcttgaatctctaaaaatcatccactaacactaacactgttgcaagaaggcgtccttacattgtttctgattttactgagaattttcttagtgcttaaccattatcatcatagtaacttttaaaaatataaactatttatcttactaaatccctcaattcctgagttactgagagcttttgtcttttgtttgtttctagtatttatcaagaatgaatctggaatcttctcaaagcctgtgagcctctgttaagaatgattaatttattttaaataaaacaattaaaaattaata

SEQ ID NO: 407456 - DNA, 376 bp, Homo sapiens
tttctcttgataagggtcctaataccattcctgaaggctctaccctcatgacccaattgccccccaaaaaccccacctcccaaccccatcacaccatcatgctggggttagaatttcaagaaatgaacttgagggaacacaaacattcagttcatacagatgacacagaagatttgaaaagaagtcaagtagaagtgctagaaataaaaagtattgctagtaatcaaaattaaaacccagtggccatgtttggtaacagaagagaaaattggtaaattagaagatagaaaaagaaaaaaaaacagaccaaaatgtgacacaggaggcaaaaagatggaaaatgcagaataaaaagagatgtggtggggggtaatgt

SEQ ID NO: 407457 - DNA, 235 bp, Homo sapiens
gtcagtcaagggaatttctatctaagcacttaccagcaatttgagctccttctcttttggtctaggtggctctaaaataacaataaaggctacagtgattgaaattcaccagacttgaaatagactgcagccttcttccttcccaccttcttagaatctttgtcctattcatcttccttacgcttccccgggttctcttacttctggattctaacagtgagttgtgagaagcaac

SEQ ID NO: 407458 - DNA, 234 bp, Homo sapiens
caacctggccaacatagggtgactcctatctctattaaaaagttaataaataaaataggccgggcactgtgactcatgcctgtaatcctagtattttgggagactgaggcaggaggatcacttcaggccaaggttcaagaccaacctggccaacatagcaagatccccatctctattaaaaaataataaaagaggccaggcacggtggctcacgcctgtaatcttagcagtttg

SEQ ID NO: 407459 - DNA, 342 bp, Homo sapiens
cctttaaaatcgccagactcaggcatgaaaatagagtttcagggacagaaggaacaagtcccctcttcttggttaatatttaattgggtgctaaagatttcttggagaggacctctgtacctccagtgacaggcatacaagaggctcctatctctgcaagagatgcaggcacttccctgaataaacgaaaataacatacaattaaatcagactattcaattaataaattactttggtggaccttgcaggccaagtcctatttaattacataattttaacttaacacttgagttagagaacacatttatttaataaatgcaggcctaagtgctagaaggccgt

SEQ ID NO: 407460 - DNA, 572 bp, Homo sapiens
atcacccactcgacaactcctgccccgataaaaatatctacatactcctaagtagattttttggctctaagttagcaagtagagctttttgtatttgaggttttttaaaatgcatatacccctgaaaggattaagacaagatcatcagtcattgtaaccttatgtgaatgtattaaatcaaattatatttgctagaacactccatatggagatgtttaacactgaggaaacagaagggagggcaatttggaagcaaataggaagagatagcccagttggaaagaggtactttggcagggtacggtggctcatgcctgtaattccagcactttggaggccgaatcaggaggattccttgagccaaggagttcgagagcagcctgggcaacatagtgagacctatctctactaaaaattaaaaaatcagccaggtgtggtgacgtgtgcctgtagtcccagctacttgggaagctgaggtgggaggatcccttgagcccaagaggtcatggtttccgtgagctatgattgtgctagtgccctctagcctgggtgacaaagtaagaccttgtctc

SEQ ID NO: 407461 - DNA, 363 bp, Homo sapiens
ttgatggtgaggaagtcccaaggggtgggtttgagctcaggaatcaatcaagccacacctggctaaagaaaagtagacccagctgatccttctgaggctgaaaagcagtgaagccaggtgtgttggcacacatctgcgatcccagctcctcaggaggcagaggtgggagcatcactggatcccaggaggttggggctagcctgggcaaaatagcaagaccccatctgtttttctttaaaaaaaagaggctaagtgcagtggctcacatctgcaatcccagcactcgggagggtgaggcaggtggatcagttgagcccaggagtttgagaccagcccgggcaacatggcaaaaccccatctatt

SEQ ID NO: 407462 - DNA, 748 bp, Homo sapiens
gtacattgttactctagagggttagtaaaccttgggcagagtattgggatcttgataagaccacgtaaaactcggcctttgaaatttcttccctactttgcctcacttaagtgttaaaattgctgcctgatgaaggtttggatctgtgtgcccacccaaatctcatgttgaattgtaatccccagtgatggaggtggggcctggtgggaggtgattggatcatgggcatgttttctaatggttgaacaccatccctctgggtgctgttctaatcacaatgagtgagttctcaagagatctggttgtttaaaagtgtgtagcacctcccctccatcttccccctgctccaaacatgctaagtgccagcttctccttcaccttctgccatgatttaaagtttcctatggcctccccagaagaaaagatcccagcatcatgcttcctgtacagcctgtggaaatgtgagccaattaaaactcttttttttttttttttaagtaaactacccagtctcaggtatttctttatagcagtgtgagaatgaactaatacactgcctaaatatagccttcctttttattttgttgttttgttcatttcagttgttacagacaactaaaaaccaaagctataatgtgagtacacagaaagattcaccaattcccagccttatttacctgtgctcttttacctttgatcactcattatagagaaaatgtcctccttacacaaagggcagaaacgtatc

SEQ ID NO: 407463 - DNA, 520 bp, Homo sapiens
cttcatctctaatgtggagatgataatacccaattctctgggctgctgtgaggactaagcatgataaataaataaatagcatgattcttgattatggtatgcacccagagagcctctgtccttgaagatttcaatgttatgccattttgattaatttttatgttgattagaaatagctaatattttcactcgttttgcagaagagagaaaattccattgatgattcttcaataataagaatagtgtaggccaggcatggtggctcacacctgtaatcccagcattttgggagaccaaggaggatggatcacttgagcccaggagtttgagatcagcctaggcaatatgacgaagccccgtctctacaaaaaattagtcatgcatggtggtgcatgcctatagtcccagccacttgggaggctgaggtgagataatctcctgagacagggaggtcaaggctgcaatgagccatgatcacgccacagtatcccagtctgggtgacaagtgagaccctgtctc

SEQ ID NO: 407464 - DNA, 308 bp, Homo sapiens
gcccatgtaggtgtttatctgggtctcattgttcactccatgacaatccagatcttttctcagtgggtagcagaggatagagagaagagtggaagcacttcgtattatatcacaataaaatccactgaaccaatacccttcaacttgctgaaaaccattagacaggaccccaagccccaagagtctgtctaaaaatgtaaccccttccaaatgtctcctgctcttctcatgggagctcttagttcaggacacctgagatttcctgtcaaaggaattagcttaagggggtgctcaaggcaggagacacg

SEQ ID NO: 407465 - DNA, 482 bp, Homo sapiens
ccctatgttgcctaggctggtcttgaactcctaggctcaagtgatcctcccccttaggcctcccaaagtgttgggattataggcatgaaccactgcacctggcctgtttttcatttccaaaagttctttaaggagtcctgcctattcatgcgtgacagtatgtaccctacagctttctcatcactgactgcgcgacttctttgaacacctcacacataactatcctctcacctgtatgatgacagtttcaggatctgcgtttctttgtggctgacagcggctgcctgctgtttctgttggccctcagtcagctgactctccttgtgtgcttggggatctttgcaagctgaatgcctgacttacgagcaggaatgaggctaagccaggtaagcttccttcagggagcaggtgctttgaccgctactggtacctgaggatcttggctcagcatgggagacacaggctcatcttcccacctcacc

SEQ ID NO: 407466 - DNA, 295 bp, Homo sapiens
tgtaggcaaatgcagttttactttttaatgaaggacaagtctgttgataacattttgattcttaaaattttttttatcttataaaaatgaaacaatgcatttaaagtgtcttcagctcttatgttaataccaaattatacattttcttagcccatgttcaggagagacaatatatcttccaaattaagagaagctggcaccatttttaaaacaaggccttgaatctgctgtggtatgtgctggtaggaattttgtatgaagctgttattgaagtagatgacattaaggtcaaagg

SEQ ID NO: 407467 - DNA, 864 bp, Homo sapiens
tagctgactctagaggatacacatgcaatgctgatgacaccctttctcgaaaattggatgatctgagtctctccagacaaggaacaagttttgccagtgaagaattttggaaaggcagagtagagcaggaaactccagaagaccctgaagaatgggctgatcatgaagattatatgacgcagctcctcctcaagtttggtgataaaagcctctttcagccacagcccaatgagatggatattcgagccagtgagcactggatatctgataacatggttaaaagtaagaccgagttaaagcaaaataaccagagccttgcaagtaaaaaataccagtctgatatgtactgggcacagtcacaagatggactgggcgattctgcttatggcagccacccaggccctgcaagcagtagaaggcttcaggaattggaactggaccatggggcttcagggtataatcatgatgaaacacagtggtatgaagattccctggagtgtctgtcagacctgaaaccagagcaaagtgttcgggattcgatggattctttggcattgtccaatatcacaggggcttcggtggatggagaaaacaagccaaggccatcattgtattctctgcaaaattttgaggagatggaaacagaagattgtgagaagatgagcaatatgggaactttgaactcttccatgctgcacaggagtgcagagtccttaaagagtctaagttcagagttgtgtccagagaaaatcctgcctgaagagaagccagtacatctgccagtgctcagaaggtccaagtctcaatccagaccccagcaggtcaagttttctgatgatgtcattgacaatgggaactatgaca

SEQ ID NO: 407468 - DNA, 1929 bp, Homo sapiens
ctttggagatggagcccaagatgagcaaactggcctttggctgtcagagaagttccacatcagatgatgactctggctgtgcattggaggagtacgcctgggtccccccgggcctgagaccagagcagatccagctctattttgcttgcttaccagaggaaaaagttccttacgttaacagccccggagagaagcatcggattaaacagcttttgtaccagttaccaccacatgataatgaggtacggtattgccagtctttgagtgaagaggagaaaaaagagttgcaggtgttcagtgctcagcggaagaaagaagcactgggaagaggaacaattaagcttctgtccagagcagtcatgcatgctgtgtgtgagcagtgtggtttgaagataaatggaggtgaagttgcagtgttcgcctcccgtgcgggccctggtgtgtgctggcacccatcctgttttgtctgtttcacgtgtaatgagctgctggtcgacctcatctatttttatcaggatggaaaaattcactgtggcaggcaccatgcagaactgctcaaaccacggtgctcagcatgtgacgagataatttttgctgatgagtgcacagaagctgagggtcgccattggcacatgaaacacttctgctgccttgagtgtgaaacggtcctgggaggacagaggtatatcatgaaggacggccgccccttctgctgtggctgttttgagtctctctatgcggagtactgtgaaacctgtggggaacatattggtgtggaccatgcacagatgacctatgacgggcagcactggcacgccacggaagcctgcttttcttgtgcccagtgtaaagcctctttgttgggatgtcccttccttcccaaacagggtcagatttactgctcaaaaacgtgcagtcttggtgaagacgtccatgcctctgattcttccgactctgcatttcagtcagctcgatcaagagactcccgaagaagtgtccgaatgggcaagagcagccggtcagcagatcagtgtagacagtctctcctcttatcgcctgctctgaactacaagtttcctggcctctcaggcaatgctgatgacaccctttctcgaaaattggatgatctgagtctctccagacaaggaacaagttttgccagtgaagaattttggaaaggcagagtagagcaggaaactccagaagaccctgaagaatgggctgatcatgaagattatatgacgcagctcctcctcaagtttggtgataaaagcctctttcagccacagcccaatgagatggatattcgagccagtgagcactggatatctgataacatggttaaaagtaagaccgagttaaagcaaaataaccagagccttgcaagtaaaaaataccagtctgatatgtactgggcacagtcacaagatggactgggcgattctgcttatggcagccacccaggccctgcaagcagtagaaggcttcaggaattggaactggaccatggggcttcagggtataatcatgatgaaacacagtggtatgaagattccctggagtgtctgtcagacctgaaaccagagcaaagtgttcgggattcgatggattctttggcattgtccaatatcacaggggcttcggtggatggagaaaacaagccaaggccatcattgtattctctgcaaaattttgaggagatggaaacagaagattgtgagaagatgagcaatatgggaactttgaactcttccatgctgcacaggagtgcagagtccttaaagagtctaagttcagagttgtgtccagagaaaatcctgcctgaagagaagccagtacatctgccagtgctcagaaggtccaagtctcaatccagaccccagcaggtcaagttttctgatgatgtcattgacaatgggaactatgaca

SEQ ID NO: 407469 - DNA, 319 bp, Homo sapiens
atgaggattaattatatctgtgtcacccacacagctcccccatacccataatctttatttattttcttcgtttcttccttataccttgtttcaggcattaaaccataacctgttatttattctatccttttcaaaacaggtgtggaccatgcacagatgacctatgacgggcagcactggcacgccacggaagcctgcttttcttgtgcccagtgtaaagcctctttgttgggatgtcccttccttcccaaacagggtcagatttactgctcaaaaacgtgcagtcttggtgaagacgtccatgcctctgattcttccg

SEQ ID NO: 407470 - DNA, 732 bp, Homo sapiens
ctcggtacccctcctcagcagacgcagctctggctcctcagcagacgcagctcctcctcaagtttggtgataaaagcctctttcagccacagcccaatgagatggatattcgagccagtgagcactggatatctgataacatggttaaaagtaagaccgagttaaagcaaaataaccagagccttgcaagtaaaaaataccagtctgatatgtactgggcacagtcacaagatggactgggcgattctgcttatggcagccacccaggccctgcaagcagtagaaggcttcaggaattggaactggaccatggggcttcagggtataatcatgatgaaacacagtggtatgaagattccctggagtgtctgtcagacctgaaaccagagcaaagtgttcgggattcgatggattctttggcattgtccaatatcacaggggcttcggtggatggagaaaacaagccaaggccatcattgtattctctgcaaaattttgaggagatggaaacagaagattgtgagaagatgagcaatatgggaactttgaactcttccatgctgcacaggagtgcagagtccttaaagagtctaagttcagagttgtgtccagagaaaatcctgcctgaagagaagccagtacatctgccagtgctcagaaggtccaagtctcaatccagaccccagcaggtcaagttttctgatgatgtcattgacaatgggaactatgaca

SEQ ID NO: 407471 - DNA, 1362 bp, Homo sapiens
cacatttctttttgaagataatttttgctgatgagtgcacagaagctgagggtcgccattggcacatgaaacacttctgctgccttgagtgtgaaacggtcctgggaggacagaggtatatcatgaaggacggccgccccttctgctgtggctgttttgagtctctctatgcggagtactgtgaaacctgtggggaacatattggtgtggaccatgcacagatgacctatgacgggcagcactggcacgccacggaagcctgcttttcttgtgcccagtgtaaagcctctttgttgggatgtcccttccttcccaaacagggtcagatttactgctcaaaaacgtgcagtcttggtgaagacgtccatgcctctgattcttccgactctgcatttcagtcagctcgatcaagagactcccgaagaagtgtccgaatgggcaagagcagccggtcagcagatcagtgtagacagtctctcctcttatcgcctgctctgaactacaagtttcctggcctctcaggcaatgctgatgacaccctttctcgaaaattggatgatctgagtctctccagacaaggaacaagttttgccagtgaagaattttggaaaggcagagtagagcaggaaactccagaagaccctgaagaatgggctgatcatgaagattatatgacgcagctcctcctcaagtttggtgataaaagcctctttcagccacagcccaatgagatggatattcgagccagtgagcactggatatctgataacatggttaaaagtaagaccgagttaaagcaaaataaccagagccttgcaagtaaaaaataccagtctgatatgtactgggcacagtcacaagatggactgggcgattctgcttatggcagccacccaggccctgcaagcagtagaaggcttcaggaattggaactggaccatggggcttcagggtataatcatgatgaaacacagtggtatgaagattccctggagtgtctgtcagacctgaaaccagagcaaagtgttcgggattcgatggattctttggcattgtccaatatcacaggggcttcggtggatggagaaaacaagccaaggccatcattgtattctctgcaaaattttgaggagatggaaacagaagattgtgagaagatgagcaatatgggaactttgaactcttccatgctgcacaggagtgcagagtccttaaagagtctaagttcagagttgtgtccagagaaaatcctgcctgaagagaagccagtacatctgccagtgctcagaaggtccaagtctcaatccagaccccagcaggtcaagttttctgatgatgtcattgacaatgggaactatgaca

SEQ ID NO: 407472 - DNA, 360 bp, Homo sapiens
tcagatggcaggggaggcgtcctgaatcttcaagttcccctttccacccattgtcgtcacctgagcagctgttttgttttaattttgctttattgtttaaggaagttcattcatactgattttctcactcaagcctcatggcccctggtgaggtaggtggccctattcctccttttacaatggaagagaaagctcagcgtcagtcctccctcttctccacggctgctcactcccattcccatgttctcactgcagaatgacgtggctcctgtgtgtcaatccccagggaggagggcatagcatctctgccctcaggaaccttccagtctcactggggggtgtgccacatacataaagctg

SEQ ID NO: 407473 - DNA, 746 bp, Homo sapiens
ctgatgtgaaaatccctgcgttcatcaacataacccagttagggtcgcactcatcacggggcccccattgcctctggcgcaccccacgactgacatctgcggggccttcgcgctaggcttcgagtttcagcttccgcaccaggcctgcctttctgcaggggccagggtgggggtcgtgtgctgattgggccctctgaaccgccaccgctgcagaggggctgttccttccgtcacatcccttgtgcccgaatccaccctgtgtcttctcttttctcagcaggacattttaaaagcccagaccccctccttacagagcaaatgtccaggcttcggaggtcactgtcacatcccaagaacccccttcaccaggtgccactcttgagactggactgaagccccctggagagttccacttgcctttgtcctgctgcctgaggtgaggacatggacggccgggtacaagacggggcaggcaacctcgcagtggtggtaaccctgtgcatgaaccctgggcctggcacgtggacctcctgtgaccgtccctacaggcccgtgaggctgagcttggcactgcccaagaccacacagtccatgcgcggtggagctggggtccaggctgcccaccagggcagtgactacaatggtggcagcaggggacggtcaccgtcatgagctcaagccaggcgctgcactgaccttgagggagggctccatgcttccccttcccacagctgcagtgaggccta

SEQ ID NO: 407474 - DNA, 314 bp, Homo sapiens
atagggaatgtctactaatattctttgaatcctctgtaacccctgccataatgtcttgctcaatctatggaaactgtctttctttgattaatgacaagctaatgatagttttatttcctatctagtttgtgaatgaacattgttaattgaaattattatctttagattatctggattcttttttatccatcttagtattgctatctcagaatcacacacgctaatgtaaaaaaagaaataaataaccaaggaatctctgtttgaacacctccagtgacaagggactcactgcccattcttctgctgggcaatgc

SEQ ID NO: 407475 - DNA, 886 bp, Homo sapiens
gctgcgggcctcgcgaccctcctgcttccctccccgccccgcgccgcctctctggtttgtgcgcccgtcgcaggtcgcaggcctctttgtcagctggagttgcgcgggctgacgcgccactatgtagcgggtttcgggcgggccacgcgtgcgggacaggaacccaaccccagccgaccttgagctccaggagttcgtctcttacgtctgcggaagtgcagctgcctcagttcttagcgcaggttgacaactacaggcacaagccattgaagctggaatgtcctgttgctggtatttcaattgacttaagccaactatcccttcagttacaataggaaagtgcctctaataaggccaaatatgcgtactaacttgtagcaaccacgtgtccgtgcagtgccacaggagctagagcagtgacaatgctggtggcaacagggcagtgtagcaggtgcttcatgttcaccttttcaaccttttcatttaattgtcacaactcggaggtggattctgttagggacaggctgccccaggaccactccgcccccgctaactcaatgcagctgacccttaccctgaatactctgcagctgcattcctgaaccgttatctaggcgctatagcaaggtcaccagacttgctacaccgaagccctctgggtggcacgggggaggtcatgagaaacgtggattacacccccttgtaaattcctattttcacaagataatatattgtaagccggtcatgagattatatgtggtaaagttaattgactaacaaccccagggtctctctcccccatataaacccctcattttgtaagctcagggctgccacctccgactggtggagaagcctggcaggttaataaacttacttggcctga

SEQ ID NO: 407476 - DNA, 749 bp, Homo sapiens
ggtcgaggctggtgtgaatcggccgaggctggagttgcgcgggctgacgcgccactatgtagcgggtttcgggcgggccacgcgtgcgggacaggaacccaaccccagccgaccttgagctccaggagttcgtctcttacgtctgcggaagtgcagctgcctcagttcttagcgcaggttgacaactacaggcacaagccattgaagctggaatgtcctgttgctggtatttcaattgacttaagccaactatcccttcagttacaataggaaagtgcctctaataaggccaaatatgcgtactaacttgtagcaaccacgtgtccgtgcagtgccacaggagctagagcagtgacaatgctggtggcaacagggcagtgtagcaggtgcttcatgttcaccttttcaaccttttcatttaattgtcacaactcggaggtggattctgttagggacaggctgccccaggaccactccgcccccgctaactcaatgcagctgacccttaccctgaatactctgcagctgcattcctgaaccgttatctaggcgctatagcaaggtcaccagacttgctacaccgaagccctctgggtggcacgggggaggtcatgagaaacgtggattacacccccttgtaaattcctattttcaccaaccccaggggctttttcccccatttaacccctaattttgaaggccaggctggcacctccactggtggagagcccgccgggtataaactttta

SEQ ID NO: 407477 - DNA, 821 bp, Homo sapiens
ggtcgaggctggtgtgaatcggccgaggctggagttgcgcgggctgacgcgccactatgtagcgggtttcgggcgggccacgcgtgcgggacaggaacccaaccccagccgaccttgagctccaggagttcgtctcttacgtctgcggaagtgcagctgcctcagttcttagcgcaggttgacaactacaggcacaagccattgaagctggaatgtcctgttgctggtatttcaattgacttaagccaactatcccttcagttacaataggaaagtgcctctaataaggccaaatatgcgtactaacttgtagcaaccacgtgtccgtgcagtgccacaggagctagagcagtgacaatgctggtggcaacagggcagtgtagcaggtgcttcatgttcaccttttcaaccttttcatttaattgtcacaactcggaggtggattctgttagggacaggctgccccaggaccactccgcccccgctaactcaatgcagctgacccttaccctgaatactctgcagctgcattcctgaaccgttatctaggcgctatagcaaggtcaccagacttgctacaccgaagccctctgggtggcacgggggaggtcatgagaaacgtggattacacccccttgtaaattcctattttcacaagataatatattgtaagccggtcatgagattatatgtggtaaagttaattgactaacaaccccagggtctctctcccccatataaacccctcattttgtaagctcagggctgccacctccgactggtggagaagcctggcaggttaataaacttacttggcctga

SEQ ID NO: 407478 - DNA, 605 bp, Homo sapiens
gcggacgcgtgggtcgacccacgcgtcggccaactatcccttcagttacaataggaaagtgcctctaataaggccaaatatgcgtactaacttgtagcaaccacgtgtccgtgcagtgccacaggagctagagcagtgacaatgctggtggcaacagggcagtgtagcaggtgcttcatgttcaccttttcaaccttttcatttaattgtcacaactcggaggtggattctgttagggacaggctgccccaggaccactccgcccccgctaactcaatgcagctgacccttaccctgaatactctgcagctgcattcctgaaccgttatctaggcgctatagcaaggtcaccagacttgctacaccgaagccctctgggtggcacgggggaggtcatgagaaacgtggattacacccccttgtaaattcctattttcacaagataatatattgtaagccggtcatgagattatatgtggtaaagttaattgactaacaaccccagggtctctctcccccatataaacccctcattttgtaagctcagggctgccacctccgactggtggagaagcctggcaggttaataaacttacttggcctga

SEQ ID NO: 407479 - DNA, 891 bp, Homo sapiens
  misc_feature (847)..(847): n is a, c, g, or t
gctgcgggcctcgcgaccctcctgcttccctccccgccccgcgccgcctctctggtttgtgcgcccgtcgcaggtcgcaggcctctttgtcagctggagttgcgcgggctgacgcgccactatgtagcgggtttcgggcgggccacgcgtgcgggacaggaacccaaccccagccgaccttgagctccaggagttcgtctcttacgtctgcggaagtgcagctgcctcagttcttagcgcaggttgacaactacaggcacaagccattgaagctggaatgtcctgttgctggtatttcaattgacttaagccaactatcccttcagttacaataggaaagtgcctctaataaggccaaatatgcgtactaacttgtagcaaccacgtgtccgtgcagtgccacaggagctagagcagtgacaatgctggtggcaacagggcagtgtagcaggtgcttcatgttcaccttttcaaccttttcatttaattgtcacaactcggaggtggattctgttagggacaggctgccccaggaccactccgcccccgctaactcaatgcagctgacccttaccctgaatactctgcagctgcattcctgaaccgttatctaggcgctatagcaaggtcaccagacttgctacaccgaagccctctgggtggcacgggggaggtcatgagaaacgtggattacacccccttgtaaattcctattttcacaagataatatattgtaagccggtcatgagattatatgtggtaaagttaattgactaacaaccccacgctctttgtgtgggggggagggggggctagagggagggaaaaaaataatacttttttcatnaagcctcccaggttaataaacttacttggcctaaaaaaaaaaaa

SEQ ID NO: 407480 - DNA, 437 bp, Homo sapiens
ggtcgaggctggtgtgaatcggccgaggctggagttgcgcgggctgacgcgccactatgtagcgggtttcgggcgggccacgcgtgcgggacaggaacccaaccccagccgaccttgagctccaggagttcgtctcttacgttgcattcctgaaccgttatctaggcgctatagcaaggtcaccagacttgctacaccgaagccctctgggtggcacgggggaggtcatgagaaacgtggattacacccccttgtaaattcctattttcacaagataatatattgtaagccggtcatgagattatatgtggtaaagttaattgactaacaaccccagggtctctctcccccatataaacccctcattttgtaagctcagggctgccacctccgactggtggagaagcctggcaggttaataaacttacttggcctga

SEQ ID NO: 407481 - DNA, 638 bp, Homo sapiens
gctgcgggcctcgcgaccctcctgcttccctccccgccccgcgccgcctctctggtttgtgcgcccgtcgcaggtcgcaggcctctttgtcagctggagttgcgcgggctgacgcgccactatgtagcgggtttcgggcgggccacgcgtgcgggacaggaacccaaccccagccgaccttgagctccaggagttcgtctcttacgtctgcggaagtgcagctgcctcagttcttagcgcaggtatgttcctagccttgagcggggtgggggaaggaatgagtcagcctggagcacgtggccagtgggaccggagggttccccggcgtctgtttgtcgccaaggtccgaatccggctccccttaactggaaggaaacatccatgtaggggctcaccaaacaaaacagctgtgtttctagtgtggtttcagacttagagaagcagagatccacgaggtattgagagcaacgcggaaaatagtagtgaaccctgtaaaaatcaaagaaaaaaaatcacaaagcaccctttcctgtgcccttttaaggttgacccagtgctttaagaggctaacacagaagggtaaagtaagtctccataaaacccagagaagagactggaaagctcctctttggatcctg

SEQ ID NO: 407482 - DNA, 955 bp, Homo sapiens
gctgcgggcctcgcgaccctcctgcttccctccccgccccgcgccgcctctctggtttgtgcgcccgtcgcaggtcgcaggcctctttgtcagctggagttgcgcgggctgacgcgccactatgtagcgggtttcgggcgggccacgcgtgcgggacaggaacccaaccccagccgaccttgagctccaggagttcgtctcttacgtctgcggaagtgcagctgcctcagttcttagcgcaggttgacaactacaggcacaagccattgaagctggaatgtcctgttgctggtatttcaattgacttaagccaactatcccttcagttacaataggaaagtgcctctaataaggccaaatatgcgtactaacttgtagcaaccacgtgtccgtgcagtgccacaggagctagagcagtgacaatgctggtggcaacagggcagtgtagcaggtgcttcatgttcaccttttcaaccttttcatttaattgtcacaactcggaggtggattctgttagggacaggctgccccaggaccactccgcccccgctaactcaatgcagctgacccttaccctgaatactctgcagctgcattcctgaaccgttatctaggcgctatagcaaggtcaccagacttgctacaccgaagccctctgggtggcacgggggaggtcatgagaaacgtggattacacccccttgtaaattcctattttcacaagataatatattgtaagccggtcatgagattatatgtggtaaagttaattgactaacaaccccagggtctctctcccccatataaacccctcattttgtaagctcagggctgccacctccgactggtggagaagcctggcaggttaataaacttacttggcctgaaaaaaaaaaccagaacaaacacacaaaaaaacaacccgaggaaataaaataaagtgaaaaaagagtaaa

SEQ ID NO: 407483 - DNA, 774 bp, Homo sapiens
gctgcgggcctcgcgaccctcctgcttccctccccgccccgcgccgcctctctggtttgtgcgcccgtcgcaggtcgcaggcctctttgtcagctggagttgcgcgggctgacgcgccactatgtagcgggtttcgggcgggccacgcgtgcgggacaggaacccaaccccagccgaccttgagctccaggagttcgtctcttacgtctgcggaagtgcagctgcctcagttcttagcgcaggttgacaactacaggcacaagccattgaagctggaatgtcctgttgctggtatttcaattgacttaagccaactatcccttcagttacaataggaaagtgcttcatgttcaccttttcaaccttttcatttaattgtcacaactcggaggtggattctgttagggacaggctgccccaggaccactccgcccccgctaactcaatgcagctgacccttaccctgaatactctgcagctgcattcctgaaccgttatctaggcgctatagcaaggtcaccagacttgctacaccgaagccctctgggtggcacgggggaggtcatgagaaacgtggattacacccccttgtaaattcctattttcacaagataatatattgtaagccggtcatgagattatatgtggtaaagttaattgactaacaaccccagggtctctctcccccatataaacccctcattttgtaagctcagggctgccacctccgactggtggagaagcctggcaggttaataaacttacttggcctga

SEQ ID NO: 407484 - DNA, 1670 bp, Homo sapiens
agacggaccgagggccggaagtgacgccagctggcccgcttgaggcgtagggggtggcgctctccgttcggcggcgctcccatggcgcacattaccattaaccagtacctgcagcaggtgtacgaagccatcgacagcagagatggagcatcttgtgcagagttggtgtcttttaaacatcctcatgttgcaaacccacgacttcaaatggcctctccagaggagaagtgtcaacaagtcttggaacccccttatgatgaaatgtttgcagctcatttaaggtgcacttatgcagtggggaatcatgacttcatagaggcatacaagtgccagaccgtgatagtccaatcattcttgcgagcattccaggcccacaaagaagaaaactgggctctgcctgtcatgtatgcagtagcgcttgaccttcgagtgtttgccaataatgcagatcaacagttggtaaagaaaggaaaaagcaaagttggggacatgttggaaaaagcagcagagttactgatgagctgtttccgggtctgtgccagcgacacccgtgctggtatagaggactctaagaagtggggcatgctgtttctggtgaaccagctgtttaaaatctacttcaagatcaacaaactccatttatgtaaacccctaattagagcaattgacagctcaaacctgaaagacgattacagcactgcacagagagtaacatacaaatactacgttggacgcaaggctatgtttgacagcgattttaagcaagctgaggagtacctgtcatttgcctttgagcattgtcaccgttctagtcagaagaacaaaaggatgattctgatctatttgcttccagtaaaaatgctattgggtcacatgcccactgtggagctcctgaaaaagtatcacctgatgcagtttgcggaagtaaccagagctgtgagcgagggcaacctgctgctgctgcacgaggcgctggcgaagcacgaggccttcttcattcgctgcggaatcttcctcatcctggagaagctgaagatcatcacctacaggaacctctttaagaaagtgtatttgttactgaaaacacaccagctgtctctggatgcttttctggttgccttgaagttcatgcaggtggaggacgtggacattgacgaagttcagtgtattctggctaacttgatatacatgggacacgtcaaaggctacatatcgcatcagcatcagaagctggtggtcagcaagcagaacccatttcctcccctgtccacggtgtgttgaaagtacacggagccccgaggacggactcggctggttctggagtctttgtgagacttctttgaaggaggctttgcgtgaaggctgctcggctcacttttcctaagtgtggttcctgaaggctgtctttgtaactttttgtagttctttgtgtaaaaagcgtattctgaatttatacacatggcatgttcttcattatatcttccaggatacatctatttttatatattaaatttgaatgtgttatcaaaatgcttggttaacttaaggcacctttttaaaagcagaatttaatttgatttaaattttccagattttatagcttgcctgtatggatgctcctcaatttatgatggggttacatcccaataaacttattttatttgcctttg

SEQ ID NO: 407485 - DNA, 1940 bp, Homo sapiens
agacggaccgagggccggaagtgacgccagctggcccgcttgaggcgtagggggtggcgctctccgttcggcggcgctcccatggcgcacattaccattaaccagtacctgcagcaggtgtacgaagccatcgacagcagagatggagcatcttgtgcagagttggtgtcttttaaacatcctcatgttgcaaacccacgacttcaaatggcctctccagaggagaagtgtcaacaagtcttggaacccccttatgatgaaatgtttgcagctcatttaaggtgcacttatgcagtggggaatcatgacttcatagaggcatacaagtgccagaccgtgatagtccaatcattcttgcgagcattccaggcccacaaagaagaaaactgggctctgcctgtcatgtatgcagtagcgcttgaccttcgagtgtttgccaataatgcagatcaacagttggtaaagaaaggaaaaagcaaagttggggacatgttggaaaaagcagcagagttactgatgagctgtttccgggtctgtgccagcgacacccgtgctggtatagaggactctaagaagtggggcatgctgtttctggtgaaccagctgtttaaaatctacttcaagatcaacaaactccatttatgtaaacccctaattagagcaattgacagctcaaacctgaaagacgattacagcactgcacagagagtaacatacaaatactacgttggacgcaaggctatgtttgacagcgattttaagcaagctgaggagtacctgtcatttgcctttgagcattgtcaccgttctagtcagaagaacaaaaggatgattctgatctatttgcttccagtaaaaatgctattgggtcacatgcccactgtggagctcctgaaaaagtatcacctgatgcagtttgcggaagtaaccagagctgtgagcgagggcaacctgctgctgctgcacgaggcgctggcgaagcacgaggccttcttcattcgctgcggaatcttcctcatcctggagaagctgaagatcatcacctacaggaacctctttaagaaagtgtatttgttactgaaaacacaccagctgtctctggatgcttttctggttgccttgaagttcatgcaggtggaggacgtggacattgacgaagttcagtgtattctggctaacttgatatacatgggacacgtcaaaggctacatatcgcatcagcatcagaagctggtggtcagcaagcagaacccatttcctcccctgtccacggtgtgttgaaagtacacggagccccgaggacgggtgagcagttgtttctttccactttggttgtgctgatgagaccggtccggtactgcaacaaggctccctgaagccggaactcttggaggcgcttttcccagggatgctgaggctgagattttcagcacacccgagttaatctccttcatttgtaactaatttcagcctgatgaaaacctggaattcctttttcacagactcggctggttctggagtctttgtgagacttctttgaaggaggctttgcgtgaaggctgctcggctcacttttcctaagtgtggttcctgaaggctgtctttgtaactttttgtagttctttgtgtaaaaagcgtattctgaatttatacacatggcatgttcttcattatatcttccaggatacatctatttttatatattaaatttgaatgtgttatcaaaatgcttggttaacttaaggcacctttttaaaagcagaatttaatttgatttaaattttccagattttatagcttgcctgtatggatgctcctcaatttatgatggggttacatcccaataaacttattttatttgcctttgctttgttggttaaaaaaaaatttcttttaaaaaaccatcttaaattgaaaatacatttaatacacctgctact

SEQ ID NO: 407486 - DNA, 4194 bp, Homo sapiens
  misc_feature (2100)..(2100): n is a, c, g, or t
ttttgtccttttacggcgtcttcccgtcattgtcatggtgattgtcagccgctgtggcactggtgggagtgtcacggagcatgcaaatgaggttgtaatgaagttggaggccctgcaaaggccaggtggacttccacttagcatcctgctggtcttagctggtttaaccaagaggggagcctctgacctcaggcatcctattgctgaagataggcagagtttgagttgtgcaactgttcagccaagcctacaagatgtatagtgctgtgggggtaacatggcctccctacccagcctcgcttcagaactttcgtaccaaggctggactgtagaaaagtccttcctatgccatggcactttcccactgaggcctcccatgggtgccgtttcctttgctggaaggttctcctcgactcctggcagtctatactcatttaaaggtttccgccttctctaaagcctctcactgctggacttcacggtggatcagatttcccttttataaacattcatagcagactgtacatttctttcactgcgtttaccaaacgatttgatggcgaagtgcgtcagggcgtgggccttctccatcactagcgttccttgcaccccaggagctcaatccgtgtttcctaaatgaatacttgacatttcgcttgatcgtatatttttgcacagcagtgatcttcacgacctttgattaggcagtggcttctcagatacgacaacaaaagcataagcaaccaaaggaaaaaattaattggacttcatcaaaattaaaaactttagacttcaaaggacattctcaaaaaagtaaaaaacaaccataacctagcaaataatacatctgataagggcctaatatccagaatatataaagaattattacaattcaacagtaaaaagacaatccaattcaaattctttaaaatgtttaaagaatttgaaaaatcttccaaacaaaatacgcaagtgaccagtaagtgcatgaaaagatgctcaaggtcattaatcaccagtgacttagtcaccaatgactaatgcatcagtcacttgaaatgcacatcagaacctctgagagctgccaggccacacccagtgggatgactgtaatcagaaagacgggcggcgccagtgaggatgcagggagactggagcctcgtacacatcgccaggggaacaaaaacagtgcagctgctgtgcggaaatgggaaggcagttcctgaaagtgggacgtagagctaccatgtgacccagcatttccaccctgaggggacactcagaagacagggcagatccccagtgacatctctttcccgttggggtttgcttttgtcacagtctccaatagaggtcatcattcctggtgccagaccagctacgatattaccatgcgtgtagcgttttacgtgagttacggagtacttgtgtgttttgtttggtttttccatagctctttgaagtcatagaacagtattattatttgtctccgttttcagatgaggaaaacgagaccttgagagacttttgtttgaggtcatgcacgtagggaatgataaaagtcatagacctgcttagagcagctcacaggcagttataaaacagggtttgatattttaaaattgtatttttacattattttaagtgtttctatatggacacattttggtctttaagagtaattttatgttctgtggcttgtaaaccacctgcttgttttctgtactgggcacttttgtatttttgtgccttgactttgagtgattttatcattttgttaacaccacagagtgtacttcgtaaaccgagatggcgtggcctgctacacacccccgctgtgtggcgcagcctgtgggtcctaggctgcgaggagcaagagctgcactaaatgctgtaggcagctggaacacagtgggaattatttgtgtgtctaaacagatctaaacacagaaaagatgcagtaaaaatacagtgtgagactccgtagggccccatctcacatgtggtcaagtgtgagactccgtagggccccatctcacatgtggtcaagtgtgagactccgtagggccccatctcacatgtggtcaagtgtgagactcngtagggccccatctcacatgtggtcaagtgtgagactctgtagggccccatctcacatgtggtcatctgtagttgaccgaaatgttgtgtaacatgtgactgtttccaggttaattgcagacagtggcacaccctcccctaggttcttcagtttctgttttttcagtcttttgaggtaaaatttgcatgcagtgaactacctacagtattatctgtctgcttgctgctgaggtataggacatgattgccaccccagaaacttccctcatccctcatgtggggcaggccctttcagctgtctggatttgttccactgtgggttgcttcctgcctgttcggtgacttcatgtaaatggaccaccacagtgtgtactttttgtgtctgccttggtgggactcatcctctttgtgtgttttactggtttgttttgtcgtactgatgagaagtatttttccatttttcttttctttttgttttttgagacggagtcacgctgtgtcacccaggctgaagtgcattggcccgggtttgagtgattctcctgcctcagcctcctgagtggctgggattacaggcacacaccaccatgccctatttttccatttttcaaaaacggtttataacaattaacttttacgcattgttgctgcaaatgaggcagtttttagctggtgccgcggaggaaggatgttactcaagtagttaattgggattttcctggtttgttttctcttttatttttacccatcaggtaagacatcttttttcataatgttattttgtttgatgaatatgacttgatatgaataagttgatatgaatatgacttgagctttgggacttacctcaagatattaatttgtttaggcagtttattttgtgatttataaataaaatttttatttcctatgtaacttaaaaaaaattatttccccatagccgtgctggtatagaggactctaagaagtggggcatgctgtttctggtgaaccagctgtttaaaatctacttcaagatcaacaaactccatttatgtaaacccctaattagagcaattgacagctcaaacctgaaagacgattacagcactgcacagagagtaacatacaaatactacgttggacgcaaggctatgtttgacagcgattttaagcaagctgaggagtacctgtcatttgcctttgagcattgtcaccgttctagtcagaagaacaaaaggatgattctgatctatttgcttccagtaaaaatgctattgggtcacatgcccactgtggagctcctgaaaaagtatcacctgatgcagtttgcggaagtaaccagagctgtgagcgagggcaacctgctgctgctgcacgaggcgctggcgaagcacgaggccttcttcattcgctgcggaatcttcctcatcctggagaagctgaagatcatcacctacaggaacctctttaagaaagtgtatttgttactgaaaacacaccagctgtctctggatgcttttctggttgccttgaagttcatgcaggtggaggacgtggacattgacgaagttcagtgtattctggctaacttgatatacatgggacacgtcaaaggctacatatcgcatcagcatcagaagctggtggtcagcaagcagaacccatttcctcccctgtccacggtgtgttgaaagtacacggagccccgaggacggcctgatgaaaacctggaattcctttttcacagactcggctggttctggagtctttgtgagacttctttgaaggaggctttgcgtgaaggctgctcggctcacttttcctaagtgtggttcctgaaggctgtctttgtaactttttgtagttctttgtgtaaaaagcgtattctgaatttatacacatggcatgttcttcattatatcttccaggatacatctatttttatatattaaatttgaatgtgttatcaaaatgcttggttaacttaaggcacctttttaaaagcagaatttaatttgatttaaattttccagattttatagcttgcctgtatggatgctcctcaatttatgatggggttacatcccaataaacttattttatttgcctttg

SEQ ID NO: 407487 - DNA, 1770 bp, Homo sapiens
agacggaccgagggccggaagtgacgccagctggcccgcttgaggcgtagggggtggcgctctccgttcggcggcgctcccatggcgcacattaccattaaccagtacctgcagcaggtgtacgaagccatcgacagcagagatggagcatcttgtgcagagttggtgtcttttaaacatcctcatgttgcaaacccacgacttcaaatggcctctccagaggagaagtgtcaacaagtcttggaacccccttatgatgaaatgtttgcagctcatttaaggtgcacttatgcagtggggaatcatgacttcatagaggcatacaagtgccagaccgtgatagtccagcagatcaacagttggtaaagaaaggaaaaagcaaagttggggacatgttggaaaaagcagcagagttactgatgagctgtttccgggtctgtgccagcgacacccgtgctggtatagaggactctaagaagtggggcatgctgtttctggtgaaccagctgtttaaaatctacttcaagatcaacaaactccatttatgtaaacccctaattagagcaattgacagctcaaacctgaaagacgattacagcactgcacagagagtaacatacaaatactacgttggacgcaaggctatgtttgacagcgattttaagcaagctgaggagtacctgtcatttgcctttgagcattgtcaccgttctagtcagaagaacaaaaggatgattctgatctatttgcttccagtaaaaatgctattgggtcacatgcccactgtggagctcctgaaaaagtatcacctgatgcagtttgcggaagtaaccagagctgtgagcgagggcaacctgctgctgctgcacgaggcgctggcgaagcacgaggccttcttcattcgctgcggaatcttcctcatcctggagaagctgaagatcatcacctacaggaacctctttaagaaagtgtatttgttactgaaaacacaccagctgtctctggatgcttttctggttgccttgaagttcatgcaggtggaggacgtggacattgacgaagttcagtgtattctggctaacttgatatacatgggacacgtcaaaggctacatatcgcatcagcatcagaagctggtggtcagcaagcagaacccatttcctcccctgtccacggtgtgttgaaagtacacggagccccgaggacgggtgagcagttgtttctttccactttggttgtgctgatgagaccggtccggtactgcaacaaggctccctgaagccggaactcttggaggcgcttttcccagggatgctgaggctgagattttcagcacacccgagttaatctccttcatttgtaactaatttcagcctgatgaaaacctggaattcctttttcacagactcggctggttctggagtctttgtgagacttctttgaaggaggctttgcgtgaaggctgctcggctcacttttcctaagtgtggttcctgaaggctgtctttgtaactttttgtagttctttgtgtaaaaagcgtattctgaatttatacacatggcatgttcttcattatatcttccaggatacatctatttttatatattaaatttgaatgtgttatcaaaatgcttggttaacttaaggcacctttttaaaagcagaatttaatttgatttaaattttccagattttatagcttgcctgtatggatgctcctcaatttatgatggggttacatcccaataaacttattttatttgcctttg

SEQ ID NO: 407488 - DNA, 670 bp, Homo sapiens
ttcatggatatgaaacccaccgtggatatagagggttgattgtatttatttttactcattgtcttcccgctgaactgaactgtgccgctcttggggaagaatgctaatgccaaattaattagatcacccagcatctttgacatgactcagatccaaaaatgtaaacgcattcctccctttctgccccgcagggacacgtcaaaggctacatatcgcatcagcatcagaagctggtggtcagcaagcagaacccatttcctcccctgtccacggtgtgttgaaagtacacggagccccgaggacggactcggctggttctggagtctttgtgagacttctttgaaggaggctttgcgtgaaggctgctcggctcacttttcctaagtgtggttcctgaaggctgtctttgtaactttttgtagttctttgtgtaaaaagcgtattctgaatttatacacatggcatgttcttcattatatcttccaggatacatctatttttatatattaaatttgaatgtgttatcaaaatgcttggttaacttaaggcacctttttaaaagcagaatttaatttgatttaaattttccagattttatagcttgcctgtatggatgctcctcaatttatgatggggttacatcccaataaacttattttatttgcctttg

SEQ ID NO: 407489 - DNA, 800 bp, Homo sapiens
agacggaccgagggccggaagtgacgccagctggcccgcttgaggcgtagggggtggcgctctccgttcggcggcgctcccatggcgcacattaccattaaccagtacctgcagcaggtgtacgaagccatcgacagcagagatggagcatcttgtgcagagttggtgtcttttaaacatcctcatgttgcaaacccacgacttcaaatggcctctccagaggagaagtgtcaacaagtcttggaacccccttatgatgaaatgtttgcagctcatttaaggtgcacttatgcagtggggaatcatgacttcatagaggcatacaagtgccagaccgtgatagtccaatcattcttgcgagcattccaggcccacaaagaagaaaactgggctctgcctgtcatgtatgcagtagcgcttgaccttcgagtgtttgccaataatccgtgctggtatagaggactctaagaagtggggcatgctgtttctggtgaaccagctgtttaaaatctacttcaagatcaacaaactccatttatgtaaacccctaattagagcaattgacagctcaaacctgaaagacgattacagcactgcacagagagtaacatacaaatactacgttggacgcaaggctatgtttgacagcgattttaagcaagctgaggagtacctgtcatttgcctttgagcattgtcaccgttctagtcagaagaacaaaaggatgattctgatctatttgcttccagtaaaaatgctattgggtcacatgccccgtgggggcccggaaagttcccggg

SEQ ID NO: 407490 - DNA, 1820 bp, Homo sapiens
agacggaccgagggccggaagtgacgccagctggcccgcttgaggcgtagggggtggcgctctccgttcggcggcgctcccatggcgcacattaccattaaccagtacctgcagcaggtgtacgaagccatcgacagcagagatggagcatcttgtgcagagttggtgtcttttaaacatcctcatgttgcaaacccacgacttcaaatggcctctccagaggagaagtgtcaacaagtcttggaacccccttatgatgaaatgtttgcagctcatttaaggtgcacttatgcagtggggaatcatgacttcatagaggcatacaagtgccagaccgtgatagtccaatcattcttgcgagcattccaggcccacaaagaagaaaactgggctctgcctgtcatgtatgcagtagcgcttgaccttcgagtgtttgccaataatgcagatcaacagttggtaaagaaaggaaaaagcaaagttggggacatgttggaaaaagcagcagagttactgatgagctgtttccgggtctgtgccagcgacacccgtgctggtatagaggactctaagaagtggggcatgctgtttctggtgaaccagctgtttaaaatctacttcaagatcaacaaactccatttatgtaaacccctaattagagcaattgacagctcaaacctgaaagacgattacagcactgcacagagagtaacatacaaatactacgttggacgcaaggctatgtttgacagcgattttaagcaagctgaggagtacctgtcatttgcctttgagcattgtcaccgttctagtcagaagaacaaaaggatgattctgatctatttgcttccagtaaaaatgctattgggtcacatgcccactgtggagctcctgcgagggcaacctgctgctgctgcacgaggcgctggcgaagcacgaggccttcttcattcgctgcggaatcttcctcatcctggagaagctgaagatcatcacctacaggaacctctttaagaaagtgtatttgttactgaaaacacaccagctgtctctggatgcttttctggttgccttgaagttcatgcaggtggaggacgtggacattgacgaagttcagtgtattctggctaacttgatatacatgggacacgtcaaaggctacatatcgcatcagcatcagaagctggtggtcagcaagcagaacccatttcctcccctgtccacggtgtgttgaaagtacacggagccccgaggacgggtgagcagttgtttctttccactttggttgtgctgatgagaccggtccggtactgcaacaaggctccctgaagccggaactcttggaggcgcttttcccagggatgctgaggctgagattttcagcacacccgagttaatctccttcatttgtaactaatttcagcctgatgaaaacctggaattcctttttcacagactcggctggttctggagtctttgtgagacttctttgaaggaggctttgcgtgaaggctgctcggctcacttttcctaagtgtggttcctgaaggctgtctttgtaactttttgtagttctttgtgtaaaaagcgtattctgaatttatacacatggcatgttcttcattatatcttccaggatacatctatttttatatattaaatttgaatgtgttatcaaaatgcttggttaacttaaggcacctttttaaaagcagaatttaatttgatttaaattttccagattttatagcttgcctgtatggatgctcctcaatttatgatggggttacatcccaataaacttattttatttgcctttg

SEQ ID NO: 407491 - DNA, 1306 bp, Homo sapiens
agacggaccgagggccggaagtgacgccagctggcccgcttgaggcgtagggggtggcgctctccgttcggcggcgctcccatggcgcacattaccattaaccagtacctgcagcaggtgtacgaagccatcgacagcagagatggagcatcttgtgcagagttggtgtcttttaaacatcctcatgttgcaaacccacgacttcaaatggcctctccagaggagaagtgtcaacaagtcttggaacccccttatgatgaaatgtttgcagctcatttaaggtgcacttatgcagtggggaatcatgacttcatagaggcatacaagtgccagaccgtgatagtccaatcattcttgcgagcattccaggcccacaaagaagaaaactgggctctgcctgtcatgtatgcagtagcgcttgaccttcgagtgtttgccaataatgcagatcaacagttggtaaagaaaggaaaaagcaaagttggggacatgttggaaaaagcagcagagttactgatgagctgtttccgggtctgtgccagcgacacccgtgctggtatagaggactctaagaagtggggcatgctgtttctggtgaaccagctgtttaaaatctacttcaagatcaacaaactccatttatgtaaacccctaattagagcaattgacagctcaaacctgaaagacgattacagcactgcacagagagtaacatacaaatactacgttggacgcaaggctatgtttgacagcgattttaagcaagctgaggagtacctgtcatttgcctttgagcattgtcaccgttctagtcagaagaacaaaaggatgattctgatctatttgcttccagtaaaaatgctattgggtcacatgcccactgtggagctcctgaaaaagtatcacctgatgcagtttgcggaagtaaccagagctgtgagcgagggcaacctgctgctgctgcacgaggcgctggcgaagcacgaggccttcttcattcgctgcggaatcttcctcatcctggagaagctgaaggctgtctttgtaactttttgtagttctttgtgtaaaaagcgtattctgaatttatacacatggcatgttcttcattatatcttccaggatacatctatttttatatattaaatttgaatgtgttatcaaaatgcttggttaacttaaggcacctttttaaaagcagaatttaatttgatttaaattttccagattttatagcttgcctgtatggatgctcctcaatttatgatggggttacatcccaataaacttattttatttgcctttg

SEQ ID NO: 407492 - DNA, 2447 bp, Homo sapiens
agacggaccgagggccggaagtgacgccagctggcccgcttgaggcgtagggggtggcgctctccgttcggcggcgctcccatggcgcacattaccattaaccagtacctgcagcaggtgggtcctagccggggagcgcgcggcggcgtggttggccctcggcgtgttccgtgtgtcccctcctgccttggaccctcaggccttttcctttcccgcctcgccaccctttttccgttcgggtccccggcgggcagccgcgcgagccgaacagcggcggccgggactcgggaaggcggcccgagttctcccctgcagggccgccgtgggggccgggcggtgtccgtggatcgcggagtcgtcgcggtgtaagtagacgcggcggtcccaggtcgctgccctcacttgctggcacgtgtggccgcgctcccagcccaggcggtccgaagggcctgcgggccacgccgagggcccgctgtgggcggtgctgtgtcggatggacgctgtttcccagcaggatgcgggatgaattcggggactccaggaggcgatggaggagtaagcgcgaggctgtggccgtgctgcaggccgggctcgtgcccctcgtcctcgctgtcgtttaacgcccttcactctccgagcacaatgcacacttcatatcgctcggtacatgcgtctgacagatgttgttcaacagcttgtgtacgaagccatcgacagcagagatggagcatcttgtgcagagttggtgtcttttaaacatcctcatgttgcaaacccacgacttcaaatggcctctccagaggagaagtgtcaacaagtcttggaacccccttatgatgaaatgtttgcagctcatttaaggtgcacttatgcagtggggaatcatgacttcatagaggcatacaagtgccagaccgtgatagtccaatcattcttgcgagcattccaggcccacaaagaagaaaactgggctctgcctgtcatgtatgcagtagcgcttgaccttcgagtgtttgccaataatgcagatcaacagttggtaaagaaaggaaaaagcaaagttggggacatgttggaaaaagcagcagagttactgatgagctgtttccgggtctgtgccagcgacacccgtgctggtatagaggactctaagaagtggggcatgctgtttctggtgaaccagctgtttaaaatctacttcaagatcaacaaactccatttatgtaaacccctaattagagcaattgacagctcaaacctgaaagacgattacagcactgcacagagagtaacatacaaatactacgttggacgcaaggctatgtttgacagcgattttaagcaagctgaggagtacctgtcatttgcctttgagcattgtcaccgttctagtcagaagaacaaaaggatgattctgatctatttgcttccagtaaaaatgctattgggtcacatgcccactgtggagctcctgaaaaagtatcacctgatgcagtttgcggaagtaaccagagctgtgagcgagggcaacctgctgctgctgcacgaggcgctggcgaagcacgaggccttcttcattcgctgcggaatcttcctcatcctggagaagctgaagatcatcacctacaggaacctctttaagaaagtgtatttgttactgaaaacacaccagctgtctctggatgcttttctggttgccttgaagttcatgcaggtggaggacgtggacattgacgaagttcagtgtattctggctaacttgatatacatgggacacgtcaaaggctacatatcgcatcagcatcagaagctggtggtcagcaagcagaacccatttcctcccctgtccacggtgtgttgaaagtacacggagccccgaggacgggtgagcagttgtttctttccactttggttgtgctgatgagaccggtccggtactgcaacaaggctccctgaagccggaactcttggaggcgcttttcccagggatgctgaggctgagattttcagcacacccgagttaatctccttcatttgtaactaatttcagcctgatgaaaacctggaattcctttttcacagactcggctggttctggagtctttgtgagacttctttgaaggaggctttgcgtgaaggctgctcggctcacttttcctaagtgtggttcctgaaggctgtctttgtaactttttgtagttctttgtgtaaaaagcgtattctgaatttatacacatggcatgttcttcattatatcttccaggatacatctatttttatatattaaatttgaatgtgttatcaaaatgcttggttaacttaaggcacctttttaaaagcagaatttaatttgatttaaattttccagattttatagcttgcctgtatggatgctcctcaatttatgatggggttacatcccaataaacttattttatttgcctttg

SEQ ID NO: 407493 - DNA, 1907 bp, Homo sapiens
gagagtagtgaccatctgttacattttgattgttctgtcttctttcaaagtaggggaaaatgaattttcccctgtgtggcattcagtgtattgttgtaggttctattcgaacagaatattttattttctacttaggtttccctttcaaatgtttcaggtgtacgaagccatcgacagcagagatggagcatcttgtgcagagttggtgtcttttaaacatcctcatgttgcaaacccacgacttcaaatggcctctccagaggagaagtgtcaacaagtcttggaacccccttatgatgaaatgtttgcagctcatttaaggtgcacttatgcagtggggaatcatgacttcatagaggcatacaagtgccagaccgtgatagtccaatcattcttgcgagcattccaggcccacaaagaagaaaactgggctctgcctgtcatgtatgcagtagcgcttgaccttcgagtgtttgccaataatgcagatcaacagttggtaaagaaaggaaaaagcaaagttggggacatgttggaaaaagcagcagagttactgatgagctgtttccgggtctgtgccagcgacacccgtgctggtatagaggactctaagaagtggggcatgctgtttctggtgaaccagctgtttaaaatctacttcaagatcaacaaactccatttatgtaaacccctaattagagcaattgacagctcaaacctgaaagacgattacagcactgcacagagagtaacatacaaatactacgttggacgcaaggctatgtttgacagcgattttaagcaagctgaggagtacctgtcatttgcctttgagcattgtcaccgttctagtcagaagaacaaaaggatgattctgatctatttgcttccagtaaaaatgctattgggtcacatgcccactgtggagctcctgaaaaagtatcacctgatgcagtttgcggaagtaaccagagctgtgagcgagggcaacctgctgctgctgcacgaggcgctggcgaagcacgaggccttcttcattcgctgcggaatcttcctcatcctggagaagctgaagatcatcacctacaggaacctctttaagaaagtgtatttgttactgaaaacacaccagctgtctctggatgcttttctggttgccttgaagttcatgcaggtggaggacgtggacattgacgaagttcagtgtattctggctaacttgatatacatgggacacgtcaaaggctacatatcgcatcagcatcagaagctggtggtcagcaagcagaacccatttcctcccctgtccacggtgtgttgaaagtacacggagccccgaggacgggtgagcagttgtttctttccactttggttgtgctgatgagaccggtccggtactgcaacaaggctccctgaagccggaactcttggaggcgcttttcccagggatgctgaggctgagattttcagcacacccgagttaatctccttcatttgtaactaatttcagcctgatgaaaacctggaattcctttttcacagactcggctggttctggagtctttgtgagacttctttgaaggaggctttgcgtgaaggctgctcggctcacttttcctaagtgtggttcctgaaggctgtctttgtaactttttgtagttctttgtgtaaaaagcgtattctgaatttatacacatggcatgttcttcattatatcttccaggatacatctatttttatatattaaatttgaatgtgttatcaaaatgcttggttaacttaaggcacctttttaaaagcagaatttaatttgatttaaattttccagattttatagcttgcctgtatggatgctcctcaatttatgatggggttacatcccaataaacttattttatttgcctttg

SEQ ID NO: 407494 - DNA, 1791 bp, Homo sapiens
agacggaccgagggccggaagtgacgccagctggcccgcttgaggcgtagggggtggcgctctccgttcggcggcgctcccatggcgcacattaccattaaccagtacctgcagcaggtgtacgaagccatcgacagcagagatggagcatcttgtgcagagttggtgtcttttaaacatcctcatgttgcaaacccacgacttcaaatggcctctccagaggagaagtgtcaacaagtcttggaacccccttatgatgaaatgtttgcagctcatttaaggtgcacttatgcagtggggaatcatgacttcatagaggcatacaagtgccagaccgtgatagtccacttcgagtgtttgccaataatgcagatcaacagttggtaaagaaaggaaaaagcaaagttggggacatgttggaaaaagcagcagagttactgatgagctgtttccgggtctgtgccagcgacacccgtgctggtatagaggactctaagaagtggggcatgctgtttctggtgaaccagctgtttaaaatctacttcaagatcaacaaactccatttatgtaaacccctaattagagcaattgacagctcaaacctgaaagacgattacagcactgcacagagagtaacatacaaatactacgttggacgcaaggctatgtttgacagcgattttaagcaagctgaggagtacctgtcatttgcctttgagcattgtcaccgttctagtcagaagaacaaaaggatgattctgatctatttgcttccagtaaaaatgctattgggtcacatgcccactgtggagctcctgaaaaagtatcacctgatgcagtttgcggaagtaaccagagctgtgagcgagggcaacctgctgctgctgcacgaggcgctggcgaagcacgaggccttcttcattcgctgcggaatcttcctcatcctggagaagctgaagatcatcacctacaggaacctctttaagaaagtgtatttgttactgaaaacacaccagctgtctctggatgcttttctggttgccttgaagttcatgcaggtggaggacgtggacattgacgaagttcagtgtattctggctaacttgatatacatgggacacgtcaaaggctacatatcgcatcagcatcagaagctggtggtcagcaagcagaacccatttcctcccctgtccacggtgtgttgaaagtacacggagccccgaggacgggtgagcagttgtttctttccactttggttgtgctgatgagaccggtccggtactgcaacaaggctccctgaagccggaactcttggaggcgcttttcccagggatgctgaggctgagattttcagcacacccgagttaatctccttcatttgtaactaatttcagcctgatgaaaacctggaattcctttttcacagactcggctggttctggagtctttgtgagacttctttgaaggaggctttgcgtgaaggctgctcggctcacttttcctaagtgtggttcctgaaggctgtctttgtaactttttgtagttctttgtgtaaaaagcgtattctgaatttatacacatggcatgttcttcattatatcttccaggatacatctatttttatatattaaatttgaatgtgttatcaaaatgcttggttaacttaaggcacctttttaaaagcagaatttaatttgatttaaattttccagattttatagcttgcctgtatggatgctcctcaatttatgatggggttacatcccaataaacttattttatttgcctttg

SEQ ID NO: 407495 - DNA, 2728 bp, Homo sapiens
ttttgtccttttacggcgtcttcccgtcattgtcatggtgattgtcagccgctgtggcactggtgggagtgtcacggagcatgcaaatgaggttgtaatgaagttggaggccctgcaaaggccaggtggacttccacttagcatcctgctggtcttagctggtttaaccaagaggggagcctctgacctcaggcatcctattgctgaagataggcagagtttgagttgtgcaactgttcagccaagcctacaagatgtatagtgctgtgggggtaacatggcctccctacccagcctcgcttcagaactttcgtaccaaggctggactgtagaaaagtccttcctatgccatggcactttcccactgaggcctcccatgggtgccgtttcctttgctggaaggttctcctcgactcctggcagtctatactcatttaaaggtttccgccttctctaaagcctctcactgctggacttcacggtggatcagatttcccttttataaacattcatagcagactgtacatttctttcactgcgtttaccaaacgatttgatggcgaagtgcgtcagggcgtgggccttctccatcactagcgttccttgcaccccaggagctcaatccgtgtttcctaaatgaatacttgacatttcgcttgatcgtatatttttgcacagcagtgatcttcacgacctttgattaggcagtggcttctcagatacgacaacaaaagcataagcaaccaaaggaaaaaattaattggacttcatcaaaattaaaaactttagacttcaaaggacattctcaaaaaagtaaaaaacaaccataacctagcaaataatacatctgataagggcctaatatccagaatatataaagaattattacaattcaacagtaaaaagacaatccaattcaaattctttaaaatgtttaaagaatttgaaaaatcttccaaacaaaatacgcaagtgaccagtaagtgcatgaaaagatgctcaaggtcattaatcaccagtgacttagtcaccaatgactaatgcatcagtcacttgaaatgcacatcagaacctctgagagctgccaggccacacccagtgggatgactgtaatcagaaagacgggcggcgccagtgaggatgcagggagactggagcctcgtacacatcgccaggggaacaaaaacagtgcagctgctgtgcggaaatgggaaggcagttcctgaaagtgggacgtagagctaccatgtgacccagcatttccaccctgaggggacactcagaagacagggcagatccccagtgacatctctttcccgttggggtttgcttttgtcacagtctccaatagaggtcatcattcctggtgccagaccagctacgatattaccatgcgtgtagcgttttacccgtgctggtatagaggactctaagaagtggggcatgctgtttctggtgaaccagctgtttaaaatctacttcaagatcaacaaactccatttatgtaaacccctaattagagcaattgacagctcaaacctgaaagacgattacagcactgcacagagagtaacatacaaatactacgttggacgcaaggctatgtttgacagcgattttaagcaagctgaggagtacctgtcatttgcctttgagcattgtcaccgttctagtcagaagaacaaaaggatgattctgatctatttgcttccagtaaaaatgctattgggtcacatgcccactgtggagctcctgaaaaagtatcacctgatgcagtttgcggaagtaaccagagctgtgagcgagggcaacctgctgctgctgcacgaggcgctggcgaagcacgaggccttcttcattcgctgcggaatcttcctcatcctggagaagctgaagatcatcacctacaggaacctctttaagaaagtgtatttgttactgaaaacacaccagctgtctctggatgcttttctggttgccttgaagttcatgcaggtggaggacgtggacattgacgaagttcagtgtattctggctaacttgatatacatgggacacgtcaaaggctacatatcgcatcagcatcagaagctggtggtcagcaagcagaacccatttcctcccctgtccacggtgtgttgaaagtacacggagccccgaggacgggtgagcagttgtttctttccactttggttgtgctgatgagaccggtccggtactgcaacaaggctccctgaagccggaactcttggaggcgcttttcccagggatgctgaggctgagattttcagcacacccgagttaatctccttcatttgtaactaatttcagcctgatgaaaacctggaattcctttttcacagactcggctggttctggagtctttgtgagacttctttgaaggaggctttgcgtgaaggctgctcggctcacttttcctaagtgtggttcctgaaggctgtctttgtaactttttgtagttctttgtgtaaaaagcgtattctgaatttatacacatggcatgttcttcattatatcttccaggatacatctatttttatatattaaatttgaatgtgttatcaaaatgcttggttaacttaaggcacctttttaaaagcagaatttaatttgatttaaattttccagattttatagcttgcctgtatggatgctcctcaatttatgatggggttacatcccaataaacttattttatttgcctttg

SEQ ID NO: 407496 - DNA, 1312 bp, Homo sapiens
tttcagtgcaggcggtttcactccagagcgttttgtcttctgtggtcataattaactatggaaaagcagatcaacaaactccatttatgtaaacccctaattagagcaattgacagctcaaacctgaaagacgattacagcactgcacagagagtaacatacaaatactacgttggacgcaaggctatgtttgacagcgattttaagcaagctgaggagtacctgtcatttgcctttgagcattgtcaccgttctagtcagaagaacaaaaggatgattctgatctatttgcttccagtaaaaatgctattgggtcacatgcccactgtggagctcctgaaaaagtatcacctgatgcagtttgcggaagtaaccagagctgtgagcgagggcaacctgctgctgctgcacgaggcgctggcgaagcacgaggccttcttcattcgctgcggaatcttcctcatcctggagaagctgaagatcatcacctacaggaacctctttaagaaagtgtatttgttactgaaaacacaccagctgtctctggatgcttttctggttgccttgaagttcatgcaggtggaggacgtggacattgacgaagttcagtgtattctggctaacttgatatacatgggacacgtcaaaggctacatatcgcatcagcatcagaagctggtggtcagcaagcagaacccatttcctcccctgtccacggtgtgttgaaagtacacggagccccgaggacgggtgagcagttgtttctttccactttggttgtgctgatgagaccggtccggtactgcaacaaggctccctgaagccggaactcttggaggcgcttttcccagggatgctgaggctgagattttcagcacacccgagttaatctccttcatttgtaactaatttcagcctgatgaaaacctggaattcctttttcacagactcggctggttctggagtctttgtgagacttctttgaaggaggctttgcgtgaaggctgctcggctcacttttcctaagtgtggttcctgaaggctgtctttgtaactttttgtagttctttgtgtaaaaagcgtattctgaatttatacacatggcatgttcttcattatatcttccaggatacatctatttttatatattaaatttgaatgtgttatcaaaatgcttggttaacttaaggcacctttttaaaagcagaatttaatttgatttaaattttccagattttatagcttgcctgtatggatgctcctcaatttatgatggggttacatcccaataaacttattttatttgcctttg

SEQ ID NO: 407497 - DNA, 1094 bp, Homo sapiens
gaacggtgacaatgctcaaaggcaaatgacaggtactcctcagaagaacaaaaggatgattctgatctatttgcttccagtaaaaatgctattgggtcacatgcccactgtggagctcctgaaaaagtatcacctgatgcagtttgcggaagtaaccagagctgtgagcgagggcaacctgctgctgctgcacgaggcgctggcgaagcacgaggccttcttcattcgctgcggaatcttcctcatcctggagaagctgaagatcatcacctacaggaacctctttaagaaagtgtatttgttactgaaaacacaccagctgtctctggatgcttttctggttgccttgaagttcatgcaggtggaggacgtggacattgacgaagttcagtgtattctggctaacttgatatacatgggacacgtcaaaggctacatatcgcatcagcatcagaagctggtggtcagcaagcagaacccatttcctcccctgtccacggtgtgttgaaagtacacggagccccgaggacgggtgagcagttgtttctttccactttggttgtgctgatgagaccggtccggtactgcaacaaggctccctgaagccggaactcttggaggcgcttttcccagggatgctgaggctgagattttcagcacacccgagttaatctccttcatttgtaactaatttcagcctgatgaaaacctggaattcctttttcacagactcggctggttctggagtctttgtgagacttctttgaaggaggctttgcgtgaaggctgctcggctcacttttcctaagtgtggttcctgaaggctgtctttgtaactttttgtagttctttgtgtaaaaagcgtattctgaatttatacacatggcatgttcttcattatatcttccaggatacatctatttttatatattaaatttgaatgtgttatcaaaatgcttggttaacttaaggcacctttttaaaagcagaatttaatttgatttaaattttccagattttatagcttgcctgtatggatgctcctcaatttatgatggggttacatcccaataaacttattttatttgcctttg

SEQ ID NO: 407498 - DNA, 2633 bp, Homo sapiens
ttttgtccttttacggcgtcttcccgtcattgtcatggtgattgtcagccgctgtggcactggtgggagtgtcacggagcatgcaaatgaggttgtaatgaagttggaggccctgcaaaggccaggtggacttccacttagcatcctgctggtcttagctggtttaaccaagaggggagcctctgacctcaggcatcctattgctgaagataggcagagtttgagttgtgcaactgttcagccaagcctacaagatgtatagtgctgtgggggtaacatggcctccctacccagcctcgcttcagaactttcgtaccaaggctggactgtagaaaagtccttcctatgccatggcactttcccactgaggcctcccatgggtgccgtttcctttgctggaaggttctcctcgactcctggcagtctatactcatttaaaggtttccgccttctctaaagcctctcactgctggacttcacggtggatcagatttcccttttataaacattcatagcagactgtacatttctttcactgcgtttaccaaacgatttgatggcgaagtgcgtcagggcgtgggccttctccatcactagcgttccttgcaccccaggagctcaatccgtgtttcctaaatgaatacttgacatttcgcttgatcgtatatttttgcacagcagtgatcttcacgacctttgattaggcagtggcttctcagatacgacaacaaaagcataagcaaccaaaggaaaaaattaattggacttcatcaaaattaaaaactttagacttcaaaggacattctcaaaaaagtaaaaaacaaccataacctagcaaataatacatctgataagggcctaatatccagaatatataaagaattattacaattcaacagtaaaaagacaatccaattcaaattctttaaaatgtttaaagaatttgaaaaatcttccaaacaaaatacgcaagtgaccagtaagtgcatgaaaagatgctcaaggtcattaatcaccagtgacttagtcaccaatgactaatgcatcagtcacttgaaatgcacatcagaacctctgagagctgccaggccacacccagtgggatgactgtaatcagaaagacgggcggcgccagtgaggatgcagggagactggagcctcgtacacatcgccaggggaacaaaaacagtgcagctgctgtgcggaaatgggaaggcagttcctgaaagtgggacgtagagctaccatgtgacccagcatttccaccctgaggggacactcagaagacagggcagatccccagtgacatctctttcccgttggggtttgcttttgtcacagtctccaatagaggtcatcattcctggtgccagaccagctacgatattaccatgcgtgtagcgttttacccgtgctggtatagaggactctaagaagtggggcatgctgtttctggtgaaccagctgtttaaaatctacttcaagatcaacaaactccatttatgtaaacccctaattagagcaattgacagctcaaacctgaaagacgattacagcactgcacagagagtaacatacaaatactacgttggacgcaaggctatgtttgacagcgattttaagcaagctgaggagtacctgtcatttgcctttgagcattgtcaccgttctagtcagaagaacaaaaggatgattctgatctatttgcgagggcaacctgctgctgctgcacgaggcgctggcgaagcacgaggccttcttcattcgctgcggaatcttcctcatcctggagaagctgaagatcatcacctacaggaacctctttaagaaagtgtatttgttactgaaaacacaccagctgtctctggatgcttttctggttgccttgaagttcatgcaggtggaggacgtggacattgacgaagttcagtgtattctggctaacttgatatacatgggacacgtcaaaggctacatatcgcatcagcatcagaagctggtggtcagcaagcagaacccatttcctcccctgtccacggtgtgttgaaagtacacggagccccgaggacgggtgagcagttgtttctttccactttggttgtgctgatgagaccggtccggtactgcaacaaggctccctgaagccggaactcttggaggcgcttttcccagggatgctgaggctgagattttcagcacacccgagttaatctccttcatttgtaactaatttcagcctgatgaaaacctggaattcctttttcacagactcggctggttctggagtctttgtgagacttctttgaaggaggctttgcgtgaaggctgctcggctcacttttcctaagtgtggttcctgaaggctgtctttgtaactttttgtagttctttgtgtaaaaagcgtattctgaatttatacacatggcatgttcttcattatatcttccaggatacatctatttttatatattaaatttgaatgtgttatcaaaatgcttggttaacttaaggcacctttttaaaagcagaatttaatttgatttaaattttccagattttatagcttgcctgtatggatgctcctcaatttatgatggggttacatcccaataaacttattttatttgcctttg

SEQ ID NO: 407499 - DNA, 732 bp, Homo sapiens
tctccgtttccgccaccttcgccacaatcttttcaatataaatactgctattcatgggacacgtcaaaggctacatatcgcatcagcatcagaagctggtggtcagcaagcagaacccatttcctcccctgtccacggtgtgttgaaagtacacggagccccgaggacgggtgagcagttgtttctttccactttggttgtgctgatgagaccggtccggtactgcaacaaggctccctgaagccggaactcttggaggcgcttttcccagggatgctgaggctgagattttcagcacacccgagttaatctccttcatttgtaactaatttcagcctgatgaaaacctggaattcctttttcacagactcggctggttctggagtctttgtgagacttctttgaaggaggctttgcgtgaaggctgctcggctcacttttcctaagtgtggttcctgaaggctgtctttgtaactttttgtagttctttgtgtaaaaagcgtattctgaatttatacacatggcatgttcttcattatatcttccaggatacatctatttttatatattaaatttgaatgtgttatcaaaatgcttggttaacttaaggcacctttttaaaagcagaatttaatttgatttaaattttccagattttatagcttgcctgtatggatgctcctcaatttatgatggggttacatcccaataaacttattttatttgcctttg

SEQ ID NO: 407500 - DNA, 3220 bp, Homo sapiens
  misc_feature (2100)..(2100): n is a, c, g, or t
ttttgtccttttacggcgtcttcccgtcattgtcatggtgattgtcagccgctgtggcactggtgggagtgtcacggagcatgcaaatgaggttgtaatgaagttggaggccctgcaaaggccaggtggacttccacttagcatcctgctggtcttagctggtttaaccaagaggggagcctctgacctcaggcatcctattgctgaagataggcagagtttgagttgtgcaactgttcagccaagcctacaagatgtatagtgctgtgggggtaacatggcctccctacccagcctcgcttcagaactttcgtaccaaggctggactgtagaaaagtccttcctatgccatggcactttcccactgaggcctcccatgggtgccgtttcctttgctggaaggttctcctcgactcctggcagtctatactcatttaaaggtttccgccttctctaaagcctctcactgctggacttcacggtggatcagatttcccttttataaacattcatagcagactgtacatttctttcactgcgtttaccaaacgatttgatggcgaagtgcgtcagggcgtgggccttctccatcactagcgttccttgcaccccaggagctcaatccgtgtttcctaaatgaatacttgacatttcgcttgatcgtatatttttgcacagcagtgatcttcacgacctttgattaggcagtggcttctcagatacgacaacaaaagcataagcaaccaaaggaaaaaattaattggacttcatcaaaattaaaaactttagacttcaaaggacattctcaaaaaagtaaaaaacaaccataacctagcaaataatacatctgataagggcctaatatccagaatatataaagaattattacaattcaacagtaaaaagacaatccaattcaaattctttaaaatgtttaaagaatttgaaaaatcttccaaacaaaatacgcaagtgaccagtaagtgcatgaaaagatgctcaaggtcattaatcaccagtgacttagtcaccaatgactaatgcatcagtcacttgaaatgcacatcagaacctctgagagctgccaggccacacccagtgggatgactgtaatcagaaagacgggcggcgccagtgaggatgcagggagactggagcctcgtacacatcgccaggggaacaaaaacagtgcagctgctgtgcggaaatgggaaggcagttcctgaaagtgggacgtagagctaccatgtgacccagcatttccaccctgaggggacactcagaagacagggcagatccccagtgacatctctttcccgttggggtttgcttttgtcacagtctccaatagaggtcatcattcctggtgccagaccagctacgatattaccatgcgtgtagcgttttacgtgagttacggagtacttgtgtgttttgtttggtttttccatagctctttgaagtcatagaacagtattattatttgtctccgttttcagatgaggaaaacgagaccttgagagacttttgtttgaggtcatgcacgtagggaatgataaaagtcatagacctgcttagagcagctcacaggcagttataaaacagggtttgatattttaaaattgtatttttacattattttaagtgtttctatatggacacattttggtctttaagagtaattttatgttctgtggcttgtaaaccacctgcttgttttctgtactgggcacttttgtatttttgtgccttgactttgagtgattttatcattttgttaacaccacagagtgtacttcgtaaaccgagatggcgtggcctgctacacacccccgctgtgtggcgcagcctgtgggtcctaggctgcgaggagcaagagctgcactaaatgctgtaggcagctggaacacagtgggaattatttgtgtgtctaaacagatctaaacacagaaaagatgcagtaaaaatacagtgtgagactccgtagggccccatctcacatgtggtcaagtgtgagactccgtagggccccatctcacatgtggtcaagtgtgagactccgtagggccccatctcacatgtggtcaagtgtgagactcngtagggccccatctcacatgtggtcaagtgtgagactctgtagggccccatctcacatgtggtcatctgtagttgaccgaaatgttgtgtaacatgtgactgtttccaggttaattgcagacagtggcacaccctcccctaggttcttcagtttctgttttttcagtcttttgaggtaaaatttgcatgcagtgaactacctacagtattatctgtctgcttgctgctgaggtataggacatgattgccaccccagaaacttccctcatccctcatgtggggcaggccctttcagctgtctggatttgttccactgtgggttgcttcctgcctgttcggtgacttcatgtaaatggaccaccacagtgtgtactttttgtgtctgccttggtgggactcatcctctttgtgtgttttactggtttgttttgtcgtactgatgagaagtatttttccatttttcttttctttttgttttttgagacggagtcacgctgtgtcacccaggctgaagtgcattggcccgggtttgagtgattctcctgcctcagcctcctgagtggctgggattacaggcacacaccaccatgccctatttttccatttttcaaaaacggtttataacaattaacttttacgcattgttgctgcaaatgaggcagtttttagctggtgccgcggaggaaggatgttactcaagtagttaattgggattttcctggtttgttttctcttttatttttacccatcaggtaagacatcttttttcataatgttattttgtttgatgaatatgacttgatatgaataagttgatatgaatatgacttgagctttgggacttacctcaagatattaatttgtttaggcagtttattttgtgatttataaataaaatttttatttcctatgtaacttaaaaaaaattatttccccatagccgtgctggtatagaggactctaagaagtggggcatgctgtttctggtgaaccagctgtttaaaatctacttcaagaggtgtgcttctgtttgaatcctttctgtctttacaattttcgattgtcctggacttcccacacacactgcatgccgcaccgtatgcccccccgtatggggaat

SEQ ID NO: 407501 - DNA, 1702 bp, Homo sapiens
agacggaccgagggccggaagtgacgccagctggcccgcttgaggcgtagggggtggcgctctccgttcggcggcgctcccatggcgcacattaccattaaccagtacctgcagcaggtgtacgaagccatcgacagcagagatggagcatcttgtgcagagttggtgtcttttaaacatcctcatgttgcaaacccacgacttcaaatggcctctccagaggagaagtgtcaacaagtcttggaacccccttatgatgaaatgtttgcagctcatttaaggtgcacttatgcagtggggaatcatgacttcatagaggcatacaagtgccagaccgtgatagtccaatcattcttgcgagcattccaggcccacaaagaagaaaactgggctctgcctgtcatgtatgcagtagcgcttgaccttcgagtgtttgccaataatgcagatcaacagttggtaaagaaaggaaaaagcaaagttggggacatgttggaaaaagcagcagagttactgatgagctgtttccgggtctgtgccagcgacacccgtgctggtatagaggactctaagaagtggggcatgctgtttctggtgaaccagctgtttaaaatctacttcaagatcaacaaactccatttatgtaaacccctaattagagcaattgacagctcaaacctgaaagacgattacagcactgcacagagagtaacatacaaatactacgttggacgcaaggctatgtttgacagcgattttaagcaagctgaggagtacctgtcatttgcctttgagcattgtcaccgttctagtcagaagaacaaaaggatgattctgatctatttgcttccagtaaaaatgctattgggtcacatgcccactgtggagctcctgaaaaagtatcacctgatgcagtttgcggaagtaaccagagctgtgagcgagggcaacctgctgctgctgcacgaggcgctggcgaagcacgaggccttcttcattcgctgcggaatcttcctcatcctggagaagctgaagatcatcacctacaggaacctctttaagaaagtgtatttgttactgaaaacacaccagctgtctctggatgcttttctggttgccttgaagttcatgcaggtggaggacgtggacattgacgaagttcagtgtattctggctaacttgatatacatgggacacgtcaaaggctacatatcgcatcagcatcagaagctggtggtcagcaagcagaacccatttcctcccctgtccacggtgtgttgaaagtacacggagccccgaggacggcctgatgaaaacctggaattcctttttcacagactcggctggttctggagtctttgtgagacttctttgaaggaggctttgcgtgaaggctgctcggctcacttttcctaagtgtggttcctgaaggctgtctttgtaactttttgtagttctttgtgtaaaaagcgtattctgaatttatacacatggcatgttcttcattatatcttccaggatacatctatttttatatattaaatttgaatgtgttatcaaaatgcttggttaacttaaggcacctttttaaaagcagaatttaatttgatttaaattttccagattttatagcttgcctgtatggatgctcctcaatttatgatggggttacatcccaataaacttattttatttgcctttg

SEQ ID NO: 407502 - DNA, 1827 bp, Homo sapiens
agacggaccgagggccggaagtgacgccagctggcccgcttgaggcgtagggggtggcgctctccgttcggcggcgctcccatggcgcacattaccattaaccagtacctgcagcaggtgtacgaagccatcgacagcagagatggagcatcttgtgcagagttggtgtcttttaaacatcctcatgttgcaaacccacgacttcaaatggcctctccagaggagaagtgtcaacaagtcttggaacccccttatgatgaaatgtttgcagctcatttaaggtgcacttatgcagtggggaatcatgacttcatagaggcatacaagtgccagaccgtgatagtccaatcctttgtcgttcatggcagctgtcccgcatagaacacatgcagtggattacttgggacttgagacccggaaacactgggccagttgctcatttctgcagttagaaaggaatgacagtgttttggaacagaagctcgtttcagctctttcacttggatcattcttgcgagcattccaggcccacaaagaagaaaactgggctctgcctgtcatgtatgcagtagcgcttgaccttcgagtgtttgccaataatgcagatcaacagttggtaaagaaaggaaaaagcaaagttggggacatgttggaaaaagcagcagagttactgatgagctgtttccgggtctgtgccagcgacacccgtgctggtatagaggactctaagaagtggggcatgctgtttctggtgaaccagctgtttaaaatctacttcaagatcaacaaactccatttatgtaaacccctaattagagcaattgacagctcaaacctgaaagacgattacagcactgcacagagagtaacatacaaatactacgttggacgcaaggctatgtttgacagcgattttaagcaagctgaggagtacctgtcatttgcctttgagcattgtcaccgttctagtcagaagaacaaaaggatgattctgatctatttgcttccagtaaaaatgctattgggtcacatgcccactgtggagctcctgaaaaagtatcacctgatgcagtttgcggaagtaaccagagctgtgagcgagggcaacctgctgctgctgcacgaggcgctggcgaagcacgaggccttcttcattcgctgcggaatcttcctcatcctggagaagctgaagatcatcacctacaggaacctctttaagaaagtgtatttgttactgaaaacacaccagctgtctctggatgcttttctggttgccttgaagttcatgcaggtggaggacgtggacattgacgaagttcagtgtattctggctaacttgatatacatgggacacgtcaaaggctacatatcgcatcagcatcagaagctggtggtcagcaagcagaacccatttcctcccctgtccacggtgtgttgaaagtacacggagccccgaggacggactcggctggttctggagtctttgtgagacttctttgaaggaggctttgcgtgaaggctgctcggctcacttttcctaagtgtggttcctgaaggctgtctttgtaactttttgtagttctttgtgtaaaaagcgtattctgaatttatacacatggcatgttcttcattatatcttccaggatacatctatttttatatattaaatttgaatgtgttatcaaaatgcttggttaacttaaggcacctttttaaaagcagaatttaatttgatttaaattttccagattttatagcttgcctgtatggatgctcctcaatttatgatggggttacatcccaataaacttattttatttgcctttg

SEQ ID NO: 407503 - DNA, 1867 bp, Homo sapiens
agacggaccgagggccggaagtgacgccagctggcccgcttgaggcgtagggggtggcgctctccgttcggcggcgctcccatggcgcacattaccattaaccagtacctgcagcaggtgtacgaagccatcgacagcagagatggagcatcttgtgcagagttggtgtcttttaaacatcctcatgttgcaaacccacgacttcaaatggcctctccagaggagaagtgtcaacaagtcttggaacccccttatgatgaaatgtttgcagctcatttaaggtgcacttatgcagtggggaatcatgacttcatagaggcatacaagtgccagaccgtgatagtccaatcattcttgcgagcattccaggcccacaaagaagaaaactgggctctgcctgtcatgtatgcagtagcgcttgaccttcgagtgtttgccaataatgcagatcaacagttggtaaagaaaggaaaaagcaaagttggggacatgttggaaaaagcagcagagttactgatgagctgtttccgggtctgtgccagcgacacccgtgctggtatagaggactctaagaagtggggcatgctgtttctggtgaaccagctgtttaaaatctacttcaagatcaacaaactccatttatgtaaacccctaattagagcaattgacagctcaaacctgaaagacgattacagcactgcacagagagtaacatacaaatactacgttggacgcaaggctatgtttgacagcgattttaagcaagctgaggagtacctgtcatttgcctttgagcattgtcaccgttctagtcagaagaacaaaaggatgattctgatctatttgcttccagtaaaaatgctattgggtcacatgcccactgtggagctcctgaaaaagtatcacctgatgcagtttgcggaagtaaccagagctgtgagcgagggcaacctgctgctgctgcacgaggcgctggcgaagcacgaggccttcttcattcgctgcggaatcttcctcatcctggagaagctgaagatcatcacctacaggaacctctttaagaaagtgtatttgttactgaaaacacaccagctgtctctggatgcttttctggttgccttgaagttcatgcaggtggaggacgtggacattgacgaagttcagtgtattctggctaacttgatatacatgggacacgtcaaaggctacatatcgcatcagcatcagaagctggtggtcagcaagcagaacccatttcctcccctgtccacggtgtgttgaaagtacacggagccccgaggacgggtgagcagttgtttctttccactttggttgtgctgatgagaccggtccggtactgcaacaaggctccctgaagccggaactcttggaggcgcttttcccagggatgctgaggctgagattttcagcacacccgagttaatctccttcatttgtaactaatttcagcctgatgaaaacctggaattcctttttcacagactcggctggttctggagtctttgtgagacttctttgaaggaggctttgcgtgaaggctgctcggctcacttttcctaagtgtggttcctgaaggctgtctttgtaactttttgtagttctttgtgtaaaaagcgtattctgaatttatacacatggcatgttcttcattatatcttccaggatacatctatttttatatattaaatttgaatgtgttatcaaaatgcttggttaacttaaggcacctttttaaaagcagaatttaatttgatttaaattttccagattttatagcttgcctgtatggatgctcctcaatttatgatggggttacatcccaataaacttattttatttgcctttg

SEQ ID NO: 407504 - DNA, 1421 bp, Homo sapiens
agacggaccgagggccggaagtgacgccagctggcccgcttgaggcgtagggggtggcgctctccgttcggcggcgctcccatggcgcacattaccattaaccagtacctgcagcaggtgtacgaagccatcgacagcagagatggagcatcttgtgcagagttggtgtcttttaaacatcctcatgttgcaaacccacgacttcaaatggcctctccagaggagaagtgtcaacaagtcttggaacccccttatgatgaaatgtttgcagctcatttaaggtgcacttatgcagtggggaatcatgacttcatagaggcatacaagtgccagaccgtgatagtccaatcattcttgcgagcattccaggcccacaaagaagaaaactgggctctgcctgtcatgtatgcagtagcgcttgaccttcgagtgtttgccaataatgcagatcaacagttggtaaagaaaggaaaaagcaaagttggggacatgttggaaaaagcagcagagttactgatgagctgtttccgggtctgtgccagcgacacccgtgctggtatagaggactctaagaagtggggcatgctgtttctggtgaaccagctgtttaaaatctacttcaagatcaacaaactccatttatgtaaacccctaattagagcaattgacagctcaaacctgaaagacgattacagcactgcacagagagtaacatacaaatactacgttggacgcaaggctatgtttgacagcgattttaagcaagctgaggagtacctgtcatttgcctttgagcattgtcaccgttctagtcagaagaacaaaaggatgattctgatctatttgcttccagtaaaaatgctattgggtcacatgcccactgtggagctcctgaaaaagtatcacctgatgcagtttgcggaagtaaccagagctgtgaggtagagtatgccatccttcctgtttggggttttaaaaatgcaagcctgatgagagttgacgtgcacgctctgtgagaaactcaccctccttctgacgcgcctcccccctcaccagcgagggcaacctgctgctgctgcacgaggcgctggcgaagcacgaggccttcttcattcgctgcggaatcttcctcatcctggagaagctgaaggctgtctttgtaactttttgtagttctttgtgtaaaaagcgtattctgaatttatacacatggcatgttcttcattatatcttccaggatacatctatttttatatattaaatttgaatgtgttatcaaaatgcttggttaacttaaggcacctttttaaaagcagaatttaatttgatttaaattttccagattttatagcttgcctgtatggatgctcctcaatttatgatggggttacatcccaataaacttattttatttgcctttg

SEQ ID NO: 407505 - DNA, 2270 bp, Homo sapiens
tgtttgaatatcttaaaggcaaccattaatcacaaaacacaacagagaaaagaccctcttattactgtggcaagtgacacagtcatgagttttacatataacgagaaaataatttgccgtatacttgcaaaatatgagtcacgtggctcctagaaacacacctccttctcttccgtaatgggataactttaaatatggttctaagcagcttaagcctgaaaacaaaaattccaccacggcaataaacaaaaccacttgttgcctctggggctcccggccctgcagtggaggcaaacgccctgcctttccgctccccggcgagagcctgcgaggcacccggagcggccgcccggccgcgtctgcgtcacgcggggcaggagcggcgtccccagccccggccgccgcctcacctggtagagctcctcgaggttgtacctgatggaggtgctgctctgcacggcccgcaccgcctcgtgcagcttccgccacgtgtcctgcgtgtagttgtcgggcagccgaggtgtacgaagccatcgacagcagagatggagcatcttgtgcagagttggtgtcttttaaacatcctcatgttgcaaacccacgacttcaaatggcctctccagaggagaagtgtcaacaagtcttggaacccccttatgatgaaatgtttgcagctcatttaaggtgcacttatgcagtggggaatcatgacttcatagaggcatacaagtgccagaccgtgatagtccaatcattcttgcgagcattccaggcccacaaagaagaaaactgggctctgcctgtcatgtatgcagtagcgcttgaccttcgagtgtttgccaataatgcagatcaacagttggtaaagaaaggaaaaagcaaagttggggacatgttggaaaaagcagcagagttactgatgagctgtttccgggtctgtgccagcgacacccgtgctggtatagaggactctaagaagtggggcatgctgtttctggtgaaccagctgtttaaaatctacttcaagatcaacaaactccatttatgtaaacccctaattagagcaattgacagctcaaacctgaaagacgattacagcactgcacagagagtaacatacaaatactacgttggacgcaaggctatgtttgacagcgattttaagcaagctgaggagtacctgtcatttgcctttgagcattgtcaccgttctagtcagaagaacaaaaggatgattctgatctatttgcttccagtaaaaatgctattgggtcacatgcccactgtggagctcctgaaaaagtatcacctgatgcagtttgcggaagtaaccagagctgtgagcgagggcaacctgctgctgctgcacgaggcgctggcgaagcacgaggccttcttcattcgctgcggaatcttcctcatcctggagaagctgaagatcatcacctacaggaacctctttaagaaagtgtatttgttactgaaaacacaccagctgtctctggatgcttttctggttgccttgaagttcatgcaggtggaggacgtggacattgacgaagttcagtgtattctggctaacttgatatacatgggacacgtcaaaggctacatatcgcatcagcatcagaagctggtggtcagcaagcagaacccatttcctcccctgtccacggtgtgttgaaagtacacggagccccgaggacgggtgagcagttgtttctttccactttggttgtgctgatgagaccggtccggtactgcaacaaggctccctgaagccggaactcttggaggcgcttttcccagggatgctgaggctgagattttcagcacacccgagttaatctccttcatttgtaactaatttcagcctgatgaaaacctggaattcctttttcacagactcggctggttctggagtctttgtgagacttctttgaaggaggctttgcgtgaaggctgctcggctcacttttcctaagtgtggttcctgaaggctgtctttgtaactttttgtagttctttgtgtaaaaagcgtattctgaatttatacacatggcatgttcttcattatatcttccaggatacatctatttttatatattaaatttgaatgtgttatcaaaatgcttggttaacttaaggcacctttttaaaagcagaatttaatttgatttaaattttccagattttatagcttgcctgtatggatgctcctcaatttatgatggggttacatcccaataaacttattttatttgcctttg

SEQ ID NO: 407506 - DNA, 1828 bp, Homo sapiens
agacggaccgagggccggaagtgacgccagctggcccgcttgaggcgtagggggtggcgctctccgttcggcggcgctcccatggcgcacattaccattaaccagtacctgcagcaggtgtacgaagccatcgacagcagagatggagcatcttgtgcagagttggtgtcttttaaacatcctcatgttgcaaacccacgacttcaaatggcctctccagaggagaagtgtcaacaagtcttggaacccccttatgatgaaatgtttgcagctcatttaaggtgcacttatgcagtggggaatcatgacttcatagaggcatacaagtgccagaccgtgatagtccaatcattcttgcgagcattccaggcccacaaagaagaaaactgggctctgcctgtcatgtatgcagtagcgcttgaccttcgagtgtttgccaataatgcagatcaacagttggtaaagaaaggaaaaagcaaagttggggacatgttggaaaaagcagcagagttactgatgagctgtttccgggtctgtgccagcgacacccgtgctggtatagaggactctaagaagtggggcatgctgtttctggtgaaccagctgtttaaaatctacttcaagattgacagctcaaacctgaaagacgattacagcactgcacagagagtaacatacaaatactacgttggacgcaaggctatgtttgacagcgattttaagcaagctgaggagtacctgtcatttgcctttgagcattgtcaccgttctagtcagaagaacaaaaggatgattctgatctatttgcttccagtaaaaatgctattgggtcacatgcccactgtggagctcctgaaaaagtatcacctgatgcagtttgcggaagtaaccagagctgtgagcgagggcaacctgctgctgctgcacgaggcgctggcgaagcacgaggccttcttcattcgctgcggaatcttcctcatcctggagaagctgaagatcatcacctacaggaacctctttaagaaagtgtatttgttactgaaaacacaccagctgtctctggatgcttttctggttgccttgaagttcatgcaggtggaggacgtggacattgacgaagttcagtgtattctggctaacttgatatacatgggacacgtcaaaggctacatatcgcatcagcatcagaagctggtggtcagcaagcagaacccatttcctcccctgtccacggtgtgttgaaagtacacggagccccgaggacgggtgagcagttgtttctttccactttggttgtgctgatgagaccggtccggtactgcaacaaggctccctgaagccggaactcttggaggcgcttttcccagggatgctgaggctgagattttcagcacacccgagttaatctccttcatttgtaactaatttcagcctgatgaaaacctggaattcctttttcacagactcggctggttctggagtctttgtgagacttctttgaaggaggctttgcgtgaaggctgctcggctcacttttcctaagtgtggttcctgaaggctgtctttgtaactttttgtagttctttgtgtaaaaagcgtattctgaatttatacacatggcatgttcttcattatatcttccaggatacatctatttttatatattaaatttgaatgtgttatcaaaatgcttggttaacttaaggcacctttttaaaagcagaatttaatttgatttaaattttccagattttatagcttgcctgtatggatgctcctcaatttatgatggggttacatcccaataaacttattttatttgcctttg

SEQ ID NO: 407507 - DNA, 1791 bp, Homo sapiens
agacggaccgagggccggaagtgacgccagctggcccgcttgaggcgtagggggtggcgctctccgttcggcggcgctcccatggcgcacattaccattaaccagtacctgcagcaggtgtacgaagccatcgacagcagagatggagcatcttgtgcagagttggtgtcttttaaacatcctcatgttgcaaacccacgacttcaaatggcctctccagaggagaagtgtcaacaagtcttggaacccccttatgatgaaatgtttgcagctcatttaaggtgcacttatgcagtggggaatcatgacttcatagaggcatacaagtgccagaccgtgatagtccaatcattcttgcgagcattccaggcccacaaagaagaaaactgggctctgcctgtcatgtatgcagtagcgcttgaccttcgagtgtttgccaataatgcagatcaacagttggtaaagaaaggaaaaagcaaagttggggacatgttggaaaaagcagcagagttactgatgagctgtttccgggtctgtgccagcgacacatcaacaaactccatttatgtaaacccctaattagagcaattgacagctcaaacctgaaagacgattacagcactgcacagagagtaacatacaaatactacgttggacgcaaggctatgtttgacagcgattttaagcaagctgaggagtacctgtcatttgcctttgagcattgtcaccgttctagtcagaagaacaaaaggatgattctgatctatttgcttccagtaaaaatgctattgggtcacatgcccactgtggagctcctgaaaaagtatcacctgatgcagtttgcggaagtaaccagagctgtgagcgagggcaacctgctgctgctgcacgaggcgctggcgaagcacgaggccttcttcattcgctgcggaatcttcctcatcctggagaagctgaagatcatcacctacaggaacctctttaagaaagtgtatttgttactgaaaacacaccagctgtctctggatgcttttctggttgccttgaagttcatgcaggtggaggacgtggacattgacgaagttcagtgtattctggctaacttgatatacatgggacacgtcaaaggctacatatcgcatcagcatcagaagctggtggtcagcaagcagaacccatttcctcccctgtccacggtgtgttgaaagtacacggagccccgaggacgggtgagcagttgtttctttccactttggttgtgctgatgagaccggtccggtactgcaacaaggctccctgaagccggaactcttggaggcgcttttcccagggatgctgaggctgagattttcagcacacccgagttaatctccttcatttgtaactaatttcagcctgatgaaaacctggaattcctttttcacagactcggctggttctggagtctttgtgagacttctttgaaggaggctttgcgtgaaggctgctcggctcacttttcctaagtgtggttcctgaaggctgtctttgtaactttttgtagttctttgtgtaaaaagcgtattctgaatttatacacatggcatgttcttcattatatcttccaggatacatctatttttatatattaaatttgaatgtgttatcaaaatgcttggttaacttaaggcacctttttaaaagcagaatttaatttgatttaaattttccagattttatagcttgcctgtatggatgctcctcaatttatgatggggttacatcccaataaacttattttatttgcctttg

SEQ ID NO: 407508 - DNA, 1210 bp, Homo sapiens
tgacatgatacgaatcgagtgtcggtccccgattacagcactgcacagagagtaacatacaaatactacgttggacgcaaggctatgtttgacagcgattttaagcaagctgaggagtacctgtcatttgcctttgagcattgtcaccgttctagtcagaagaacaaaaggatgattctgatctatttgcttccagtaaaaatgctattgggtcacatgcccactgtggagctcctgaaaaagtatcacctgatgcagtttgcggaagtaaccagagctgtgagcgagggcaacctgctgctgctgcacgaggcgctggcgaagcacgaggccttcttcattcgctgcggaatcttcctcatcctggagaagctgaagatcatcacctacaggaacctctttaagaaagtgtatttgttactgaaaacacaccagctgtctctggatgcttttctggttgccttgaagttcatgcaggtggaggacgtggacattgacgaagttcagtgtattctggctaacttgatatacatgggacacgtcaaaggctacatatcgcatcagcatcagaagctggtggtcagcaagcagaacccatttcctcccctgtccacggtgtgttgaaagtacacggagccccgaggacgggtgagcagttgtttctttccactttggttgtgctgatgagaccggtccggtactgcaacaaggctccctgaagccggaactcttggaggcgcttttcccagggatgctgaggctgagattttcagcacacccgagttaatctccttcatttgtaactaatttcagcctgatgaaaacctggaattcctttttcacagactcggctggttctggagtctttgtgagacttctttgaaggaggctttgcgtgaaggctgctcggctcacttttcctaagtgtggttcctgaaggctgtctttgtaactttttgtagttctttgtgtaaaaagcgtattctgaatttatacacatggcatgttcttcattatatcttccaggatacatctatttttatatattaaatttgaatgtgttatcaaaatgcttggttaacttaaggcacctttttaaaagcagaatttaatttgatttaaattttccagattttatagcttgcctgtatggatgctcctcaatttatgatggggttacatcccaataaacttattttatttgcctttg

SEQ ID NO: 407509 - DNA, 1173 bp, Homo sapiens
agacggaccgagggccggaagtgacgccagctggcccgcttgaggcgtagggggtggcgctctccgttcggcggcgctcccatggcgcacattaccattaaccagtacctgcagcaggtgtacgaagccatcgacagcagagatggagcatcttgtgcagagttggtgtcttttaaacatcctcatgttgcaaacccacgacttcaaatggcctctccagaggagaagtgtcaacaagtcttggaacccccttatgatgaaatgtttgcagctcatttaaggtgcacttatgcagtggggaatcatgacttcatagaggcatacaagtgccagaccgtgatagtccaatcattcttgcgagcattccaggcccacaaagaagaaaactgggctctgcctgtcatgtatgcagtagcgcttgaccttcgagtgtttgccaataatgcagatcaacagttggtaaagaaaggaaaaagcaaagttggggacatgttggaaaaagcagcagagttactgatgagctgtttccgggtctgtgccagcgacacgtgagtaaggacttgaggaccgaccaccagacgctgttggtggtgttttcattgcagcgttcaccctttctggcctgtgtttattgttgacacatatttcatttctacacatgctataatcccacaaccattgttatttttgctttaaaaagttgattgttttgtaaaggaaataagagctgagggaaaaaagagtcttcatttgcccacatttgaccatgcctggagctcctctctgcaggaaccagtttccgtctagtgccatttccctttcctgaggcactttcttccacatttgcgtttggtgagggtctgagggcagtgaatcttttaagctttcatttttctgaaactctcgttattttttttaagaaatgttctctctttaccagtgaagaagcagcactgatcaccttcatttttaaggctccatttgctacatggagtctcgtgggttgacagttttttccttttggcactttaaaaatgtcattccatctggtttcctttgcttctgatgagtccttgccatcgttccctgtatagaatgggtctttttcctctggctatgattttctctttatcattggcattcagtaatttggctctgatgtgcatagttggt

SEQ ID NO: 407510 - DNA, 1675 bp, Homo sapiens
gcaggcctgccttgctctgccaggaaccatgagtgaggcccgcagggacagcacgagcagcctgcagcgcaagaagccaccctggctaaagctggacattccctctgcggtgcccctgacggcagaagagcccagcttcctgcagcccctgaggcgacaggctttcctgaggagtgtgagtatgccagccgagacagcccacatctcttcaccccaccatgagctccggcggccggtgctgcaacgccagacgtccatcacacagaccatccgcagggggaccgccgactggtttggagtgagcaaggacagtgacagcacccagaaatggcagcgcaagagcatccgtcactgcagccagcgctacgggaagctgaagccccaggtcctccgggagctggacctgcccagccaggacaacgtgtcgctgaccagcaccgagacgccacccccactctacgtggggccatgccagctgggcatgcagaagatcatagaccccctggcccgtggccgtgccttccgtgtggcagatgacactgcggaaggcctgagtgccccacacactcccgtcacgccgggtgctgcctccctctgctccttctccagctcccgctcaggtttccaccggctcccgcggcggcgcaagcgagagtcggtggccaagatgagcttccgggcggccgcagcgctgatgaaaggccgctccgttagggatggcacctttcgccgggcacagcgtcgaagcttcactccagctagctttctggaggaggacacaactgatttccccgatgagctggacacatccttctttgcccgggaaggtatcctccatgaagagctgtccacatacccggatgaagttttcgagtccccatcggaggcagcgctaaaggactgggagaaggcaccggagcaggcggacctcaccggcggggccctggaccgcagcgagcttgagcgcagccacctgatgctgcccttggagcgaggctggcggaagcagaaggagggcgccgcagccccgcagcccaaggtgcggctccgacaggaggtggtgagcaccgcggggccgcgacggggccagcgtatcgcggtgccggtgcgcaagctcttcgcccgggagaagcggccgtatgggctgggcatggtgggacggctcaccaaccgcacctaccgcaagcgcatcgacagcttcgtcaagcgccagatcgaggacatggacgaccacaggcccttcttcacctactggcttaccttcgtgcactcgctcgtcaccatcctagccgtgtgcatctatggcatcgcgcccgtgggcttctcgcagcatgagacggtggactcggtgctgcggaaccgcggggtctacgagaacgtcaagtacgtgcagcaggagaacttctggatcgggcccagctcggaggccctcatccacctgggcgccaagttttcgccctgcatgcgccaggacccgcaggtgcacagcttcattcgctcggcgcgcgagcgcgagaagcactccgcctgctgcgtgcgcaacgacaggtcgggctgcgtgcagacctcggaggaggagtgctcggtgcgtttccccgcccgggactcccgccttcgtctgcccggtgttcgctcttcagacctcagatagactcggcagagtgatccttcgccc

SEQ ID NO: 407511 - DNA, 372 bp, Homo sapiens
taccttgggatggggacatggtcttgggattgcaccagggggccagtgtctggatgggagagcattccaggcaggacctctaggtgctgtggggtgggagtggtggccatagagctgtccaggggcccgtgaggagtcaggagcagcagtcacgctgtctttgcaaggcctctgtgcctctgggtgagctaggagcccccatggtcctgactccagcatctcctcccctcctccagatcatagaccccctggcccgtggccgtgccttccgtgtggcagatgacactgcggaaggcctgagtgccccacacactcccgtcacgccgggtgctgcctccctctgctccttctccagctcccgctcaggtttcc

SEQ ID NO: 407512 - DNA, 1506 bp, Homo sapiens
gcaggcctgccttgctctgccaggaaccatgagtgaggcccgcagggacagcacgagcagcctgcagcgcaagaagccaccctggctaaagctggacattccctctgcggtgcccctgacggcagaagagcccagcttcctgcagcccctgaggcgacaggctttcctgaggagtgtgagtatgccagccgagacagcccacatctcttcaccccaccatgagctccggcggccggtgctgcaacgccagacgtccatcacacagaccatccgcagggggaccgccgactggtttggagtgagcaaggacagtgacagcacccagaaatggcagcgcaagagcatccgtcactgcagccagcgctacgggaagctgaagccccaggtcctccgggagctggacctgcccagccaggacaacgtgtcgctgaccagcaccgagacgccacccccactctacgtggggccatgccagctgggcatgcagaagatcatagaccccctggcccgtggccgtgccttccgtgtggcagatgacactgcggaaggcctgagtgccccacacactcccgtcacgccgggtgctgcctccctctgctccttctccagctcccgctcaggtttccaccggctcccgcggcggcgcaagcgagagtcggtggccaagatgagcttccgggcggccgcagcgctgatgaaaggccgctccgttagggatggcacctttcgccgggcacagcgtcgaagcttcactccagctagctttctggaggaggacacaactgatttccccgatgagctggacacatccttctttgcccgggaaggtatcctccatgaagagctgtccacatacccggatgaagttttcgagtccccatcggaggcagcgctaaaggactgggagaaggcaccggagcaggcggacctcaccggcggggccctggaccgcagcgagcttgagcgcagccacctgatgctgcccttggagcgaggctggcggaagcagaaggagggcgccgcagccccgcagcccaaggtgcggctccgacaggaggtggtgagcaccgcggggccgcgacggggccagcgtatcgcggtgccggtgcgcaagctcttcgcccgggagaagcggccgtatgggctgggcatggtgggacggctcaccaaccgcacctaccgcaagcgcatcgacagcttcgtcaagcgccagatcgaggacatggacgaccacaggcccttcttcacctactggcttaccttcgtgcactcgctcgtcaccatcctagccgtgtgcatctatggcatcgcgcccgtgggcttctcgcagcatgagacggtggactcggtgctgcggaaccgcggggtctacgagaacgtcaagtacgtgcagcaggagaacttctggatcgggcccagctcggtgaggacggggctgggggcggggccggcgggggcgggacctggaggtgcccggcgggggcaggaggccccggactgcggccg

SEQ ID NO: 407513 - DNA, 653 bp, Homo sapiens
gaaagccgaggctcagtaggcatccaaatttaacttgaagctccctgatggtcagggcaaaaagagtagcatggtgggtttaggcttgcagtatctatttttggtatttgtaatgccaaatgtattttttctttgctttgttttattttttaccagtcgaaactcttattgaggtaaattttacatgtcgtgaaatgtgcagatgttaaacagttagttggatgaggtttttttttttttttttgagatggagtctcactctgtcacccaggctggagtgcagtggcctgatatcagctcactgcaacctttgtctcccgggttcaagtgattctcttgcctcagcctcccaagtagctgggattacaggcatgtgccaccatgtccagctaatttttgtatttttagtagagacacggtttcaccatgttggccaggctggtctcgaacgcctgacctcatccgtctgcctccgcctcctgaagtgctgggattacaggcatgagccaccgcgcctggcagttggatgagttttgattaatacagaccttcatgtagccatcaatcgaatcaaaataacaaatgtctctatcaccctggcttaagtttgcctgttcttaaactttctgcaactggaagcctacagtagatgc

SEQ ID NO: 407514 - DNA, 453 bp, Homo sapiens
tctgttggctcgctgtggtttttccaatgccacaccagtgttttgcacatttaagatgctcagtgtgtatctatggaataaatgaatgagtgaaattatgtatagttttcttcttaattgtgatgctggattacctggacatccctacctctggtgactacaaatgaatcctcaggcaatgattgtgcaaggctagtgtctgccattgccagggcgtccccttagggtcaaatctatgaaccacactcctgaagcatatacttccagccagctgagcaaattctaactcaaggagagccatctagattaacccatttaaaaatccctttggaacaatgcatttactctgccaaagtcactactattataatgaaaaaatattcaatgtgtatttactttgcattttgtgacataatccatcaaacttaagtcacccacagcatatgaaaatat

SEQ ID NO: 407515 - DNA, 452 bp, Homo sapiens
tcccaacagttttggaagccaaggcaagaggattcccaggagttcaagaccagcctaggcaacttagcaagaccttgtatcttccaaaaactttaaaaattagttgtgtgtggtgtgcctggctgagatgagaggattgcttgaatccaggaggtggaggctgtagtgagctatgattgtggcacagcagtccagcctgggtgacacaaggataccctgtctttaaaaaaaacaaaacaaaacaaaacaaaaaaaacaactgaacactgcttaacatccaaaataagatccaggaactctcaatacttattatttatacaaacagcaataggtaaatttatgttctgctttgaacctatgaaaatttaaagaccgttgctttggcattgggcaagttattcttttatactatacttgtgatctaaacgttccaggtacttggaaattatttt

SEQ ID NO: 407516 - DNA, 576 bp, Homo sapiens
accctgtctccaccaaaaaatatgaaaaccagtcaggcgtggcggtgcgcgcctgcaatcccaggcactcggcaggctgaggcaggagaatcaggcagggaggttgcagtgagtcgagatggcagcagtacagtccagccttggctcggcatcagagggtttttttttttttctgtgaaggcatttgacataagacaatatacttctggaattattctaagaattaaaattagtgggcttttcctttagcttaagctgtgagtggtacaaaagttataaacaagtaaatgtgttactggcaaattaaggaaatgattttgtatattttctcttagcaggagttaggacatagcgagcagctaataatagcatcttactcatgaagagcttctccagtaagattaccacttgttatttacatatctatgcagaactgtcatctcttcctagttttgagaaagttacctttatattgttttattcgagcctgcgaccattaattaaggggtctttagaaaacattactgaaattgtaaagtacttatggcaatggaagctacggttaaatgcctgcgt

SEQ ID NO: 407517 - DNA, 410 bp, Homo sapiens
acctcgacaaggccaaggccaagaattgacctcctggagctcatcacgttctcaggttcagatgcctgggccccctacaccagaattaccaggggtgcttgtgaaaatgcagattcctgggcccaatcagctcttttgattcagaggctctggggatgaggtcctgcaatccacattttaaaccagcagccctggtgatgctgaggcatgcgtgcatttcagagctgtcagtatcagcgcaggaaagcacaacctctcacgcctgctgtcctcccgagcccagccccctcctactgtcaagaagagccttgatagcagtactatcggtgtgtgtgtgggggcgggggggggcggtgtgctgtgactcatttgtggctaatggtcattcagtaaactgggccgacaagaga

SEQ ID NO: 407518 - DNA, 596 bp, Homo sapiens
tggttacatgattaatttgatgtacagttaggctcactgatttcaatttgtattcaatattgaaatttacttttttcaacagtaagactactcttctttacagtagtggtactattcatatgaggtaaacactgtggccagttgtccatggactagaatttatatgtaaacagtagaatcggtatggtaacatttatatctacaacttaatatttattacaataaagtatttatgatcaatttttaagataactgcctatggctcccgaaaagactatagctaaggatcttcaaaagttagtctgattaactttagttgacacttacatagtgctatgtgccaagcactgtaagtgttttatatacatgaaacagacctctgaggtatgttgcccaaaatcatgctgctagtaagctgaacagatagaattttttttttttttttagacagagtcttgttccattgcccaggctggagtacagtggcacaatcatatctcactgcagccttgaactcctaggctcaagcgatccttctgcctcagcctcccgagtagctaggactacaggcacacatcatcatgactagcaattaa

SEQ ID NO: 407519 - DNA, 460 bp, Homo sapiens
  misc_feature (456)..(456): n is a, c, g, or t
  misc_feature (459)..(460): n is a, c, g, or t
acaacatgaaggatggaaggtaaagggatcttggaagaatttctacatcacatttaaagtggcaaatattgattcaaagcatgctgagaaagtttaagtttgtttactgtaacagtcatcaccacacacatacacacacacacacacacacacacacagcccaaagtgaaataataagaaactaaaatagaatactaacaaatgctcaagtaacccaaaagaagaagaaaaaaagggtaacagaggaaggaaaaacataaggagtgatgagtaaacagataattaaatagtagccctaaacccaaacatatcaatattaacattaaatgtaaatggtgtaagcacactagttaaaatagagataatcagaatgagtaaaaaggtatcactcgactatatgctgtctaccagaaacatacttcaagtataaagatataggaaggttaaatgaaaaanaann

SEQ ID NO: 407520 - DNA, 4095 bp, Homo sapiens
ctgcatttataccacttctcaattggcatagatacatgttggctttccctatgggttttaatcaaatattgagattggaaattttctttgaaatatttcctttcagtagcttacttttaagtactgtcgaatattaggatgattgagaagcacatcttgttttggcctctcttctaggggcttcggtggatggagaaaacaagccaaggccatcattgtattctctgcaaaattttgaggagatggaaacagaagattgtgagaagatgagcaatatgggaactttgaactcttccatgctgcacaggagtgcagagtccttaaagagtctaagttcagagttgtgtccagagaaaatcctgcctgaagagaagccagtacatctgccagtgctcagaaggtccaagtctcaatccagaccccagcaggtcaagttttctgatgatgtcattgacaatgggaactatgacattgaaatccggcagcctccgatgagtgaaaggactcggagacgcgtctacaattttgaagagaggggatccaggtctcatcaccaccgccgccggagaagtagaaagtcccgctccgacaatgccctgaatcttgttacagaaagaaaatactctcccaaggacagactgcggctgtacacccccgataactatgagaaatttatacagaataaaagtgcccgggagatccaagcatacatccagaatgctgatctctacggacagtacgcccatgccacttccgattatggcctgcagaacccaggaatgaatcggtttctgggactctacggcgaggatgatgattcctggtgttcttcctcctcctcctcttccgactcggaagaagaaggatattttcttggacaaccaatccctcaaccccggccacagagatttgcctactatacagatgacctttctagtccaccatctgcacttcccacccctcagtttggtcagaggacaacaaaatccaagaagaaaaagggacacaagggcaaaaattgtattatttcttaaccaagtagtgatgcagagcatttgtttaaaacttagccattaaccgtctgaatcgtttccttttcttccgtaggaaagttgtgaaaatagcttaaagtgctttctttgcccatgtaaatgagaactcaactgctgtttacagtgtcagattaacatttgaaaggtgtgatttctccaatttaccctctttggatggtgccaggtggacgtgacatctcgtgcctgtccggtgcgggtgcgttacagatggacgtagctgctttggttttccagtcctcaagggaatactgaagatgctgactgaaggggattggatgttgattttagaagatggagaactccagccacctttgtaaagcactagtgtttgtcatttatgtaagtcaggtcggctcaggtcttgatagtccgtcttggtgtgaggcatgcctgtcacgatgacctagctaacactgtgcatcttattgtgaggccagcttgtcccctcgaaccctctttggccaggtaaacattgtattgtatcagcgccagctacagattgaaaaaaaaaacaaaaaacattgctatttataacttagtatttcatagacttaagtgtattcctaatttaacggtgcaaatattaatgtatatactgtacagttcagattttaaagctgatatttttatatccctgaattgtaagccgtttgttacgctgcagtgctagatttgccagggaaccagaatttatggatgaactgattgcttatattttagtcagggtttataaatgtagatggtcaaatttacattgcctagtgatggaaaattcaactttttttgatttttttttccaatattaaaaaaggctctgtatgcatggtggggctatgtaagtactctttaaaactatggccctattaatcttacaagtgttacttatgggtcaagcaatgtaaactgtataaatgtaaaaacaacccctccacacacataacccctggaatatatggtaaaaacaagtagaagctgtttcagcgagtgggttttttccccctgcctgcggggggtgcctttctcattttcagcaaggtgatgattatctcatgggaaatgacaaagatctgcttttgtggcagaggactttgtagatttgttattttaagagaggttattcctttttattccttccctcccactaatttgttggcctttaacagcaattttgaaaactgggtcttctggttatgtttttgttttaaaatctttaaattagaggatgctgtgccattgagtactttaagttaatatgaggttctggttcaaggaaaacttacgttggatctgaaccaatgagcagatattttgatatgtgccactcttgcatatacatctcagtcctaactaaagattctagtggcatccaggacctttagggaggcatttaataaacacttaataaataacaaaactacctttctgaatataaatctttgcaaatgtatccagataacttccattttgtgcctgtgttcaggcatgatttattttgcagttgccctaccattaacagacctccatttgtctcgtgtgtccacacgccccacttgtaggccagaaatagggcttcagacacagaggcttattttttccatatagactggagtggggaaaatttggccttagggaggacagacacaagtccaatgggtaaaccagcgagtagtaggtggacagccgtcccacacaagggtttgtatctgggctacacagattcccttcagaaaagcaccaatggtgagagagttcttcactcagtaacttacattccctggtctggtgcctttaaaaaaccatcagcaatgaaaaggaagtgcatacacatgacaaaaaaattcaaatagggcaaaagtcagagacagcatctcctttccattcttcatcccagtaccccaggtcctctccccagaagtaaccactcttacccagttttagtgtctccttcagacattcaaagcacattcgtataaatgtgtcttttaaaagtggtagtgacctatatgtgctgtgacatgcttttttccctttgtatgtggacatttcacgttagtgtatataggtctacccattctttcagtgactgcttgatagcctactcctaatgatggagttgactttcctcatacattgtgctacactggcacatgtgcacataaatcgggagcagcgtagttactgggacaaaggttacgtatttaagactgatggatattgccaattttcctccaaaagaaattctcctgatttacattaatgtaatgtaaatgagagtgtttgttccatcacaacctctcaatgtattagcagatttcttgattttgaagaaattttcagaacctgtgctgccacaagtgggcatccttttagaaaagactgttgcaatatgttgcttataaaggatggataataaatagtaaacaggtgatacttagcctgaagaaatgcaggtataaggtgaaggtactgccctcacttttcaagtacattctcaaaagataggggtaacatagcctgccaaaggcttaaggaaatgcagatatttattcacaataataatgtaactttcttttccttttttttttttttttgagatggagtttcgctcctgttgcccaggctggagcgcaacggcacaatctcagttcactgcaacctctgcctcccgggttcaagcaattctcctgtctcagcctccggagtagctgagattacaggtgcctgccaccatgctcggctaattttttatatttttagtagagacagtgtttcaccaagttggccaggctggtctcgaactcctgaccttcaggtgatccacctgcctcagcctcccaaagtgcaggggattacaggcatgagccactgcgtctggcaataatgtaactttgaagcttaaaaattaatcccagtttgtagcaataacagaagactatctacaacggaagaaagaagcaactgccttacagttctgtaaagaattggcaagaaaataaagcctatagttgccgacttagtctat

SEQ ID NO: 407521 - DNA, 2555 bp, Homo sapiens
aatttcggcacgagggattttgttctaggttaattaccgataaacgaacgagactctggcatgctaacttagtatttcatagacttaagtgtattcctaatttaacggtgcaaatattaatgtatatactgtacagttcagattttaaagctgatatttttatatccctgaattgtaagccgtttgttacgctgcagtgctagatttgccagggaaccagaatttatggatgaactgattgcttatattttagtcagggtttataaatgtagatggtcaaatttacattgcctagtgatggaaaattcaactttttttgatttttttttccaatattaaaaaaggctctgtatgcatggtggggctatgtaagtactctttaaaactatggccctattaatcttacaagtgttacttatgggtcaagcaatgtaaactgtataaatgtaaaaacaacccctccacacacataacccctggaatatatggtaaaaacaagtagaagctgtttcagcgagtgggttttttccccctgcctgcggggggtgcctttctcattttcagcaaggtgatgattatctcatgggaaatgacaaagatctgcttttgtggcagaggactttgtagatttgttattttaagagaggttattcctttttattccttccctcccactaatttgttggcctttaacagcaattttgaaaactgggtcttctggttatgtttttgttttaaaatctttaaattagaggatgctgtgccattgagtactttaagttaatatgaggttctggttcaaggaaaacttacgttggatctgaaccaatgagcagatattttgatatgtgccactcttgcatatacatctcagtcctaactaaagattctagtggcatccaggacctttagggaggcatttaataaacacttaataaataacaaaactacctttctgaatataaatctttgcaaatgtatccagataacttccattttgtgcctgtgttcaggcatgatttattttgcagttgccctaccattaacagacctccatttgtctcgtgtgtccacacgccccacttgtaggccagaaatagggcttcagacacagaggcttattttttccatatagactggagtggggaaaatttggccttagggaggacagacacaagtccaatgggtaaaccagcgagtagtaggtggacagccgtcccacacaagggtttgtatctgggctacacagattcccttcagaaaagcaccaatggtgagagagttcttcactcagtaacttacattccctggtctggtgcctttaaaaaaccatcagcaatgaaaaggaagtgcatacacatgacaaaaaaattcaaatagggcaaaagtcagagacagcatctcctttccattcttcatcccagtaccccaggtcctctccccagaagtaaccactcttacccagttttagtgtctccttcagacattcaaagcacattcgtataaatgtgtcttttaaaagtggtagtgacctatatgtgctgtgacatgcttttttccctttgtatgtggacatttcacgttagtgtatataggtctacccattctttcagtgactgcttgatagcctactcctaatgatggagttgactttcctcatacattgtgctacactggcacatgtgcacataaatcgggagcagcgtagttactgggacaaaggttacgtatttaagactgatggatattgccaattttcctccaaaagaaattctcctgatttacattaatgtaatgtaaatgagagtgtttgttccatcacaacctctcaatgtattagcagatttcttgattttgaagaaattttcagaacctgtgctgccacaagtgggcatccttttagaaaagactgttgcaatatgttgcttataaaggatggataataaatagtaaacaggtgatacttagcctgaagaaatgcaggtataaggtgaaggtactgccctcacttttcaagtacattctcaaaagataggggtaacatagcctgccaaaggcttaaggaaatgcagatatttattcacaataataatgtaactttcttttccttttttttttttttttgagatggagtttcgctcctgttgcccaggctggagcgcaacggcacaatctcagttcactgcaacctctgcctcccgggttcaagcaattctcctgtctcagcctccggagtagctgagattacaggtgcctgccaccatgctcggctaattttttatatttttagtagagacagtgtttcaccaagttggccaggctggtctcgaactcctgaccttcaggtgatccacctgcctcagcctcccaaagtgcaggggattacaggcatgagccactgcgtctggcaataatgtaactttgaagcttaaaaattaatcccagtttgtagcaataacagaagactatctacaacggaagaaagaagcaactgccttacagttctgtaaagaattggcaagaaaataaagcctatagttgccgacttagtctat

SEQ ID NO: 407522 - DNA, 2859 bp, Homo sapiens
  misc_feature (1927)..(1927): n is a, c, g, or t
  misc_feature (2858)..(2858): n is a, c, g, or t
acccacgcgtctggccgcgggccgcctctgcggcagcgctagtcgccttctccgaatcggctccgcacagctaggagaaaagatgttcactgtgctgacccgccaaccatgtgagcaagcaggcctcaaggccctctaccgaactccaaccatcattgccttggtggtcttgcttgtgagtattgtggtacttgtgagtatcactgtcatccagatccacaagcaagaggtcctccctccaggactgaagtatggtattgtgctggatgccgggtcttcaagaaccacagtctacgtgtatcaatggccagcagaaaaagagaataataccggagtggtcagtcaaaccttcaaatgtagtgtgaaaggctctggaatctccagctatggaaataacccccaagatgtccccagagcctttgaggagtgtatgcaaaaagtcaaggggcaggttccatcccacctccacggatccacccccattcacctgggagccacggctgggatgcgcttgctgaggttgcaaaatgaaacagcagctaatgaagtccttgaaagcatccaaagctacttcaagtcccagccctttgactttaggggtgctcaaatcatttctgggcaagaagaaggggtatatggatggattacagccaactatttaatgggaaatttcctggagaagaacctgtggcacatgtgggtgcacccgcatggagtggaaaccacgggtgccctggacttaggtggtgcctccacccaaatatccttcgtggcaggagagaagatggatctgaacaccagcgacatcatgcaggtgtccctgtatggctacgtatacacgctctacacacacagcttccagtgctatggccggaatgaggctgagaagaagtttctggcaatgctcctgcagaattctcctaccaaaaaccatctcaccaatccctgttaccctcgggattatagcatcagcttcaccatgggccatgtatttgatagcctgtgcactgtggaccagaggccagaaagttataaccccaatgatgtcatcacttttgaaggaactggggacccatctctgtgtaaggagaaggtggcttccatatttgacttcaaagcttgccatgatcaagaaacctgttcttttgatggggtttatcagccaaagattaaagggccatttgtggcttttgcaggattctactacacagccagtgctttaaatctttcaggtagcttttccctggacaccttcaactccagcacctggaatttctgctcacagaattggagtcagctcccactgctgctccccaaatttgatgaggtatatgcccgctcttactgcttctcagccaactacatctaccacttgtttgtgaacggttacaaattcacagaggagacttggccccaaatacactttgaaaaagaagtggggaatagcagcatagcctggtctcttggctacatgctcagcctgaccaaccagatcccagctgaaagccctctgatccgtctgcccatagaaccacctgtctttgtgggcaccctcgctttcttcacagcggcagccttgctgtgtctggcatttcttgcatacctgtgttcagcaaccagaagaaagaggcactccgagcatgcctttgaccatgcagtggattctgactgagccttcaaagcagctcctggagtccaatggctgcttagagtcagcctgggtggcaccaggcaatgcaggtgaagtggctgccttcaggaaatacaactaactaaaatcaaacacctaggtcacgtgcctctcaaatactgatttctgccacagcacctcttgaggcatcccttggctattctgtgcatattgttcttcagagacctcactacccacatgctgatctattggggaacagagaagagacaggccacnaaggtcaggctctttatattaagttccccagaggaagagtaagttgagaaggtatcagtttaatgttgaagaattgacctcagggctcagtttccatttccctccctcagtattcttcctggcaagatacccattaagcatttcgccaatcagaatctcattttatagtttttcccattggtctttaactaagactttcttgtagcaatctcgtaagcagtgaaccccctcagatcagtagaatatagtatctgggggagaagacttacttccttcagggcagcagccacagccaggcttctgtcatacaggtagatcccgaagcacagagacataaaaaaggtctcccagaaaactatagaccattctccaagtggaattcccacttagggctctggtcactagattgcaacctgtgtgtttgtcatcatcctcatctcaccattgtattgctatgccctcccataaaaacacattgatccctagcaagattattgcattccagattttactgcctttgctaggcttttgcttagcaaagggctgactttccattgttatcatggtgtatatatttttgtcaccattcccacaagtatacttgatgttgtcatagaacgaacatcctactctatgatttactaaccaattactttcccagatcatagacctctctgcatagtagtcataggtcttgactttggggaaagaaaaggaagctgcaggaatatttatctccaaagtcgaatgagaaagaactccagcaaatccaatggctacaaactaaaaatcagcattatttcatattgctgtttcttagctgaatatggaataaagaactattattttattttgacttgcaaaaaaatcactggccgccgtttacaacgtcgtgactgggccctgcggtacccaactttcgccttgcagnc

SEQ ID NO: 407523 - DNA, 2790 bp, Homo sapiens
  misc_feature (1927)..(1927): n is a, c, g, or t
acccacgcgtctggccgcgggccgcctctgcggcagcgctagtcgccttctccgaatcggctccgcacagctaggagaaaagatgttcactgtgctgacccgccaaccatgtgagcaagcaggcctcaaggccctctaccgaactccaaccatcattgccttggtggtcttgcttgtgagtattgtggtacttgtgagtatcactgtcatccagatccacaagcaagaggtcctccctccaggactgaagtatggtattgtgctggatgccgggtcttcaagaaccacagtctacgtgtatcaatggccagcagaaaaagagaataataccggagtggtcagtcaaaccttcaaatgtagtgtgaaaggctctggaatctccagctatggaaataacccccaagatgtccccagagcctttgaggagtgtatgcaaaaagtcaaggggcaggttccatcccacctccacggatccacccccattcacctgggagccacggctgggatgcgcttgctgaggttgcaaaatgaaacagcagctaatgaagtccttgaaagcatccaaagctacttcaagtcccagccctttgactttaggggtgctcaaatcatttctgggcaagaagaaggggtatatggatggattacagccaactatttaatgggaaatttcctggagaagaacctgtggcacatgtgggtgcacccgcatggagtggaaaccacgggtgccctggacttaggtggtgcctccacccaaatatccttcgtggcaggagagaagatggatctgaacaccagcgacatcatgcaggtgtccctgtatggctacgtatacacgctctacacacacagcttccagtgctatggccggaatgaggctgagaagaagtttctggcaatgctcctgcagaattctcctaccaaaaaccatctcaccaatccctgttaccctcgggattatagcatcagcttcaccatgggccatgtatttgatagcctgtgcactgtggaccagaggccagaaagttataaccccaatgatgtcatcacttttgaaggaactggggacccatctctgtgtaaggagaaggtggcttccatatttgacttcaaagcttgccatgatcaagaaacctgttcttttgatggggtttatcagccaaagattaaagggccatttgtggcttttgcaggattctactacacagccagtgctttaaatctttcaggtagcttttccctggacaccttcaactccagcacctggaatttctgctcacagaattggagtcagctcccactgctgctccccaaatttgatgaggtatatgcccgctcttactgcttctcagccaactacatctaccacttgtttgtgaacggttacaaattcacagaggagacttggccccaaatacactttgaaaaagaagtggggaatagcagcatagcctggtctcttggctacatgctcagcctgaccaaccagatcccagctgaaagccctctgatccgtctgcccatagaaccacctgtctttgtgggcaccctcgctttcttcacagcggcagccttgctgtgtctggcatttcttgcatacctgtgttcagcaaccagaagaaagaggcactccgagcatgcctttgaccatgcagtggattctgactgagccttcaaagcagctcctggagtccaatggctgcttagagtcagcctgggtggcaccaggcaatgcaggtgaagtggctgccttcaggaaatacaactaactaaaatcaaacacctaggtcacgtgcctctcaaatactgatttctgccacagcacctcttgaggcatcccttggctattctgtgcatattgttcttcagagacctcactacccacatgctgatctattggggaacagagaagagacaggccacnaaggtcaggctctttatattaagttccccagaggaagagtaagttgagaaggtatcagtttaatgttgaagaattgacctcagggctcagtttccatttccctccctcagtattcttcctggcaagatacccattaagcatttcgccaatcagaatctcattttatagtttttcccattggtctttaactaagactttcttgtagcaatctcgtaagcagtgaaccccctcagatcagtagaatatagtatctgggggagaagacttacttccttcagggcagcagccacagccaggcttctgtcatacaggtagatcccgaagcacagagacataaaaaaggtctcccagaaaactatagaccattctccaagtggaattcccacttagggctctggtcactagattgcaacctgtgtgtttgtcatcatcctcatctcaccattgtattgctatgccctcccataaaaacacattgatccctagcaagattattgcattccagattttactgcctttgctaggcttttgcttagcaaagggctgactttccattgttatcatggtgtatatatttttgtcaccattcccacaagtatacttgatgttgtcatagaacgaacatcctactctatgatttactaaccaattactttcccagatcatagacctctctgcatagtagtcataggtcttgactttggggaaagaaaaggaagctgcaggaatatttatctccaaagtcgaatgagaaagaactccagcaaatccaatggctacaaactaaaaatcagcattatttcatattgctgtttcttagctgaatatggaataaagaactattattttattttgacttgcaa

SEQ ID NO: 407524 - DNA, 243 bp, Homo sapiens
gcagacattataactcagtactcttaatactttaatgtacatctctaagaataagacattttcctaatgtaattgtgtgatcacaatacagtgaccacacttttaaaacttaaaaaaattccaaatatcagtttgttttattggtaaatattttagtgtgccagacattaagtcctctttgttgttgttgaaacataaacaaaatactgtttttttaatgctttcaaagaggaaggcattgca

SEQ ID NO: 407525 - DNA, 389 bp, Homo sapiens
ggaatgtggcaaaggccacttattagctctccctctttctgctccctttaccttctgcctcagaaagatcattttcatttaagcagcagtagctagaaggggagccccttcttatcatagagcatggctcaggatgaggaatccctggcacaggaggctgggtggtgtggtggaaagagacccaggttgggaggaagaaagggctgtgcagactcccaaacactaccaaaaggtgaggcatcgtctccggtttgagcaagttgctggggccctcctcctgtttaccactctgtgaacttatcctgctgattccgtggtgtctggggcaggtcctgactctgggaccaccccgcaagccttcacctggtgactttgtgatctgggagctt

SEQ ID NO: 407526 - DNA, 158 bp, Homo sapiens
ctggaatcagttgattccttttatctataattacagtgagcaacataatttttaatattaaactaacaagtactgggaaaacctgtttctactttctgtggtttgcttatcaaattaatcctacaattttgatcccgttatacagttctcaaggtaca

SEQ ID NO: 407527 - DNA, 1429 bp, Homo sapiens
  misc_feature (1251)..(1251): n is a, c, g, or t
ggacactgggcccgtattaggggaacatctgtcataggttctactgcgatagactcctagcccctctcctgtgacctgtccctgtctgccctgggcgggagccacgcagactcatagcaaccaccccaagctgaagctgtgacgcagagcccggtacccatccttgtggaccctggctgaggtggagggtgtgctctagcagaaccctggccagactccagacagtattcttcccctccaccctactccatcctgtcccccctactccatcctgtccccccactcaccaaaggacttgggccacttctcccaccttgcctgcctcaacctaactcctcctttcatttaagctcagggttaaccagatactcttagatataagtctacatcccccaaaataggatcctcaccccccatgcacatacacacacattcctgtccaagaaagcccacaggtggctgctctgcctgtgtgtccacttgtgtatgtacatgccccagccacaaggcacgggtgacgcccaagaagagcccctaagatgtaagatacaagtatataatttatatgtatgcagagacaaactgattgaaacatttctagcactgtttattctcctacatcccctctttttgacctgaaaggtcctttattgtctttggatctgccaaacctccctgtgagggtgtggttcaggcatccagccagaggtccccccacttcttcgatgtccatgcccactcaggcactttctcatataccactgtgccacttcaagtgtgacgtatttaggttctttggggtttcttccatctcatcccacccactcatttttgttccttgttttgttcagacacttccccagcctgggtccaactgctgagctggatagttttctctgcagcttcctgctgaagatttaactcagccatggccttctccacacctccctgatgggtgtctctctacctgggttgtaattagaactgggatctatttaatttctccagccatttcccaacccttcccacagtactagaaatcttagtcctataccagagtaagaggtgtgtacaagcccccactgtactgtatgcacggatcgcttggccaataattatgtcagtgaatctgagacttgtattaaacactttagacatttgtagaagggaattcgtagactttttcacttacatacgaaaggtttttttttttttttgtgcagttctcattgcaaaaataaacatttgtcntggtgtaacggttaaaaaaaaaaagggggggcggcaaaaaatacccaagggggcgaaggtacggttccccgatttttgttgaaaggggccacatcagggcgtgtttaaaaaaagcagggagggtgaaagtggatggagaagcacaggatttgagagccacctggggggttgggaaact

SEQ ID NO: 407528 - DNA, 699 bp, Homo sapiens
agctacaggtgtggaaggcatgaaaaggcaagatctgtcaggacattgcgaatcagtaaaaccagacctttgctcttgagagactcccacacgtgaaggttcttaataaactttctcacctgccagaaagtgtgaaagccttgaatgtggaccccttttgatatgcctggcattgttgcattgagttttgtcatccgtttctagaaaagataaagcaagcttattttataacttcttttcttgtttttacttactatgtcttcatcttcattaacgacaacaaccaagagtgccagaattctcttgtagcactaacccccttctctgcctccttgtctccctccgtgaaaaggcaacaggcatctgtttctttaagggccacagatctccttactgtttgtgccataactaagagttgcttgtgtgtctccacggaattccccccaccccgattgctttacataaatgtccaattaatgctagttaaaagttcttgttcatgatctgtctgaagggagagacaaagaagggaagcggagatggccccgctgctgtggccatgtcctacttctgtgatgcattaccagcaacttctttccacatgtttttgcattgtttcttcttacatttatcctctgactattgtttccttttgttccagcaacagctggaaatggtaaatttgtgttttgagccaaa

SEQ ID NO: 407529 - DNA, 1895 bp, Homo sapiens
cgcagcgtaggtgcgggaagtctgaagccggtaaacatggccgtcaccgacagcctcagccgggctgcgactgtcttggcaactgtgttgctcttgtccttcggcagcgtggccgctagtcatatcgaggatcaagcagaacaattctttagaagtggccatacaaacaactgggctgttctggtgtgtacatcccgattctggtttaattatcgacatgttgcaaataccctttctgtttatagaagtgtcaagaggctaggtattcctgacagtcacattgtcctaatgcttgcagatgatatggcctgtaatcctagaaatcccaaaccagctacagtgtttagtcacaagaatatggaactaaatgtgtatggagatgatgtggaagtggattatagaagttatgaggtaactgtggagaattttttacgggtattaactgggaggatcccacctagtactcctcggtcaaaacgtcttctttctgatgacagaagcaatattctaatttatatgacagggcatggtggaaatggtttcttaaaatttcaagattctgaagaaattaccaacatagaactcgcggatgcttttgaacaaatgtggcagaaaagacgctacaatgagctactgtttattattgatacttgccaaggagcatccatgtatgaacgattttattctcctaacataatggctctagctagtagtcaagtgggagaagattcactctcgcatcaacctgatcctgcaattggagtccatcttatggatagatacacattttatgtcttggaatttttggaagaaattaacccagctagccaaactaatatgaatgacctttttcaggtatgtcccaaaagtctgtgtgtgtctactcctggacatcgcactgatctttttcagagggatcctaaaaatgtactgataactgatttctttggaagtgtacggaaagtggaaattacaacagagactattaaattgcaacaggattcagaaatcatggaaagcagctataaggaagaccagatggatgagaaactaatggaacctctgaaatatgctgaacaacttcctgtagctcagataatacaccagaaaccgaagctgaaagactggcatcctcctgggggctttattctgggattatgggcacttattatcatggttttcttcaaaacttatggaattaagcatatgaagttcattttttagagttgatgatgaatgaagaatgcatggaggactgcaaacttggataataatttatgtcattatatatttttaaaaatgtgtttctcttgtatgaattggaaataagtataaggaaactaaatttgaatcaactattaattttataacttaaagaaaaataattgttaatgcaactgcttaatggcactaaatatattccagttttgtattttgtgtattataaaagcgaatgagacagagatcagaatacattgactgtttttgaaaatagtaatttccccttatccccttttcatttggaaaagaaacaattgtgaagacattaaattctcactaacagaagtaactttggttaattattttttgtatatcctcccaatcttttgacttatgcacatattttttcccaatatggagatcatatggaatgtactattttgtaatgtcttttttcattttacaatgtattatcaaccttttccctctcaaaaatacattgtgaatgactgcatagtattcactttatgaatatttaattcatttcacagtcttctattgttggaccacttacattgtaccaaatgttttcctttggtttattctttaatgtattaatattttactgctggtcactcatggaatcctgcagctttaattaaaagcaaagatga

SEQ ID NO: 407530 - DNA, 846 bp, Homo sapiens
acgacgatatgtaattatcatgaattattttattaatgtaaaaacctaagaaccgacaaaaccgaagctgaaagactggcatcctcctgggggctttattctgggattatgggcacttattatcatggttttcttcaaaacttatggaattaagcatatgaagttcattttttagagttgatgatgaatgaagaatgcatggaggactgcaaacttggataataatttatgtcattatatatttttaaaaatgtgtttctcttgtatgaattggaaataagtataaggaaactaaatttgaatcaactattaattttataacttaaagaaaaataattgttaatgcaactgcttaatggcactaaatatattccagttttgtattttgtgtattataaaagcgaatgagacagagatcagaatacattgactgtttttgaaaatagtaatttccccttatccccttttcatttggaaaagaaacaattgtgaagacattaaattctcactaacagaagtaactttggttaattattttttgtatatcctcccaatcttttgacttatgcacatattttttcccaatatggagatcatatggaatgtactattttgtaatgtcttttttcattttacaatgtattatcaaccttttccctctcaaaaatacattgtgaatgactgcatagtattcactttatgaatatttaattcatttcacagtcttctattgttggaccacttacattgtaccaaatgttttcctttggtttattctttaatgtattaatattttactgctggtcactcatggaatcctgcagctttaattaaaagcaaagatga

SEQ ID NO: 407531 - DNA, 1029 bp, Homo sapiens
cgcagcgtaggtgcgggaagtctgaagccggtaaacatggccgtcaccgacagcctcagccgggctgcgactgtcttggcaactgtgttgctcttgtccttcggcagcgtggccgctagtcatatcgaggatcaagcagaacaattctttagaagtggccatacaaacaactgggctgttctggtgtgtacatcccgattctggtttaattatcgacatgttgcaaataccctttctgtttatagaagtgtcaagaggctaggtattcctgacagtcacattgtcctaatgcttgcagatgatatggcctgtaatcctagaaatcccaaaccagctacagtgtttagtcacaagaatatggaactaaatgtgtatggagatgatgtggaagtggattatagaagttatgaggtaactgtggagaattttttacgggtattaactgggaggatcccacctagtactcctcggtcaaaacgtcttctttctgatgacagaagcaatattctaatttatatgacagggcatggtggaaatggtttcttaaaatttcaagattctgaagaaattaccaacatagaactcgcggatgcttttgaacaaatgtggcagaaaagacgctacaatgagctactgtttattattgatacttgccaaggagcatccatgtatgaacgattttattctcctaacataatggctctagctagtagtcaagtgggagaagattcactctcgtcccagggggcaaatttctctcgcgttaaccggatctggcatgggtcctctatggtgatccttttgtctggattggagaataccagtgcaataatatgacttgtgcaagctggtttagctacggccactgagactcggggccaatgttgcagtgcgtgataccacatagaggcaacatgaaagccacgaaaccctgactccgcgacactgtttttttttattatatataatattattcattatgtaggacgcattcgcattattacgcactatgccatagatatcacccct

SEQ ID NO: 407532 - DNA, 512 bp, Homo sapiens
  misc_feature (31)..(31): n is a, c, g, or t
  misc_feature (40)..(40): n is a, c, g, or t
  misc_feature (55)..(55): n is a, c, g, or t
taacgcaccataatatccccaataaaaaacnaaagaccantcttgagagccacanaaaccgaagctgaaagactggcatcctcctgggggctttattctgggattatgggcacttattatcatggttttcttcaaaacttatggaattaagcatatgaagttcattttttagagttgatgatgaatgaagaatgcatggaggactgcaaacttggataataatttatgtcattatatatttttaaaaatgtgtttctcttgtatgaattggaaataagtataaggaaactaaatttgaatcaactattaattttataacttaaagaaaaataattgttaatgcaactgcttaatggcactaaatatattccagttttgtattttgtgtattataaaagcgaatgagacagagatcagaatacattgactgtttttgaaaatagtaatttccccttatccccttttcatttggaaaagaaacaattgtgaagacattaaattctcactaacag

SEQ ID NO: 407533 - DNA, 517 bp, Homo sapiens
aatgcctgattgctcggaccatatggaggcctaactttggtaggaacccacctgcaacattgtctcctgaaatgaaacacaactgtttgtttaatggaactgacctgttctccaggagtaagagattttcagtaagataagaaaccgaagctgaaagactggcatcctcctgggggctttattctgggattatgggcacttattatcatggttttcttcaaaacttatggaattaagcatatgaagttcattttttagagttgatgatgaatgaagaatgcatggaggactgcaaacttggataataatttatgtcattatatatttttaaaaatgtgtttctcttgtatgaattggaaataagtataaggaaactaaatttgaatcaactattaattttataacttaaagaaaaataattgttaatgcaactgcttaatggcactaaatatattccagttttgtattttgtgtattataaaagcgaatgagacagagatcagaatacattgactgt

SEQ ID NO: 407534 - DNA, 431 bp, Homo sapiens
  misc_feature (54)..(54): n is a, c, g, or t
acataatttctacgttgtcaaaataatgggtggaccgccacagctacaaccganaaaaccgaagctgaaagactggcatcctcctgggggctttattctgggattatgggcacttattatcatggttttcttcaaaacttatggaattaagcatatgaagttcattttttagagttgatgatgaatgaagaatgcatggaggactgcaaacttggataataatttatgtcattatatatttttaaaaatgtgtttctcttgtatgaattggaaataagtataaggaaactaaatttgaatcaactattaattttataacttaaagaaaaataattgttaatgcaactgcttaatggcactaaatatattccagttttgtattttgtgtattataaaagcgaatgagacagagatcagaatacattgactgt

SEQ ID NO: 407535 - DNA, 495 bp, Homo sapiens
  misc_feature (54)..(54): n is a, c, g, or t
acataatttctacgttgtcaaaataatgggtggaccgccacagctacaaccganaaaaccgaagctgaaagactggcatcctcctgggggctttattctgggattatgggcacttattatcatggttttcttcaaaacttatggaattaagcatatgaagttcattttttagagttgatgatgaatgaagaatgcatggaggactgcaaacttggataataatttatgtcattatatatttttaaaaatgtgtttctcttgtatgaattggaaataagtataaggaaactaaatttgaatcaactattaattttataacttaaagaaaaataattgttaatgcaactgcttaatggcactaaatatattccagttttgtattttgtgtattataaaagcgaatgagacagagatcagaatacattgactgtgcctgaaaagacctcatcgccgtaactctgttgtcatttgcattatatgagggtgagaacacga

SEQ ID NO: 407536 - DNA, 4608 bp, Homo sapiens
cgcagcgtaggtgcgggaagtctgaagccggtaaacatggccgtcaccgacagcctcagccgggctgcgactgtcttggcaactgtgttgctcttgtccttcggcagcgtggccgctagtcatatcgaggatcaagcagaacaattctttagaagtggccatacaaacaactgggctgttctggtgtgtacatcccgattctggtttaattatcgacatgttgcaaataccctttctgtttatagaagtgtcaagaggctaggtattcctgacagtcacattgtcctaatgcttgcagatgatatggcctgtaatcctagaaatcccaaaccagctacagtgtttagtcacaagaatatggaactaaatgtgtatggagatgatgtggaagtggattatagaagttatgaggtaactgtggagaattttttacgggtattaactgggaggatcccacctagtactcctcggtcaaaacgtcttctttctgatgacagaagcaatattctaatttatatgacagggcatggtggaaatggtttcttaaaatttcaagattctgaagaaattaccaacatagaactcgcggatgcttttgaacaaatgtggcagaaaagacgctacaatgagctactgtttattattgatacttgccaaggagcatccatgtatgaacgattttattctcctaacataatggctctagctagtagtcaagtgggagaagattcactctcgcatcaacctgatcctgcaattggagtccatcttatggatagatacacattttatgtcttggaatttttggaagaaattaacccagctagccaaactaatatgaatgacctttttcaggtatgtcccaaaagtctgtgtgtgtctactcctggacatcgcactgatctttttcagagggatcctaaaaatgtactgataactgatttctttggaagtgtacggaaagtggaaattacaacagagactattaaattgcaacaggattcagaaatcatggaaagcagctataaggaagaccagatggatgagaaactaatggaacctctgaaatatgctgaacaacttcctgtagctcagataatacaccagaaaccgaagctgaaagactggcatcctcctgggggctttattctgggattatgggcacttattatcatggttttcttcaaaacttatggaattaagcatatgaagttcattttttagagttgatgatgaatgaagaatgcatggaggactgcaaacttggataataatttatgtcattatatatttttaaaaatgtgtttctcttgtatgaattggaaataagtataaggaaactaaatttgaatcaactattaattttataacttaaagaaaaataattgttaatgcaactgcttaatggcactaaatatattccagttttgtattttgtgtattataaaagcgaatgagacagagatcagaatacattgactgtttttgaaaatagtaatttccccttatccccttttcatttggaaaagaaacaattgtgaagacattaaattctcactaacagaagtaactttggttaattattttttgtatatcctcccaatcttttgacttatgcacatattttttcccaatatggagatcatatggaatgtactattttgtaatgtcttttttcattttacaatgtattatcaaccttttccctctcaaaaatacattgtgaatgactgcatagtattcactttatgaatatttaattcatttcacagtcttctattgttggaccacttacattgtaccaaatgttttcctttggtttattctttaatgtattaatattttactgctggtcactcatggaatcctgcagctttaattaaaagcaaagatgaaaaattggttttttaatctatggcactgacaatctccaggaccttatatgtttgttgtcagtttatttgggaaattttagacctttgataatttcacgtactgactgctcaagagaaacataccccattgtttttcatttgtaagcgttctgtgatcttctacaattggtcacgtcctcttcattttccatcttgaaagagagagccaacaaggactttatttcattctgttttaggtaaacctccttgcccactggctgtatctatactttccttgagaaaaatcccataaagtggatggacctgtgaagaaaatgtatgcttatggcctagccttcatgtctggctgatgtatcctataaggcagtaagccccttttctagtctctggtaagatgcaagagctcatatccccatcactgacattttagtttggaaataatattgagactgtgctatgaccaacccctgatgttgttttttcttttcaaacttttgcatatgagtagaggaaaagcctaaaagttaagtatttatgtctggggggataccttcaggtgtcttatctgttttatgcaagaatttatgtgttcatctttattcagtgcaaagatttttttttaaattttgtttataattgtaggtaacattaagacaactcttcctccacaagaaaacctcctaaaattaatattccttaagatttgtttttccttttgcacttataatattaccttttaattgcatgcaagattgtcatacttttcaaaaggcaaaggattgactgtgttatctccctagttagaacaaatgatattgaggctttttgccagctctgaatctttattttaattgatctttttattgatgtgttatataaatgaggaagaaaaattttgtctgattatgtgaaggatctttctgtacatgaaaagaagggaaaataaacttgcaattgaatagactgattatagtagcactgagacacaaaaagattgaccatgttgccctccagacactcatacaaggtcgtggacaccacggtgaggcggagtatttagggtggtaaaggaattatgattgttcttgagccaaagtaatttagtttgaatataatgaaacataccctgtaaagactgctagaaagtaaaaggattcgtcttcagaggttgtagaaggtgcccttcttagttaaaaccaaactgggaaaagtaatactggataaaatattcaggataaattttgcctcagcagaatttcaaagggcagttgttcctctgtttcattattgaatcttcagaatatagttaaagccaaaagcttaaaatatgttaaatgtttcacttataaccataatctttttacatagagcatactctgccttcataataactaaatcctctgcatgtggtagatgagtacgtttaggaaatattgtcagtgcaattaaatggcctacactttaaacagtatcataaaaacaaatccttaaatatattctacttgagtcacaaaagctgaacaacagaaaggtgttttgtttttgcctttctcacagtgttgtggtgagaatcagatgagatagtattttgactaaacacttctgaaattgtaaatatatggtggcattattgttcttatgtcggcttaggaggataccaaaggggaagttaatggtcacagtgcacttatgtagctttctaagctactcaatgtgattcttgttctctttgctgttctttttctcctcccccatggtgtccttcagagagaaaaggaatgtagataaatgaatccctgcagatgtgtcctgacatttcagggagggacagggtataatgatgccatcctgcaaaggcagcctgtgtgagaaaaagaaatcaaataatgtggattttaaaattacgaaagacattcatttgcagtttatgaaaggaaaatgtagtttggatacaaagctgattaaattggatcaagaaatattagaattaaatgcaaaaaataatccatgcatttatggttttgatttttatatattcccagctagttgaaaatgatgattcccacaagaagcataactcagcttgtttctgcttactgagtattttctactatggtatatattgataacatttcttccattatgtatgttgtataccagagttacagttactgtgggaatcataatttgaaattttgactcctgtgtttctggaatctttacaacaaatgttgcattaacatataacttttttcagttgactttaccaaaattaagcccatctttagtagatactgttttaacatgtgaaagaaatacgttataaacataccacaagatatggctataaaacaatgagatcagtatccatttttgctttaaagaattggccttattgcttcagtgtcacatctcatactcaagggcatttactacaaagaaagagttctccaatattgctgttctgttgctgcctgccctatttacacatgtacctgctacttaaataggaaagcctttcaattcatggacaatacaccttggtggtaaccaggcttttatttttatttttttttcttagtgtaaaaactgtactgttttggaaatgtgctgtgaaatattaggtttaactgtgtagatcctagaataaggggatttatatagatgaagttgtaaccaagaaactggttattaaaaatttatttactccaaa

SEQ ID NO: 407537 - DNA, 4661 bp, Homo sapiens
cgcagcgtaggtgcgggaagtctgaagccggtaaacatggccgtcaccgacagcctcagccgggctgcgactgtcttggcaactgtgttgctcttgtccttcggcagcgtggccgctagtcatatcgagatggagatttggaggcacagaaaagttaaagaactttcctgtttatacacctagatcaagcagaacaattctttagaagtggccatacaaacaactgggctgttctggtgtgtacatcccgattctggtttaattatcgacatgttgcaaataccctttctgtttatagaagtgtcaagaggctaggtattcctgacagtcacattgtcctaatgcttgcagatgatatggcctgtaatcctagaaatcccaaaccagctacagtgtttagtcacaagaatatggaactaaatgtgtatggagatgatgtggaagtggattatagaagttatgaggtaactgtggagaattttttacgggtattaactgggaggatcccacctagtactcctcggtcaaaacgtcttctttctgatgacagaagcaatattctaatttatatgacagggcatggtggaaatggtttcttaaaatttcaagattctgaagaaattaccaacatagaactcgcggatgcttttgaacaaatgtggcagaaaagacgctacaatgagctactgtttattattgatacttgccaaggagcatccatgtatgaacgattttattctcctaacataatggctctagctagtagtcaagtgggagaagattcactctcgcatcaacctgatcctgcaattggagtccatcttatggatagatacacattttatgtcttggaatttttggaagaaattaacccagctagccaaactaatatgaatgacctttttcaggtatgtcccaaaagtctgtgtgtgtctactcctggacatcgcactgatctttttcagagggatcctaaaaatgtactgataactgatttctttggaagtgtacggaaagtggaaattacaacagagactattaaattgcaacaggattcagaaatcatggaaagcagctataaggaagaccagatggatgagaaactaatggaacctctgaaatatgctgaacaacttcctgtagctcagataatacaccagaaaccgaagctgaaagactggcatcctcctgggggctttattctgggattatgggcacttattatcatggttttcttcaaaacttatggaattaagcatatgaagttcattttttagagttgatgatgaatgaagaatgcatggaggactgcaaacttggataataatttatgtcattatatatttttaaaaatgtgtttctcttgtatgaattggaaataagtataaggaaactaaatttgaatcaactattaattttataacttaaagaaaaataattgttaatgcaactgcttaatggcactaaatatattccagttttgtattttgtgtattataaaagcgaatgagacagagatcagaatacattgactgtttttgaaaatagtaatttccccttatccccttttcatttggaaaagaaacaattgtgaagacattaaattctcactaacagaagtaactttggttaattattttttgtatatcctcccaatcttttgacttatgcacatattttttcccaatatggagatcatatggaatgtactattttgtaatgtcttttttcattttacaatgtattatcaaccttttccctctcaaaaatacattgtgaatgactgcatagtattcactttatgaatatttaattcatttcacagtcttctattgttggaccacttacattgtaccaaatgttttcctttggtttattctttaatgtattaatattttactgctggtcactcatggaatcctgcagctttaattaaaagcaaagatgaaaaattggttttttaatctatggcactgacaatctccaggaccttatatgtttgttgtcagtttatttgggaaattttagacctttgataatttcacgtactgactgctcaagagaaacataccccattgtttttcatttgtaagcgttctgtgatcttctacaattggtcacgtcctcttcattttccatcttgaaagagagagccaacaaggactttatttcattctgttttaggtaaacctccttgcccactggctgtatctatactttccttgagaaaaatcccataaagtggatggacctgtgaagaaaatgtatgcttatggcctagccttcatgtctggctgatgtatcctataaggcagtaagccccttttctagtctctggtaagatgcaagagctcatatccccatcactgacattttagtttggaaataatattgagactgtgctatgaccaacccctgatgttgttttttcttttcaaacttttgcatatgagtagaggaaaagcctaaaagttaagtatttatgtctggggggataccttcaggtgtcttatctgttttatgcaagaatttatgtgttcatctttattcagtgcaaagatttttttttaaattttgtttataattgtaggtaacattaagacaactcttcctccacaagaaaacctcctaaaattaatattccttaagatttgtttttccttttgcacttataatattaccttttaattgcatgcaagattgtcatacttttcaaaaggcaaaggattgactgtgttatctccctagttagaacaaatgatattgaggctttttgccagctctgaatctttattttaattgatctttttattgatgtgttatataaatgaggaagaaaaattttgtctgattatgtgaaggatctttctgtacatgaaaagaagggaaaataaacttgcaattgaatagactgattatagtagcactgagacacaaaaagattgaccatgttgccctccagacactcatacaaggtcgtggacaccacggtgaggcggagtatttagggtggtaaaggaattatgattgttcttgagccaaagtaatttagtttgaatataatgaaacataccctgtaaagactgctagaaagtaaaaggattcgtcttcagaggttgtagaaggtgcccttcttagttaaaaccaaactgggaaaagtaatactggataaaatattcaggataaattttgcctcagcagaatttcaaagggcagttgttcctctgtttcattattgaatcttcagaatatagttaaagccaaaagcttaaaatatgttaaatgtttcacttataaccataatctttttacatagagcatactctgccttcataataactaaatcctctgcatgtggtagatgagtacgtttaggaaatattgtcagtgcaattaaatggcctacactttaaacagtatcataaaaacaaatccttaaatatattctacttgagtcacaaaagctgaacaacagaaaggtgttttgtttttgcctttctcacagtgttgtggtgagaatcagatgagatagtattttgactaaacacttctgaaattgtaaatatatggtggcattattgttcttatgtcggcttaggaggataccaaaggggaagttaatggtcacagtgcacttatgtagctttctaagctactcaatgtgattcttgttctctttgctgttctttttctcctcccccatggtgtccttcagagagaaaaggaatgtagataaatgaatccctgcagatgtgtcctgacatttcagggagggacagggtataatgatgccatcctgcaaaggcagcctgtgtgagaaaaagaaatcaaataatgtggattttaaaattacgaaagacattcatttgcagtttatgaaaggaaaatgtagtttggatacaaagctgattaaattggatcaagaaatattagaattaaatgcaaaaaataatccatgcatttatggttttgatttttatatattcccagctagttgaaaatgatgattcccacaagaagcataactcagcttgtttctgcttactgagtattttctactatggtatatattgataacatttcttccattatgtatgttgtataccagagttacagttactgtgggaatcataatttgaaattttgactcctgtgtttctggaatctttacaacaaatgttgcattaacatataacttttttcagttgactttaccaaaattaagcccatctttagtagatactgttttaacatgtgaaagaaatacgttataaacataccacaagatatggctataaaacaatgagatcagtatccatttttgctttaaagaattggccttattgcttcagtgtcacatctcatactcaagggcatttactacaaagaaagagttctccaatattgctgttctgttgctgcctgccctatttacacatgtacctgctacttaaataggaaagcctttcaattcatggacaatacaccttggtggtaaccaggcttttatttttatttttttttcttagtgtaaaaactgtactgttttggaaatgtgctgtgaaatattaggtttaactgtgtagatcctagaataaggggatttatatagatgaagttgtaaccaagaaactggttattaaaaatttatttactccaaa

SEQ ID NO: 407538 - DNA, 1739 bp, Homo sapiens
cgcagcgtaggtgcgggaagtctgaagccggtaaacatggccgtcaccgacagcctcagccgggctgcgactgtcttggcaactgtgttgctcttgtccttcggcagcgtggccgctagtcatatcgaggatcaagcagaacaattctttagaagtggccatacaaacaactgggctgttctggtgtgtacatcccgattctggtttaattatcgacatgttgcaaataccctttctgtttatagaagtgtcaagaggctaggtattcctgacagtcacattgtcctaatgcttgcagatgatatggcctgtaatcctagaaatcccaaaccagctacagtgtttagtcacaagaatatggaactaaatgtgtatggagatgatgtggaagtggattatagaagttatgaggtaactgtggagaattttttacgggtattaactgggaggatcccacctagtactcctcggtcaaaacgtcttctttctgatgacagaagcaatattctaatttatatgacagggcatggtggaaatggtttcttaaaatttcaagattctgaagaaattaccaacatagaactcgcggatgcttttgaacaaatgtggcagaaaagacgctacaatgagctactgtttattattgatacttgccaaggagcatccatgtatgaacgattttattctcctaacataatggctctagctagtagtcaagtgggagaagattcactctcgcatcaacctgatcctgcaattggagtccatcttatggatagatacacattttatgtcttggaatttttggaagaaattaacccagctagccaaactaatatgaatgacctttttcaggtatgtcccaaaagtctgtgtgtgtctactcctggacatcgcactgatctttttcagagggatcctaaaaatgtactgataactgatttctttggaagtgtacggaaagtggaaattacaacagagactattaaattgcaacaggattcagaaatcatggaaagcagctataaggaagaccagatggatgagaaactaatggaacctctgaaatatgctgaacaacttcctgtagctcagataatacaccagaaaccgaagctgaaagactggcatcctcctgggggctttattctgggattatgggcacttattatcatggttttcttcaaaacttatggaattaagcatatgaagttcattttttagagttgatgatgaatgaagaatgcatggaggactgcaaacttggataataatttatgtcattatatatttttaaaaatgtgtttctcttgtatgaattggaaataagtataaggaaactaaatttgaatcaactattaattttataacttaaagaaaaataattgttaatgcaactgcttaatggcactaaatatattccagttttgtattttgtgtattataaaagcgaatgagacagagatcagaatacattgactgtttttgaaaatagtaatttccccttatccccttttcatttggaaaagaaacaattgtgaagacattaaattctcactaacagaagtaactttggttaattattttttgtatatcctcccaatcttttgacttatgcacatattttttcccaatatggagatcatatggaatgtactattttgtaatgtcttttttcattttacaatgtattatcaaccttttccctctcaaaaatacattgtgaatgactgcatagt

SEQ ID NO: 407539 - DNA, 3559 bp, Homo sapiens
acgacgatatgtaattatcatgaattattttattaatgtaaaaacctaagaaccgacaaaaccgaagctgaaagactggcatcctcctgggggctttattctgggattatgggcacttattatcatggttttcttcaaaacttatggaattaagcatatgaagttcattttttagagttgatgatgaatgaagaatgcatggaggactgcaaacttggataataatttatgtcattatatatttttaaaaatgtgtttctcttgtatgaattggaaataagtataaggaaactaaatttgaatcaactattaattttataacttaaagaaaaataattgttaatgcaactgcttaatggcactaaatatattccagttttgtattttgtgtattataaaagcgaatgagacagagatcagaatacattgactgtttttgaaaatagtaatttccccttatccccttttcatttggaaaagaaacaattgtgaagacattaaattctcactaacagaagtaactttggttaattattttttgtatatcctcccaatcttttgacttatgcacatattttttcccaatatggagatcatatggaatgtactattttgtaatgtcttttttcattttacaatgtattatcaaccttttccctctcaaaaatacattgtgaatgactgcatagtattcactttatgaatatttaattcatttcacagtcttctattgttggaccacttacattgtaccaaatgttttcctttggtttattctttaatgtattaatattttactgctggtcactcatggaatcctgcagctttaattaaaagcaaagatgaaaaattggttttttaatctatggcactgacaatctccaggaccttatatgtttgttgtcagtttatttgggaaattttagacctttgataatttcacgtactgactgctcaagagaaacataccccattgtttttcatttgtaagcgttctgtgatcttctacaattggtcacgtcctcttcattttccatcttgaaagagagagccaacaaggactttatttcattctgttttaggtaaacctccttgcccactggctgtatctatactttccttgagaaaaatcccataaagtggatggacctgtgaagaaaatgtatgcttatggcctagccttcatgtctggctgatgtatcctataaggcagtaagccccttttctagtctctggtaagatgcaagagctcatatccccatcactgacattttagtttggaaataatattgagactgtgctatgaccaacccctgatgttgttttttcttttcaaacttttgcatatgagtagaggaaaagcctaaaagttaagtatttatgtctggggggataccttcaggtgtcttatctgttttatgcaagaatttatgtgttcatctttattcagtgcaaagatttttttttaaattttgtttataattgtaggtaacattaagacaactcttcctccacaagaaaacctcctaaaattaatattccttaagatttgtttttccttttgcacttataatattaccttttaattgcatgcaagattgtcatacttttcaaaaggcaaaggattgactgtgttatctccctagttagaacaaatgatattgaggctttttgccagctctgaatctttattttaattgatctttttattgatgtgttatataaatgaggaagaaaaattttgtctgattatgtgaaggatctttctgtacatgaaaagaagggaaaataaacttgcaattgaatagactgattatagtagcactgagacacaaaaagattgaccatgttgccctccagacactcatacaaggtcgtggacaccacggtgaggcggagtatttagggtggtaaaggaattatgattgttcttgagccaaagtaatttagtttgaatataatgaaacataccctgtaaagactgctagaaagtaaaaggattcgtcttcagaggttgtagaaggtgcccttcttagttaaaaccaaactgggaaaagtaatactggataaaatattcaggataaattttgcctcagcagaatttcaaagggcagttgttcctctgtttcattattgaatcttcagaatatagttaaagccaaaagcttaaaatatgttaaatgtttcacttataaccataatctttttacatagagcatactctgccttcataataactaaatcctctgcatgtggtagatgagtacgtttaggaaatattgtcagtgcaattaaatggcctacactttaaacagtatcataaaaacaaatccttaaatatattctacttgagtcacaaaagctgaacaacagaaaggtgttttgtttttgcctttctcacagtgttgtggtgagaatcagatgagatagtattttgactaaacacttctgaaattgtaaatatatggtggcattattgttcttatgtcggcttaggaggataccaaaggggaagttaatggtcacagtgcacttatgtagctttctaagctactcaatgtgattcttgttctctttgctgttctttttctcctcccccatggtgtccttcagagagaaaaggaatgtagataaatgaatccctgcagatgtgtcctgacatttcagggagggacagggtataatgatgccatcctgcaaaggcagcctgtgtgagaaaaagaaatcaaataatgtggattttaaaattacgaaagacattcatttgcagtttatgaaaggaaaatgtagtttggatacaaagctgattaaattggatcaagaaatattagaattaaatgcaaaaaataatccatgcatttatggttttgatttttatatattcccagctagttgaaaatgatgattcccacaagaagcataactcagcttgtttctgcttactgagtattttctactatggtatatattgataacatttcttccattatgtatgttgtataccagagttacagttactgtgggaatcataatttgaaattttgactcctgtgtttctggaatctttacaacaaatgttgcattaacatataacttttttcagttgactttaccaaaattaagcccatctttagtagatactgttttaacatgtgaaagaaatacgttataaacataccacaagatatggctataaaacaatgagatcagtatccatttttgctttaaagaattggccttattgcttcagtgtcacatctcatactcaagggcatttactacaaagaaagagttctccaatattgctgttctgttgctgcctgccctatttacacatgtacctgctacttaaataggaaagcctttcaattcatggacaatacaccttggtggtaaccaggcttttatttttatttttttttcttagtgtaaaaactgtactgttttggaaatgtgctgtgaaatattaggtttaactgtgtagatcctagaataaggggatttatatagatgaagttgtaaccaagaaactggttattaaaaatttatttactccaaa

SEQ ID NO: 407540 - DNA, 1564 bp, Homo sapiens
cgcagcgtaggtgcgggaagtctgaagccggtaaacatggccgtcaccgacagcctcagccgggctgcgactgtcttggcaactgtgttgctcttgtccttcggcagcgtggccgctagtcatatcgaggatcaagcagaacaattctttagaagtggccatacaaacaactgggctgttctggtgtgtacatcccgattctggtttaattatcgacatgttgcaaataccctttctgtttatagaagtgtcaagaggctaggtattcctgacagtcacattgtcctaatgcttgcagatgatatggcctgtaatcctagaaatcccaaaccagctacagtgtttagtcacaagaatatggaactaaatgtgtatggagatgatgtggaagtggattatagaagttatgaggtaactgtggagaattttttacgggtattaactgggaggatcccacctagtactcctcggtcaaaacgtcttctttctgatgacagaagcaatattctaatttatatgacagggcatggtggaaatggtttcttaaaatttcaagattctgaagaaattaccaacatagaactcgcggatgcttttgaacaaatgtggcagaaaagacgctacaatgagctactgtttattattgatacttgccaaggagcatccatgtatgaacgattttattctcctaacataatggctctagctagtagtcaagtgggagaagattcactctcgcatcaacctgatcctgcaattggagtccatcttatggatagatacacattttatgtcttggaatttttggaagaaattaacccagctagccaaactaatatgaatgacctttttcaggtatgtcccaaaagtctgtgtgtgtctactcctggacatcgcactgatctttttcagagggatcctaaaaatgtactgataactgatttctttggaagtgtacggaaagtggaaattacaacagagactattaaattgcaacaggattcagaaatcatggaaagcagctataaggaagaccagatggatgagaaactaatggaacctctgaaatatgctgaacaacttcctgtagctcagataatacaccagaaaccgaagctgaaagactggcatcctcctgggggctttattctgggattatgggcacttattatcatggttttcttcaaaacttatggaattaagcatatgaagttcattttttagagttgatgatgaatgaagaatgcatggaggactgcaaacttggataataatttatgtcattatatatttttaaaaatgtgtttctcttgtatgaattggaaataagtataaggaaactaaatttgaatcaactattaattttataacttaaagaaaaataattgttaatgcaactgcttaatggcactaaatatattccagttttgtattttgtgtattataaaagcgaatgagacagagatcagaatacattgactgtttttgaaaatagtaatttccccttatccccttttcatttggaaaagaaacaattgtgaagacattaaattctcactaacag

SEQ ID NO: 407541 - DNA, 3632 bp, Homo sapiens
tacctatgcatctccctcctccacccctacaacaaataactcgttactataaggaagaccagatggatgagaaactaatggaacctctgaaatatgctgaacaacttcctgtagctcagataatacaccagaaaccgaagctgaaagactggcatcctcctgggggctttattctgggattatgggcacttattatcatggttttcttcaaaacttatggaattaagcatatgaagttcattttttagagttgatgatgaatgaagaatgcatggaggactgcaaacttggataataatttatgtcattatatatttttaaaaatgtgtttctcttgtatgaattggaaataagtataaggaaactaaatttgaatcaactattaattttataacttaaagaaaaataattgttaatgcaactgcttaatggcactaaatatattccagttttgtattttgtgtattataaaagcgaatgagacagagatcagaatacattgactgtttttgaaaatagtaatttccccttatccccttttcatttggaaaagaaacaattgtgaagacattaaattctcactaacagaagtaactttggttaattattttttgtatatcctcccaatcttttgacttatgcacatattttttcccaatatggagatcatatggaatgtactattttgtaatgtcttttttcattttacaatgtattatcaaccttttccctctcaaaaatacattgtgaatgactgcatagtattcactttatgaatatttaattcatttcacagtcttctattgttggaccacttacattgtaccaaatgttttcctttggtttattctttaatgtattaatattttactgctggtcactcatggaatcctgcagctttaattaaaagcaaagatgaaaaattggttttttaatctatggcactgacaatctccaggaccttatatgtttgttgtcagtttatttgggaaattttagacctttgataatttcacgtactgactgctcaagagaaacataccccattgtttttcatttgtaagcgttctgtgatcttctacaattggtcacgtcctcttcattttccatcttgaaagagagagccaacaaggactttatttcattctgttttaggtaaacctccttgcccactggctgtatctatactttccttgagaaaaatcccataaagtggatggacctgtgaagaaaatgtatgcttatggcctagccttcatgtctggctgatgtatcctataaggcagtaagccccttttctagtctctggtaagatgcaagagctcatatccccatcactgacattttagtttggaaataatattgagactgtgctatgaccaacccctgatgttgttttttcttttcaaacttttgcatatgagtagaggaaaagcctaaaagttaagtatttatgtctggggggataccttcaggtgtcttatctgttttatgcaagaatttatgtgttcatctttattcagtgcaaagatttttttttaaattttgtttataattgtaggtaacattaagacaactcttcctccacaagaaaacctcctaaaattaatattccttaagatttgtttttccttttgcacttataatattaccttttaattgcatgcaagattgtcatacttttcaaaaggcaaaggattgactgtgttatctccctagttagaacaaatgatattgaggctttttgccagctctgaatctttattttaattgatctttttattgatgtgttatataaatgaggaagaaaaattttgtctgattatgtgaaggatctttctgtacatgaaaagaagggaaaataaacttgcaattgaatagactgattatagtagcactgagacacaaaaagattgaccatgttgccctccagacactcatacaaggtcgtggacaccacggtgaggcggagtatttagggtggtaaaggaattatgattgttcttgagccaaagtaatttagtttgaatataatgaaacataccctgtaaagactgctagaaagtaaaaggattcgtcttcagaggttgtagaaggtgcccttcttagttaaaaccaaactgggaaaagtaatactggataaaatattcaggataaattttgcctcagcagaatttcaaagggcagttgttcctctgtttcattattgaatcttcagaatatagttaaagccaaaagcttaaaatatgttaaatgtttcacttataaccataatctttttacatagagcatactctgccttcataataactaaatcctctgcatgtggtagatgagtacgtttaggaaatattgtcagtgcaattaaatggcctacactttaaacagtatcataaaaacaaatccttaaatatattctacttgagtcacaaaagctgaacaacagaaaggtgttttgtttttgcctttctcacagtgttgtggtgagaatcagatgagatagtattttgactaaacacttctgaaattgtaaatatatggtggcattattgttcttatgtcggcttaggaggataccaaaggggaagttaatggtcacagtgcacttatgtagctttctaagctactcaatgtgattcttgttctctttgctgttctttttctcctcccccatggtgtccttcagagagaaaaggaatgtagataaatgaatccctgcagatgtgtcctgacatttcagggagggacagggtataatgatgccatcctgcaaaggcagcctgtgtgagaaaaagaaatcaaataatgtggattttaaaattacgaaagacattcatttgcagtttatgaaaggaaaatgtagtttggatacaaagctgattaaattggatcaagaaatattagaattaaatgcaaaaaataatccatgcatttatggttttgatttttatatattcccagctagttgaaaatgatgattcccacaagaagcataactcagcttgtttctgcttactgagtattttctactatggtatatattgataacatttcttccattatgtatgttgtataccagagttacagttactgtgggaatcataatttgaaattttgactcctgtgtttctggaatctttacaacaaatgttgcattaacatataacttttttcagttgactttaccaaaattaagcccatctttagtagatactgttttaacatgtgaaagaaatacgttataaacataccacaagatatggctataaaacaatgagatcagtatccatttttgctttaaagaattggccttattgcttcagtgtcacatctcatactcaagggcatttactacaaagaaagagttctccaatattgctgttctgttgctgcctgccctatttacacatgtacctgctacttaaataggaaagcctttcaattcatggacaatacaccttggtggtaaccaggcttttatttttatttttttttcttagtgtaaaaactgtactgttttggaaatgtgctgtgaaatattaggtttaactgtgtagatcctagaataaggggatttatatagatgaagttgtaaccaagaaactggttattaaaaatttatttactccaaa

SEQ ID NO: 407542 - DNA, 3556 bp, Homo sapiens
  misc_feature (31)..(31): n is a, c, g, or t
  misc_feature (40)..(40): n is a, c, g, or t
  misc_feature (55)..(55): n is a, c, g, or t
taacgcaccataatatccccaataaaaaacnaaagaccantcttgagagccacanaaaccgaagctgaaagactggcatcctcctgggggctttattctgggattatgggcacttattatcatggttttcttcaaaacttatggaattaagcatatgaagttcattttttagagttgatgatgaatgaagaatgcatggaggactgcaaacttggataataatttatgtcattatatatttttaaaaatgtgtttctcttgtatgaattggaaataagtataaggaaactaaatttgaatcaactattaattttataacttaaagaaaaataattgttaatgcaactgcttaatggcactaaatatattccagttttgtattttgtgtattataaaagcgaatgagacagagatcagaatacattgactgtttttgaaaatagtaatttccccttatccccttttcatttggaaaagaaacaattgtgaagacattaaattctcactaacagaagtaactttggttaattattttttgtatatcctcccaatcttttgacttatgcacatattttttcccaatatggagatcatatggaatgtactattttgtaatgtcttttttcattttacaatgtattatcaaccttttccctctcaaaaatacattgtgaatgactgcatagtattcactttatgaatatttaattcatttcacagtcttctattgttggaccacttacattgtaccaaatgttttcctttggtttattctttaatgtattaatattttactgctggtcactcatggaatcctgcagctttaattaaaagcaaagatgaaaaattggttttttaatctatggcactgacaatctccaggaccttatatgtttgttgtcagtttatttgggaaattttagacctttgataatttcacgtactgactgctcaagagaaacataccccattgtttttcatttgtaagcgttctgtgatcttctacaattggtcacgtcctcttcattttccatcttgaaagagagagccaacaaggactttatttcattctgttttaggtaaacctccttgcccactggctgtatctatactttccttgagaaaaatcccataaagtggatggacctgtgaagaaaatgtatgcttatggcctagccttcatgtctggctgatgtatcctataaggcagtaagccccttttctagtctctggtaagatgcaagagctcatatccccatcactgacattttagtttggaaataatattgagactgtgctatgaccaacccctgatgttgttttttcttttcaaacttttgcatatgagtagaggaaaagcctaaaagttaagtatttatgtctggggggataccttcaggtgtcttatctgttttatgcaagaatttatgtgttcatctttattcagtgcaaagatttttttttaaattttgtttataattgtaggtaacattaagacaactcttcctccacaagaaaacctcctaaaattaatattccttaagatttgtttttccttttgcacttataatattaccttttaattgcatgcaagattgtcatacttttcaaaaggcaaaggattgactgtgttatctccctagttagaacaaatgatattgaggctttttgccagctctgaatctttattttaattgatctttttattgatgtgttatataaatgaggaagaaaaattttgtctgattatgtgaaggatctttctgtacatgaaaagaagggaaaataaacttgcaattgaatagactgattatagtagcactgagacacaaaaagattgaccatgttgccctccagacactcatacaaggtcgtggacaccacggtgaggcggagtatttagggtggtaaaggaattatgattgttcttgagccaaagtaatttagtttgaatataatgaaacataccctgtaaagactgctagaaagtaaaaggattcgtcttcagaggttgtagaaggtgcccttcttagttaaaaccaaactgggaaaagtaatactggataaaatattcaggataaattttgcctcagcagaatttcaaagggcagttgttcctctgtttcattattgaatcttcagaatatagttaaagccaaaagcttaaaatatgttaaatgtttcacttataaccataatctttttacatagagcatactctgccttcataataactaaatcctctgcatgtggtagatgagtacgtttaggaaatattgtcagtgcaattaaatggcctacactttaaacagtatcataaaaacaaatccttaaatatattctacttgagtcacaaaagctgaacaacagaaaggtgttttgtttttgcctttctcacagtgttgtggtgagaatcagatgagatagtattttgactaaacacttctgaaattgtaaatatatggtggcattattgttcttatgtcggcttaggaggataccaaaggggaagttaatggtcacagtgcacttatgtagctttctaagctactcaatgtgattcttgttctctttgctgttctttttctcctcccccatggtgtccttcagagagaaaaggaatgtagataaatgaatccctgcagatgtgtcctgacatttcagggagggacagggtataatgatgccatcctgcaaaggcagcctgtgtgagaaaaagaaatcaaataatgtggattttaaaattacgaaagacattcatttgcagtttatgaaaggaaaatgtagtttggatacaaagctgattaaattggatcaagaaatattagaattaaatgcaaaaaataatccatgcatttatggttttgatttttatatattcccagctagttgaaaatgatgattcccacaagaagcataactcagcttgtttctgcttactgagtattttctactatggtatatattgataacatttcttccattatgtatgttgtataccagagttacagttactgtgggaatcataatttgaaattttgactcctgtgtttctggaatctttacaacaaatgttgcattaacatataacttttttcagttgactttaccaaaattaagcccatctttagtagatactgttttaacatgtgaaagaaatacgttataaacataccacaagatatggctataaaacaatgagatcagtatccatttttgctttaaagaattggccttattgcttcagtgtcacatctcatactcaagggcatttactacaaagaaagagttctccaatattgctgttctgttgctgcctgccctatttacacatgtacctgctacttaaataggaaagcctttcaattcatggacaatacaccttggtggtaaccaggcttttatttttatttttttttcttagtgtaaaaactgtactgttttggaaatgtgctgtgaaatattaggtttaactgtgtagatcctagaataaggggatttatatagatgaagttgtaaccaagaaactggttattaaaaatttatttactccaaa

SEQ ID NO: 407543 - DNA, 3554 bp, Homo sapiens
  misc_feature (46)..(46): n is a, c, g, or t
ggggccgccaccagctgcgtcgcgaacgggagataagaacccttangaccacgaaaccgaagctgaaagactggcatcctcctgggggctttattctgggattatgggcacttattatcatggttttcttcaaaacttatggaattaagcatatgaagttcattttttagagttgatgatgaatgaagaatgcatggaggactgcaaacttggataataatttatgtcattatatatttttaaaaatgtgtttctcttgtatgaattggaaataagtataaggaaactaaatttgaatcaactattaattttataacttaaagaaaaataattgttaatgcaactgcttaatggcactaaatatattccagttttgtattttgtgtattataaaagcgaatgagacagagatcagaatacattgactgtttttgaaaatagtaatttccccttatccccttttcatttggaaaagaaacaattgtgaagacattaaattctcactaacagaagtaactttggttaattattttttgtatatcctcccaatcttttgacttatgcacatattttttcccaatatggagatcatatggaatgtactattttgtaatgtcttttttcattttacaatgtattatcaaccttttccctctcaaaaatacattgtgaatgactgcatagtattcactttatgaatatttaattcatttcacagtcttctattgttggaccacttacattgtaccaaatgttttcctttggtttattctttaatgtattaatattttactgctggtcactcatggaatcctgcagctttaattaaaagcaaagatgaaaaattggttttttaatctatggcactgacaatctccaggaccttatatgtttgttgtcagtttatttgggaaattttagacctttgataatttcacgtactgactgctcaagagaaacataccccattgtttttcatttgtaagcgttctgtgatcttctacaattggtcacgtcctcttcattttccatcttgaaagagagagccaacaaggactttatttcattctgttttaggtaaacctccttgcccactggctgtatctatactttccttgagaaaaatcccataaagtggatggacctgtgaagaaaatgtatgcttatggcctagccttcatgtctggctgatgtatcctataaggcagtaagccccttttctagtctctggtaagatgcaagagctcatatccccatcactgacattttagtttggaaataatattgagactgtgctatgaccaacccctgatgttgttttttcttttcaaacttttgcatatgagtagaggaaaagcctaaaagttaagtatttatgtctggggggataccttcaggtgtcttatctgttttatgcaagaatttatgtgttcatctttattcagtgcaaagatttttttttaaattttgtttataattgtaggtaacattaagacaactcttcctccacaagaaaacctcctaaaattaatattccttaagatttgtttttccttttgcacttataatattaccttttaattgcatgcaagattgtcatacttttcaaaaggcaaaggattgactgtgttatctccctagttagaacaaatgatattgaggctttttgccagctctgaatctttattttaattgatctttttattgatgtgttatataaatgaggaagaaaaattttgtctgattatgtgaaggatctttctgtacatgaaaagaagggaaaataaacttgcaattgaatagactgattatagtagcactgagacacaaaaagattgaccatgttgccctccagacactcatacaaggtcgtggacaccacggtgaggcggagtatttagggtggtaaaggaattatgattgttcttgagccaaagtaatttagtttgaatataatgaaacataccctgtaaagactgctagaaagtaaaaggattcgtcttcagaggttgtagaaggtgcccttcttagttaaaaccaaactgggaaaagtaatactggataaaatattcaggataaattttgcctcagcagaatttcaaagggcagttgttcctctgtttcattattgaatcttcagaatatagttaaagccaaaagcttaaaatatgttaaatgtttcacttataaccataatctttttacatagagcatactctgccttcataataactaaatcctctgcatgtggtagatgagtacgtttaggaaatattgtcagtgcaattaaatggcctacactttaaacagtatcataaaaacaaatccttaaatatattctacttgagtcacaaaagctgaacaacagaaaggtgttttgtttttgcctttctcacagtgttgtggtgagaatcagatgagatagtattttgactaaacacttctgaaattgtaaatatatggtggcattattgttcttatgtcggcttaggaggataccaaaggggaagttaatggtcacagtgcacttatgtagctttctaagctactcaatgtgattcttgttctctttgctgttctttttctcctcccccatggtgtccttcagagagaaaaggaatgtagataaatgaatccctgcagatgtgtcctgacatttcagggagggacagggtataatgatgccatcctgcaaaggcagcctgtgtgagaaaaagaaatcaaataatgtggattttaaaattacgaaagacattcatttgcagtttatgaaaggaaaatgtagtttggatacaaagctgattaaattggatcaagaaatattagaattaaatgcaaaaaataatccatgcatttatggttttgatttttatatattcccagctagttgaaaatgatgattcccacaagaagcataactcagcttgtttctgcttactgagtattttctactatggtatatattgataacatttcttccattatgtatgttgtataccagagttacagttactgtgggaatcataatttgaaattttgactcctgtgtttctggaatctttacaacaaatgttgcattaacatataacttttttcagttgactttaccaaaattaagcccatctttagtagatactgttttaacatgtgaaagaaatacgttataaacataccacaagatatggctataaaacaatgagatcagtatccatttttgctttaaagaattggccttattgcttcagtgtcacatctcatactcaagggcatttactacaaagaaagagttctccaatattgctgttctgttgctgcctgccctatttacacatgtacctgctacttaaataggaaagcctttcaattcatggacaatacaccttggtggtaaccaggcttttatttttatttttttttcttagtgtaaaaactgtactgttttggaaatgtgctgtgaaatattaggtttaactgtgtagatcctagaataaggggatttatatagatgaagttgtaaccaagaaactggttattaaaaatttatttactccaaa

SEQ ID NO: 407544 - DNA, 3642 bp, Homo sapiens
aatgcctgattgctcggaccatatggaggcctaactttggtaggaacccacctgcaacattgtctcctgaaatgaaacacaactgtttgtttaatggaactgacctgttctccaggagtaagagattttcagtaagataagaaaccgaagctgaaagactggcatcctcctgggggctttattctgggattatgggcacttattatcatggttttcttcaaaacttatggaattaagcatatgaagttcattttttagagttgatgatgaatgaagaatgcatggaggactgcaaacttggataataatttatgtcattatatatttttaaaaatgtgtttctcttgtatgaattggaaataagtataaggaaactaaatttgaatcaactattaattttataacttaaagaaaaataattgttaatgcaactgcttaatggcactaaatatattccagttttgtattttgtgtattataaaagcgaatgagacagagatcagaatacattgactgtttttgaaaatagtaatttccccttatccccttttcatttggaaaagaaacaattgtgaagacattaaattctcactaacagaagtaactttggttaattattttttgtatatcctcccaatcttttgacttatgcacatattttttcccaatatggagatcatatggaatgtactattttgtaatgtcttttttcattttacaatgtattatcaaccttttccctctcaaaaatacattgtgaatgactgcatagtattcactttatgaatatttaattcatttcacagtcttctattgttggaccacttacattgtaccaaatgttttcctttggtttattctttaatgtattaatattttactgctggtcactcatggaatcctgcagctttaattaaaagcaaagatgaaaaattggttttttaatctatggcactgacaatctccaggaccttatatgtttgttgtcagtttatttgggaaattttagacctttgataatttcacgtactgactgctcaagagaaacataccccattgtttttcatttgtaagcgttctgtgatcttctacaattggtcacgtcctcttcattttccatcttgaaagagagagccaacaaggactttatttcattctgttttaggtaaacctccttgcccactggctgtatctatactttccttgagaaaaatcccataaagtggatggacctgtgaagaaaatgtatgcttatggcctagccttcatgtctggctgatgtatcctataaggcagtaagccccttttctagtctctggtaagatgcaagagctcatatccccatcactgacattttagtttggaaataatattgagactgtgctatgaccaacccctgatgttgttttttcttttcaaacttttgcatatgagtagaggaaaagcctaaaagttaagtatttatgtctggggggataccttcaggtgtcttatctgttttatgcaagaatttatgtgttcatctttattcagtgcaaagatttttttttaaattttgtttataattgtaggtaacattaagacaactcttcctccacaagaaaacctcctaaaattaatattccttaagatttgtttttccttttgcacttataatattaccttttaattgcatgcaagattgtcatacttttcaaaaggcaaaggattgactgtgttatctccctagttagaacaaatgatattgaggctttttgccagctctgaatctttattttaattgatctttttattgatgtgttatataaatgaggaagaaaaattttgtctgattatgtgaaggatctttctgtacatgaaaagaagggaaaataaacttgcaattgaatagactgattatagtagcactgagacacaaaaagattgaccatgttgccctccagacactcatacaaggtcgtggacaccacggtgaggcggagtatttagggtggtaaaggaattatgattgttcttgagccaaagtaatttagtttgaatataatgaaacataccctgtaaagactgctagaaagtaaaaggattcgtcttcagaggttgtagaaggtgcccttcttagttaaaaccaaactgggaaaagtaatactggataaaatattcaggataaattttgcctcagcagaatttcaaagggcagttgttcctctgtttcattattgaatcttcagaatatagttaaagccaaaagcttaaaatatgttaaatgtttcacttataaccataatctttttacatagagcatactctgccttcataataactaaatcctctgcatgtggtagatgagtacgtttaggaaatattgtcagtgcaattaaatggcctacactttaaacagtatcataaaaacaaatccttaaatatattctacttgagtcacaaaagctgaacaacagaaaggtgttttgtttttgcctttctcacagtgttgtggtgagaatcagatgagatagtattttgactaaacacttctgaaattgtaaatatatggtggcattattgttcttatgtcggcttaggaggataccaaaggggaagttaatggtcacagtgcacttatgtagctttctaagctactcaatgtgattcttgttctctttgctgttctttttctcctcccccatggtgtccttcagagagaaaaggaatgtagataaatgaatccctgcagatgtgtcctgacatttcagggagggacagggtataatgatgccatcctgcaaaggcagcctgtgtgagaaaaagaaatcaaataatgtggattttaaaattacgaaagacattcatttgcagtttatgaaaggaaaatgtagtttggatacaaagctgattaaattggatcaagaaatattagaattaaatgcaaaaaataatccatgcatttatggttttgatttttatatattcccagctagttgaaaatgatgattcccacaagaagcataactcagcttgtttctgcttactgagtattttctactatggtatatattgataacatttcttccattatgtatgttgtataccagagttacagttactgtgggaatcataatttgaaattttgactcctgtgtttctggaatctttacaacaaatgttgcattaacatataacttttttcagttgactttaccaaaattaagcccatctttagtagatactgttttaacatgtgaaagaaatacgttataaacataccacaagatatggctataaaacaatgagatcagtatccatttttgctttaaagaattggccttattgcttcagtgtcacatctcatactcaagggcatttactacaaagaaagagttctccaatattgctgttctgttgctgcctgccctatttacacatgtacctgctacttaaataggaaagcctttcaattcatggacaatacaccttggtggtaaccaggcttttatttttatttttttttcttagtgtaaaaactgtactgttttggaaatgtgctgtgaaatattaggtttaactgtgtagatcctagaataaggggatttatatagatgaagttgtaaccaagaaactggttattaaaaatttatttactccaaa

SEQ ID NO: 407545 - DNA, 349 bp, Homo sapiens
tcatcttgggcctgtgttatcagtacatttttaggatcccacctagtactcctcggtcaaaacgtcttctttctgatgacagaagcaatattctaatttatatgacagggcatggtggaaatggtttcttaaaatttcaagattctgaagaaattaccaacatagaactcgcggatgcttttgaacaaatgtggcagaaaagacgctacaatgagctactgtttattattgatacttgccaaggagcatccatgtatgaacgattttattctcctaacataatggctctagctagtagtcaagtgggagaagattcactctcgcactctcggtatgtgcattttcccca

SEQ ID NO: 407546 - DNA, 4812 bp, Homo sapiens
cgcagcgtaggtgcgggaagtctgaagccggtaaacatggccgtcaccgacagcctcagccgggctgcgactgtcttggcaactgtgttgctcttgtccttcggcagcgtggccgctagtcatatcgaggatcaagcagaacaattctttagaagtggccatacaaacaactgggctgttctggtgtgtacatcccgattctggtttaattatcgacatgttgcaaataccctttctgtttatagaagtgtcaagaggctaggtattcctgacagtcacattgtcctaatgcttgcagatgatatggcctgtaatcctagaaatcccaaaccagctacagtgtttagtcacaagaatatggaactaaatgtgtatggagatgatgtggaagtggattatagaagttatgaggtaactgtggagaattttttacgggtattaactgggaggatcccacctagtactcctcggtcaaaacgtcttctttctgatgacagaagcaatattctaatttatatgacagggcatggtggaaatggtttcttaaaatttcaagattctgaagaaattaccaacatagaactcgcggatgcttttgaacaaatgtggcagaaaagacgctacaatgagctactgtttattattgatacttgccaaggagcatccatgtatgaacgattttattctcctaacataatggctctagctagtagtcaagtgggagaagattcactctcgcatcaacctgatcctgcaattggagtccatcttatggatagatacacattttatgtcttggaatttttggaagaaattaacccagctagccaaactaatatgaatgacctttttcaggtatgtcccaaaagtctgtgtgtgtctactcctggacatcgcactgatctttttcagagggatcctaaaaatgtactgataactgatttctttggaagtgtacggaaagtggaaattacaacagagactattaaattgcaacaggattcagaaatcatggaaagcagctataaggaagaccagatggatgagaaactaatggaacctctgaaatatgctgaacaacttcctgtagctcagataatacaccagaaaccgaagctgaaagactggcatcctcctgggggctttattctgggattatgggcacttattatcatggttttcttcaaaacttatggaattaagcatatgaagttcattttttagagttgatgatgaatgaagaatgcatggaggactgcaaacttggataataatttatgtcattatatatttttaaaaatgtgtttctcttgtatgaattggaaataagtataaggaaactaaatttgaatcaactattaattttataacttaaagaaaaataattgttaatgcaactgcttaatggcactaaatatattccagttttgtattttgtgtattataaaagcgaatgagacagagatcagaatacattgactgtttttgaaaatagtaatttccccttatccccttttcatttggaaaagaaacaattgtgaagacattaaattctcactaacagaagtaactttggttaattattttttgtatatcctcccaatcttttgacttatgcacatattttttcccaatatggagatcatatggaatgtactattttgtaatgtcttttttcattttacaatgtattatcaaccttttccctctcaaaaatacattgtgaatgactgcatagtattcactttatgaatatttaattcatttcacagtcttctattgttggaccacttacattgtaccaaatgttttcctttggtttattctttaatgtattaatattttactgctggtcactcatggaatcctgcagctttaattaaaagcaaagatgaaaaattggttttttaatctatggcactgacaatctccaggaccttatatgtttgttgtcagtttatttgggaaattttagacctttgataatttcacgtactgactgctcaagagaaacataccccattgtttttcatttgtaagcgttctgtgatcttctacaattggtcacgtcctcttcattttccatcttgaaagagagagccaacaaggactttatttcattctgttttaggtaaacctccttgcccactggctgtatctatactttccttgagaaaaatcccataaagtggatggacctgtgaagaaaatgtatgcttatggcctagccttcatgtctggctgatgtatcctataaggcagtaagccccttttctagtctctggtaagatgcaagagctcatatccccatcactgacattttagtttggaaataatattgagactgtgctatgaccaacccctgatgttgttttttcttttcaaacttttgcatatgagtagaggaaaagcctaaaagttaagtatttatgtctggggggataccttcaggtgtcttatctgttttatgcaagaatttatgtgttcatctttattcagtgcaaagatttttttttaaattttgtttataattgtaggtaacattaagacaactcttcctccacaagaaaacctcctaaaattaatattccttaagatttgtttttccttttgcacttataatattaccttttaattgcatgcaagattgtcatacttttcaaaaggcaaaggattgactgtgttatctccctagttagaacaaatgatattgaggctttttgccagctctgaatctttattttaattgatctttttattgatgtgttatataaatgaggaagaaaaattttgtctgattatgtgaaggatctttctgtacatgaaaagaagggaaaataaacttgcaattgaatagactgattatagtagcactgagacacaaaaagattgaccatgttgccctccagacactcatacaaggtcgtggacaccacggtgaggcggagtatttagggtggtaaaggaattatgattgttcttgagccaaagtaatttagtttgaatataatgaaacataccctgtaaagactgctagaaagtaaaaggattcgtcttcagaggttgtagaaggtgcccttcttagttaaaaccaaactgggaaaagtaatactggataaaatattcaggataaattttgcctcagcagaatttcaaagggcagttgttcctctgtttcattattgaatcttcagaatatagttaaagccaaaagcttaaaatatgttaaatgtttcacttataaccataatctttttacatagagcatactctgccttcataataactaaatcctctgcatgtggtagatgagtacgtttaggaaatattgtcagtgcaattaaatggcctacactttaaacagtatcataaaaacaaatccttaaatatattctacttgagtcacaaaagctgaacaacagaaaggtgttttgtttttgcctttctcacagtgttgtggtgagaatcagatgagatagtattttgactaaacacttctgaaattgtaaatatatggtggcattattgttcttatgtcggcttaggaggataccaaaggggaagttaatggtcacagtgcacttatgtagctttctaagctactcaatgtgattcttgttctctttgctgttctttttctcctcccccatggtgtccttcagagagaaaaggaatgtagataaatgaatccctgcagatgtgtcctgacatttcagggagggacagggtataatgatgccatcctgcaaaggcagcctgtgtgagaaaaagaaatcaaataatgtggattttaaaattacgaaagacattcatttgcagtttatgaaaggaaaatgtagtttggatacaaagctgattaaattggatcaagaaatattagaattaaatgcaaaaaataatccatgcatttatggttttgatttttatatattcccagctagttgaaaatgatgattcccacaagaagcataactcagcttgtttctgcttactgagtattttctactatggtatatattgataacatttcttccattatgtatgttgtataccagagttacagttactgtgggaatcataatttgaaattttgactcctgtgtttctggaatctttacaacaaatgttgcattaacatataacttttttcagttgactttaccaaaattaagcccatctttagtagatactgttttaacatgtgaaagaaatacgttataaacataccacaagatatggctataaaacaatgagatcagtatccatttttgctttaaagaattggccttattgcttcagtgtcacatctcatactcaagggcatttactacaaagaaagagttctccaatattgctgttctgttgctgcctgccctatttacacatgtacctgctacttaaataggaaagcctttcaattcatggacaatacaccttggtggtaaccaggcttttatttttatttttttttcttagtgtaaaaactgtactgttttggaaatgtgctgtgaaatattaggtttaactgtgtagatcctagaataaggggatttatatagatgaagttgtaaccaagaaactggttattaaaaatttatttactccaaaaaaaagaaaacaaatccccacaccatcgaccagcaccaaaagaggaaacagcagtcgccagacaatcacgaccaaacacaaaacacacagaggggggcgcgcggcccaagagagaattaccacaagtgggggcggggggaccaaacaaaaagacaacacgtcccaaaccggcgcacggggggcccaaaacgcgggcgggctcat

SEQ ID NO: 407547 - DNA, 4472 bp, Homo sapiens
cgcagcgtaggtgcgggaagtctgaagccggtaaacatggccgtcaccgacagcctcagccgggctgcgactgtcttggcaactgtgttgctcttgtccttcggcagcgtggccgctagtcatatcgaggatcaagcagaacaattctttagaagtggccatacaaacaactgggctgttctggtgtgtacatcccgattctggtttaattatcgacatgttgcaaataccctttctgtttatagaagtgtcaagaggctaggtattcctgacaggtaactgtggagaattttttacgggtattaactgggaggatcccacctagtactcctcggtcaaaacgtcttctttctgatgacagaagcaatattctaatttatatgacagggcatggtggaaatggtttcttaaaatttcaagattctgaagaaattaccaacatagaactcgcggatgcttttgaacaaatgtggcagaaaagacgctacaatgagctactgtttattattgatacttgccaaggagcatccatgtatgaacgattttattctcctaacataatggctctagctagtagtcaagtgggagaagattcactctcgcatcaacctgatcctgcaattggagtccatcttatggatagatacacattttatgtcttggaatttttggaagaaattaacccagctagccaaactaatatgaatgacctttttcaggtatgtcccaaaagtctgtgtgtgtctactcctggacatcgcactgatctttttcagagggatcctaaaaatgtactgataactgatttctttggaagtgtacggaaagtggaaattacaacagagactattaaattgcaacaggattcagaaatcatggaaagcagctataaggaagaccagatggatgagaaactaatggaacctctgaaatatgctgaacaacttcctgtagctcagataatacaccagaaaccgaagctgaaagactggcatcctcctgggggctttattctgggattatgggcacttattatcatggttttcttcaaaacttatggaattaagcatatgaagttcattttttagagttgatgatgaatgaagaatgcatggaggactgcaaacttggataataatttatgtcattatatatttttaaaaatgtgtttctcttgtatgaattggaaataagtataaggaaactaaatttgaatcaactattaattttataacttaaagaaaaataattgttaatgcaactgcttaatggcactaaatatattccagttttgtattttgtgtattataaaagcgaatgagacagagatcagaatacattgactgtttttgaaaatagtaatttccccttatccccttttcatttggaaaagaaacaattgtgaagacattaaattctcactaacagaagtaactttggttaattattttttgtatatcctcccaatcttttgacttatgcacatattttttcccaatatggagatcatatggaatgtactattttgtaatgtcttttttcattttacaatgtattatcaaccttttccctctcaaaaatacattgtgaatgactgcatagtattcactttatgaatatttaattcatttcacagtcttctattgttggaccacttacattgtaccaaatgttttcctttggtttattctttaatgtattaatattttactgctggtcactcatggaatcctgcagctttaattaaaagcaaagatgaaaaattggttttttaatctatggcactgacaatctccaggaccttatatgtttgttgtcagtttatttgggaaattttagacctttgataatttcacgtactgactgctcaagagaaacataccccattgtttttcatttgtaagcgttctgtgatcttctacaattggtcacgtcctcttcattttccatcttgaaagagagagccaacaaggactttatttcattctgttttaggtaaacctccttgcccactggctgtatctatactttccttgagaaaaatcccataaagtggatggacctgtgaagaaaatgtatgcttatggcctagccttcatgtctggctgatgtatcctataaggcagtaagccccttttctagtctctggtaagatgcaagagctcatatccccatcactgacattttagtttggaaataatattgagactgtgctatgaccaacccctgatgttgttttttcttttcaaacttttgcatatgagtagaggaaaagcctaaaagttaagtatttatgtctggggggataccttcaggtgtcttatctgttttatgcaagaatttatgtgttcatctttattcagtgcaaagatttttttttaaattttgtttataattgtaggtaacattaagacaactcttcctccacaagaaaacctcctaaaattaatattccttaagatttgtttttccttttgcacttataatattaccttttaattgcatgcaagattgtcatacttttcaaaaggcaaaggattgactgtgttatctccctagttagaacaaatgatattgaggctttttgccagctctgaatctttattttaattgatctttttattgatgtgttatataaatgaggaagaaaaattttgtctgattatgtgaaggatctttctgtacatgaaaagaagggaaaataaacttgcaattgaatagactgattatagtagcactgagacacaaaaagattgaccatgttgccctccagacactcatacaaggtcgtggacaccacggtgaggcggagtatttagggtggtaaaggaattatgattgttcttgagccaaagtaatttagtttgaatataatgaaacataccctgtaaagactgctagaaagtaaaaggattcgtcttcagaggttgtagaaggtgcccttcttagttaaaaccaaactgggaaaagtaatactggataaaatattcaggataaattttgcctcagcagaatttcaaagggcagttgttcctctgtttcattattgaatcttcagaatatagttaaagccaaaagcttaaaatatgttaaatgtttcacttataaccataatctttttacatagagcatactctgccttcataataactaaatcctctgcatgtggtagatgagtacgtttaggaaatattgtcagtgcaattaaatggcctacactttaaacagtatcataaaaacaaatccttaaatatattctacttgagtcacaaaagctgaacaacagaaaggtgttttgtttttgcctttctcacagtgttgtggtgagaatcagatgagatagtattttgactaaacacttctgaaattgtaaatatatggtggcattattgttcttatgtcggcttaggaggataccaaaggggaagttaatggtcacagtgcacttatgtagctttctaagctactcaatgtgattcttgttctctttgctgttctttttctcctcccccatggtgtccttcagagagaaaaggaatgtagataaatgaatccctgcagatgtgtcctgacatttcagggagggacagggtataatgatgccatcctgcaaaggcagcctgtgtgagaaaaagaaatcaaataatgtggattttaaaattacgaaagacattcatttgcagtttatgaaaggaaaatgtagtttggatacaaagctgattaaattggatcaagaaatattagaattaaatgcaaaaaataatccatgcatttatggttttgatttttatatattcccagctagttgaaaatgatgattcccacaagaagcataactcagcttgtttctgcttactgagtattttctactatggtatatattgataacatttcttccattatgtatgttgtataccagagttacagttactgtgggaatcataatttgaaattttgactcctgtgtttctggaatctttacaacaaatgttgcattaacatataacttttttcagttgactttaccaaaattaagcccatctttagtagatactgttttaacatgtgaaagaaatacgttataaacataccacaagatatggctataaaacaatgagatcagtatccatttttgctttaaagaattggccttattgcttcagtgtcacatctcatactcaagggcatttactacaaagaaagagttctccaatattgctgttctgttgctgcctgccctatttacacatgtacctgctacttaaataggaaagcctttcaattcatggacaatacaccttggtggtaaccaggcttttatttttatttttttttcttagtgtaaaaactgtactgttttggaaatgtgctgtgaaatattaggtttaactgtgtagatcctagaataaggggatttatatagatgaagttgtaaccaagaaactggttattaaaaatttatttactccaaa

SEQ ID NO: 407548 - DNA, 1483 bp, Homo sapiens
cgcagcgtaggtgcgggaagtctgaagccggtaaacatggccgtcaccgacagcctcagccgggctgcgactgtcttggcaactgtgttgctcttgtccttcggcagcgtggccgctagtcatatcgaggatcaagcagaacaattctttagaagtggccatacaaacaactgggctgttctggtgtgtacatcccgattctggtttaattatcgacatgttgcaaataccctttctgtttatagaagtgtcaagaggctaggtattcctgacagtcacattgtcctaatgcttgcagatgatatggcctgtaatcctagaaatcccaaaccagctacagtgtttagtcacaagaatatggaactaaatgtgtatggagatgatgtggaagtggattatagaagttatgaggtaactgtggagaattttttacgggtattaactgggaggatcccacctagtactcctcggtcaaaacgtcttctttctgatgacagaagcaatattctaatttatatgacagggcatggtggaaatggtttcttaaaatttcaagattctgaagaaattaccaacatagaactcgcggatgcttttgaacaaatgtggcagaaaagacgctacaatgagctactgtttattattgatacttgccaaggagcatccatgtatgaacgattttattctcctaacataatggctctagctagtagtcaagtgggagaagattcactctcgcatcaacctgatcctgcaattggagtccatcttatggatagatacacattttatgtcttggaatttttggaagaaattaacccagctagccaaactaatatgaatgacctttttcaggtatgtcccaaaagtctgtgtgtgtctactcctggacatcgcactgatctttttcagagggatcctaaaaatgtactgataactgatttctttggaagtgtacggaaagtggaaattacaacagagactattaaattgcaacaggattcagaaatcatggaaagcagctataaggaagaccagatggatgagaaactaatggaacctctgaaatatgctgaacaacttcctgtagctcagataatacaccagaaaccgaagctgaaagactggcatcctcctgggggctttattctgggattatgggcacttattatcatggttttcttcaaaacttatggaattaagcatatgaagttcattttttagagttgatgatgaatgaagaatgcatggaggactgcaaacttggataataatttatgtcattatatatttttaaaaatgtgtttctcttgtatgaattggaaataagtataaggaaactaaatttgaatcaactattaattttataacttaaagaaaaataattgttaatgcaactgcttaatggcactaaatatattccagttttgtattttgtgtattataaaagcgaatgagacagagatcagaatacattgactgt

SEQ ID NO: 407549 - DNA, 178 bp, Homo sapiens
  misc_feature (13)..(13): n is a, c, g, or t
ccacgcgtccgcnccacgcgtccggggtggcagggaggaggggacagcttcacccttggaagtcctggggtttttcctcttccttctttgtggtttctgttttgtaatttaagaagagctattcatcactgtaattattattattttctacaataaatgggacctgtgcacaggaaaa

SEQ ID NO: 407550 - DNA, 1744 bp, Homo sapiens
  misc_feature (7)..(8): n is a, c, g, or t
  misc_feature (27)..(27): n is a, c, g, or t
aaaccannctccgctaatgcaactcantatcgtgacacgttggcctacttgagagtgccctggcagctgtcggctggaaggaactggtctgctcacacttgctggcttgcgcatcaggactggctttatctcctgactcacggtgcaaaggtgcactctgcgaacgttaagtccgtccccagcgcttggaatcctacggcccccacagccggatcccctcagccttccaggtcctcaactcccgcggacgctgaacaatggcctccatggggctacaggtaatgggcatcgcgctggccgtcctgggctggctggccgtcatgctgtgctgcgcgctgcccatgtggcgcgtgacggccttcatcggcagcaacattgtcacctcgcagaccatctgggagggcctatggatgaactgcgtggtgcagagcaccggccagatgcagtgcaaggtgtacgactcgctgctggcactgccgcaggacctgcaggcggcccgcgccctcgtcatcatcagcatcatcgtggctgctctgggcgtgctgctgtccgtggtggggggcaagtgtaccaactgcctggaggatgaaagcgccaaggccaagaccatgatcgtggcgggcgtggtgttcctgttggccggccttatggtgatagtgccggtgtcctggacggcccacaacatcatccaagacttctacaatccgctggtggcctccgggcagaagcgggagatgggtgcctcgctctacgtcggctgggccgcctccggcctgctgctccttggcggggggctgctttgctgcaactgtccaccccgcacagacaagccttactccgccaagtattctgctgcccgctctgctgctgccagcaactacgtgtaaggtgccacggctccactctgttcctctctgctttgttcttccctggactgagctcagcgcaggctgtgaccccaggagggccctgccacgggccactggctgctggggactggggactgggcagagactgagccaggcaggaaggcagcagccttcagcctctctggcccactcggacaacttcccaaggccgcctcctgctagcaagaacagagtccaccctcctctggatattggggagggacggaagtgacagggtgtggtggtggagtggggagctggcttctgctggccaggatggcttaaccctgactttgggatctgcctgcatcggtgttggccactgtccccatttacattttccccactctgtctgcctgcatctcctctgttgcgggtaggccttgatatcacctctgggactgtgccttgctcaccgaaacccgcgcccaggagtatggctgaggccttgcccacccacctgcctgggaagtgcagagtggatggacgggtttagaggggaggggcgaaggtgctgtaaacaggtttgggcagtggtgggggagggggccagagaggcggctcaggttgcccagctctgtggcctcaggactctctgcctcacccgcttcagcccagggcccctggagactgatcccctctgagtcctctgccccttccaaggacactaatgagcctgggagggtggcagggaggaggggacagcttcacccttggaagtcctggggtttttcctcttccttctttgtggtttctgttttgtaatttaagaagagctattcatcactgtaattattattattttctacaataaatgggacctgtgcacaggaaaa

SEQ ID NO: 407551 - DNA, 1702 bp, Homo sapiens
gctggtaccggcccgggatgttagggatcggctggaaggaactggtctgctcacacttgctggcttgcgcatcaggactggctttatctcctgactcacggtgcaaaggtgcactctgcgaacgttaagtccgtccccagcgcttggaatcctacggcccccacagccggatcccctcagccttccaggtcctcaactcccgcggacgctgaacaatggcctccatggggctacaggtaatgggcatcgcgctggccgtcctgggctggctggccgtcatgctgtgctgcgcgctgcccatgtggcgcgtgacggccttcatcggcagcaacattgtcacctcgcagaccatctgggagggcctatggatgaactgcgtggtgcagagcaccggccagatgcagtgcaaggtgtacgactcgctgctggcactgccgcaggacctgcaggcggcccgcgccctcgtcatcatcagcatcatcgtggctgctctgggcgtgctgctgtccgtggtggggggcaagtgtaccaactgcctggaggatgaaagcgccaaggccaagaccatgatcgtggcgggcgtggtgttcctgttggccggccttatggtgatagtgccggtgtcctggacggcccacaacatcatccaagacttctacaatccgctggtggcctccgggcagaagcgggagatgggtgcctcgctctacgtcggctgggccgcctccggcctgctgctccttggcggggggctgctttgctgcaactgtccaccccgcacagacaagccttactccgccaagtattctgctgcccgctctgctgctgccagcaactacgtgtaaggtgccacggctccactctgttcctctctgctttgttcttccctggactgagctcagcgcaggctgtgaccccaggagggccctgccacgggccactggctgctggggactggggactgggcagagactgagccaggcaggaaggcagcagccttcagcctctctggcccactcggacaacttcccaaggccgcctcctgctagcaagaacagagtccaccctcctctggatattggggagggacggaagtgacagggtgtggtggtggagtggggagctggcttctgctggccaggatggcttaaccctgactttgggatctgcctgcatcggtgttggccactgtccccatttacattttccccactctgtctgcctgcatctcctctgttgcgggtaggccttgatatcacctctgggactgtgccttgctcaccgaaacccgcgcccaggagtatggctgaggccttgcccacccacctgcctgggaagtgcagagtggatggacgggtttagaggggaggggcgaaggtgctgtaaacaggtttgggcagtggtgggggagggggccagagaggcggctcaggttgcccagctctgtggcctcaggactctctgcctcacccgcttcagcccagggcccctggagactgatcccctctgagtcctctgccccttccaaggacactaatgagcctgggagggtggcagggaggaggggacagcttcacccttggaagtcctggggtttttcctcttccttctttgtggtttctgttttgtaatttaagaagagctattcatcactgtaattattattattttctacaataaatgggacctgtgcacaggaaaa

SEQ ID NO: 407552 - DNA, 1597 bp, Homo sapiens
  misc_feature (7)..(8): n is a, c, g, or t
  misc_feature (27)..(27): n is a, c, g, or t
  misc_feature (1522)..(1522): n is a, c, g, or t
  misc_feature (1524)..(1524): n is a, c, g, or t
  misc_feature (1565)..(1565): n is a, c, g, or t
aaaccannctccgctaatgcaactcantatcgtgacacgttggcctacttgagagtgccctggcagctgtcggctggaaggaactggtctgctcacacttgctggcttgcgcatcaggactggctttatctcctgactcacggtgcaaaggtgcactctgcgaacgttaagtccgtccccagcgcttggaatcctacggcccccacagccggatcccctcagccttccaggtcctcaactcccgcggacgctgaacaatggcctccatggggctacaggtaatgggcatcgcgctggccgtcctgggctggctggccgtcatgctgtgctgcgcgctgcccatgtggcgcgtgacggccttcatcggcagcaacattgtcacctcgcagaccatctgggagggcctatggatgaactgcgtggtgcagagcaccggccagatgcagtgcaaggtgtacgactcgctgctggcactgccgcaggacctgcaggcggcccgcgccctcgtcatcatcagcatcatcgtggctgctctgggcgtgctgctgtccgtggtggggggcaagtgtaccaactgcctggaggatgaaagcgccaaggccaagaccatgatcgtggcgggcgtggtgttcctgttggccggccttatggtgatagtgccggtgtcctggacggcccacaacatcatccaagacttctacaatccgctggtggcctccgggcagaagcgggagatgggtgcctcgctctacgtcggctgggccgcctccggcctgctgctccttggcggggggctgctttgctgcaactgtccaccccgcacagacaagccttactccgccaagtattctgctgcccgctctgctgctgccagcaactacgtgtaaggtgccacggctccactctgttcctctctgctttgttcttccctggactgagctcagcgcaggctgtgaccccaggagggccctgccacgggccactggctgctggggactggggactgggcagagactgagccaggcaggaaggcagcagccttcagcctctctggcccactcggacaacttcccaaggccgcctcctgctagcaagaacagagtccaccctcctctggatattggggagggacggaagtgacagggtgtggtggtggagtggggagctggcttctgctggccaggatggcttaaccctgactttgggatctgcctgcatcggtgttggccactgtccccatttacattttccccactctgtctgcctgcatctcctctgttgcgggtaggccttgatatcacctctgggactgtgccttgctcaccgaaacccgcgcccaggagtatggctgaggccttgcccacccacctgcctgggaagtgcagagtggatggacgggtttagaggggaggggcgaaggtgctgtaaacaggtttgggcagtggtgggggagggggccagagaggcggctcaggttgcccagctctgtggcctcaggactctctgcctcacccgcttcagngnggggggggtggagagggagcccgggggaggcgtctgcgggnggggaggagggtaatgagcgtgggagggtggg

SEQ ID NO: 407553 - DNA, 1597 bp, Homo sapiens
  misc_feature (7)..(8): n is a, c, g, or t
  misc_feature (27)..(27): n is a, c, g, or t
aaaccannctccgctaatgcaactcantatcgtgacacgttggcctacttgagagtgccctggcagctgtcggctggaaggaactggtctgctcacacttgctggcttgcgcatcaggactggctttatctcctgactcacggtgcaaaggtgcactctgcgaacgttaagtccgtccccagcgcttggaatcctacggcccccacagccggatcccctcagccttccaggtcctcaactcccgcggacgctgaacaatggcctccatggggctacaggtaatgggcatcgcgctggccgtcctgggctggctggccgtcatgctgtgctgcgcgctgcccatgtggcgcgtgacggccttcatcggcagcaacattgtcacctcgcagaccatctgggagggcctatggatgaactgcgtggtgcagagcaccggccagatgcagtgcaaggtgtacgactcgctgctggcactgccgcaggacctgcaggcggcccgcgccctcgtcatcatcagcatcatcgtggctgctctgggcgtgctgctgtccgtggtggggggcaagtgtaccaactgcctggaggatgaaagcgccaaggccaagaccatgatcgtggcgggcgtggtgttcctgttggccggccttatggtgatagtgccggtgtcctggacggcccacaacatcatccaagacttctacaatccgctggtggcctccgggcagaagcgggagatgggtgcctcgctctacgtcggctgggccgcctccggcctgctgctccttggcggggggctgctttgctgcaactgtccaccccgcacagacaagccttactccgccaagtattctgctgcccgctctgctgctgccagcaactacgtgtaaggtgccacggctccactctgttcctctctgctttgttcttccctggactgagctcagcgcaggctgtgaccccaggagggccctgccacgggccactggctgctggggactggggactgggcagagactgagccaggcaggaaggcagcagccttcagcctctctggcccactcggacaacttcccaaggccgcctcctgctagcaagaacagagtccaccctcctctggatattggggagggacggaagtgacagggtgtggtggtggagtggggagctggcttctgctggccaggatggcttaaccctgactttgggatctgcctgcatcggtgttggccactgtccccatttacattttccccactctgtctgcctgcatctcctctgttgcgggtaggccttgatatcacctctgggactgtgccttgctcaccgaaacccgcgcccaggagtatggctgaggccttgcccacccacctgcctgggaagtgcagagtggatggacgggtttagaggggaggggcgaaggtgctgtaaacaggtttgggcagtgggtggcagggaggaggggacagcttcacccttggaagtcctggggtttttcctcttccttctttgtggtttctgttttgtaatttaagaagagctattcatcactgtaattattattattttctacaataaatgggacctgtgcacaggaaaa

SEQ ID NO: 407554 - DNA, 1340 bp, Homo sapiens
  misc_feature (7)..(8): n is a, c, g, or t
  misc_feature (27)..(27): n is a, c, g, or t
aaaccannctccgctaatgcaactcantatcgtgacacgttggcctacttgagagtgccctggcagctgtcggctggaaggaactggtctgctcacacttgctggcttgcgcatcaggactggctttatctcctgactcacggtgcaaaggtgcactctgcgaacgttaagtccgtccccagcgcttggaatcctacggcccccacagccggatcccctcagccttccaggtcctcaactcccgcggacgctgaacaatggcctccatggggctacaggtaatgggcatcgcgctggccgtcctgggctggctggccgtcatgctgtgctgcgcgctgcccatgtggcgcgtgacggccttcatcggcagcaacattgtcacctcgcagaccatctgggagggcctatggatgaactgcgtggtgcagagcaccggccagatgcagtgcaaggtgtacgactcgctgctggcactgccgcaggacctgcaggcggcccgcgccctcgtcatcatcagcatcatcgtggctgctctgggcgtgctgctgtccgtggtggggggcaagtgtaccaactgcctggaggatgaaagcgccaaggccaagaccatgatcgtggcgggcgtggtgttcctgttggccggccttatggtgatagtgccggtgtcctggacggcccacaacatcatccaagacttctacaatccgctggtggcctccgggcagaagcgggagatgggtgcctcgctctacgtcggctgggccgcctccggcctgctgctccttggcggggggctgctttgctgcaactgtccaccccgcacagacaagccttactccgccaagtattctgctgcccgctctgctgctgccagcaactacgtgtaaggtgccacggctccactctgttcctctctgctttgttcttccctggactgagctcagcgcaggctgtgaccccaggagggccctgccacgggccactggctgctggggactggggactgggcagagactgagccaggcaggaaggcagcagccttcagcctctctggcccactcggacaacttcccaaggccgcctcctgctagcaagaacagagtccaccctcctctggatattggggagggacggaagtgacagggtgtggtggtggagtggggagctggcttctgctggccaggatggcttaaccctgactttgggatctgcctgcatcggtgttggccactgtccccatttacattttccccactctgtctgcctgcatctcctctgttgcgggtaggccttgatatcacctctgggtggtccgagcgaccgagatcctgagagtcgac

SEQ ID NO: 407555 - DNA, 1073 bp, Homo sapiens
cgcccgtgttgcgctcccgccggtgttgcgctcccgctggtggcctccgggcagaagcgggagatgggtgcctcgctctacgtcggctgggccgcctccggcctgctgctccttggcggggggctgctttgctgcaactgtccaccccgcacagacaagccttactccgccaagtattctgctgcccgctctgctgctgccagcaactacgtgtaaggtgccacggctccactctgttcctctctgctttgttcttccctggactgagctcagcgcaggctgtgaccccaggagggccctgccacgggccactggctgctggggactggggactgggcagagactgagccaggcaggaaggcagcagccttcagcctctctggcccactcggacaacttcccaaggccgcctcctgctagcaagaacagagtccaccctcctctggatattggggagggacggaagtgacagggtgtggtggtggagtggggagctggcttctgctggccaggatggcttaaccctgactttgggatctgcctgcatcggtgttggccactgtccccatttacattttccccactctgtctgcctgcatctcctctgttgcgggtaggccttgatatcacctctgggactgtgccttgctcaccgaaacccgcgcccaggagtatggctgaggccttgcccacccacctgcctgggaagtgcagagtggatggacgggtttagaggggaggggcgaaggtgctgtaaacaggtttgggcagtggtgggggagggggccagagaggcggctcaggttgcccagctctgtggcctcaggactctctgcctcacccgcttcagcccagggcccctggagactgatcccctctgagtcctctgccccttccaaggacactaatgagcctgggagggtggcagggaggaggggacagcttcacccttggaagtcctggggtttttcctcttccttctttgtggtttctgttttgtaatttaagaagagctattcatcactgtaattattattattttctacaataaatgggacctgtgcacaggaaaa

SEQ ID NO: 407556 - DNA, 908 bp, Homo sapiens
  misc_feature (7)..(8): n is a, c, g, or t
  misc_feature (27)..(27): n is a, c, g, or t
aaaccannctccgctaatgcaactcantatcgtgacacgttggcctacttgagagtgccctggcagctgtcggctggaaggaactggtctgctcacacttgctggcttgcgcatcaggactggctttatctcctgactcacggtgcaaaggtgcactctgcgaacgttaagtccgtccccagcgcttggaatcctacggcccccacagccggatcccctcagccttccaggtcctcaactcccgcggacgctgaacaatggcctccatggggctacaggtaatgggcatcgcgctggccgtcctgggctggctggccgtcatgctgtgctgcgcgctgcccatgtggcgcgtgacggccttcatcggcagcaacattgtcacctcgcagaccatctgggagggcctatggatgaactgcgtggtgcagagcaccggccagatgcagtgcaaggtgtacgactcgctgctggcactgccgcaggacctgcaggcggcccgcgccctcgtcatcatcagcatcatcgtggctgctctgggcgtgctgctgtccgtggtggggggcaagtgtaccaactgcctggaggatgaaagcgccaaggccaagaccatgatcgtggcgggcgtggtgttcctgttggccggccttatggtgatagtgccggtgtcctggacggcccacaacatcatccaagacttctacaatccgctggtggcctccgggcagaagcgggagatgggtgcctcgctctacgtcggctgggccgcctccggcctgctgctccttggcggggggctgctttgctgcaactgtccaccccgcacagacaagccttactccgccaagtattctgctgcccgtgtaattattattattttctacaataaatgggacctgtgcacaggaaaa

SEQ ID NO: 407557 - DNA, 505 bp, Homo sapiens
gctggtaccggcccgggatgttagggatcggctggaaggaactggtctgctcacacttgctggcttgcgcatcaggactggctttatctcctgactcacggtgcaaaggtgcactctgcgaacgttaagtccgtccccagcgcttggaatcctacggcccccacagccggaggggcgaaggtgctgtaaacaggtttgggcagtggtgggggagggggccagagaggcggctcaggttgcccagctctgtggcctcaggactctctgcctcacccgcttcagcccagggcccctggagactgatcccctctgagtcctctgccccttccaaggacactaatgagcctgggagggtggcagggaggaggggacagcttcacccttggaagtcctggggtttttcctcttccttctttgtggtttctgttttgtaatttaagaagagctattcatcactgtaattattattattttctacaataaatgggacctgtgcacaggaaaa

SEQ ID NO: 407558 - DNA, 321 bp, Homo sapiens
ctctgctgtcctcaagctactgtgggggagggggccagagaggcggctcaggttgcccagctctgtggcctcaggactctctgcctcacccgcttcagcccagggcccctggagactgatcccctctgagtcctctgccccttccaaggacactaatgagcctgggagggtggcagggaggaggggacagcttcacccttggaagtcctggggtttttcctcttccttctttgtggtttctgttttgtaatttaagaagagctattcatcactgtaattattattattttctacaataaatgggacctgtgcacaggaaaa

SEQ ID NO: 407559 - DNA, 472 bp, Homo sapiens
gctggtaccggcccgggatgttagggatcggctggaaggaactggtctgctcacacttgctggcttgcgcatcaggactggctttatctcctgactcacggtgcaaaggtgcactctgcgaacgttaagtccgtccccagcgcttggaatcctacggcccccacagccggatcccctcagccttccaggtcctcaactcccgcggacgctgaacaatggcctcaggactctctgcctcacccgcttcagcccagggcccctggagactgatcccctctgagtcctctgccccttccaaggacactaatgagcctgggagggtggcagggaggaggggacagcttcacccttggaagtcctggggtttttcctcttccttctttgtggtttctgttttgtaatttaagaagagctattcatcactgtaattattattattttctacaataaatgggacctgtgcacaggaaaa

SEQ ID NO: 407560 - DNA, 1619 bp, Homo sapiens
  misc_feature (7)..(8): n is a, c, g, or t
  misc_feature (27)..(27): n is a, c, g, or t
aaaccannctccgctaatgcaactcantatcgtgacacgttggcctacttgagagtgccctggcagctgtcggctggaaggaactggtctgctcacacttgctggcttgcgcatcaggactggctttatctcctgactcacggtgcaaaggtgcactctgcgaacgttaagtccgtccccagcgcttggaatcctacggcccccacagccggatcccctcagccttccaggtcctcaactcccgcggacgctgaacaatggcctccatggggctacaggtaatgggcatcgcgctggccgtcctgggctggctggccgtcatgctgtgctgcgcgctgcccatgtggcgcgtgacggccttcatcggcagcaacattgtcacctcgcagaccatctgggagggcctatggatgaactgcgtggtgcagagcaccggccagatgcagtgcaaggtgtacgactcgctgctggcactgccgcaggacctgcaggcggcccgcgccctcgtcatcatcagcatcatcgtggctgctctgggcgtgctgctgtccgtggtggggggcaagtgtaccaactgcctggaggatgaaagcgccaaggccaagaccatgatcgtggcgggcgtggtgttcctgttggccggccttatggtgatagtgccggtgtcctggacggcccacaacatcatccaagacttctacaatccgctggtggcctccgggcagaagcgggagatgggtgcctcgctctacgtcggctgggccgcctccggcctgctgctccttggcggggggctgctttgctgcaactgtccaccccgcacagacaagccttactccgccaagtattctgctgcccgctctgctgctgccagcaactacgtgtaaggtgccacggctccactctgttcctctctgctttgttcttccctggactgagctcagcgcaggctgtgaccccaggagggccctgccacgggccactggctgctggggactggggactgggcagagactgagccaggcaggaaggcagcagccttcagcctctctggcccactcggacaacttcccaaggccgcctcctgctagcaagaacagagtccaccctcctctggatattggggagggacggaagtgacagggtgtggtggtggagtggggagctggcttctgctggccaggatggcttaaccctgactttgggatctgcctgcatcggtgttggccactgtccccatttacattttccccactctgtctgcctgcatctcctctgttgcgggtaggccttgatatcacctctgggactgtgccttgctcaccgaaacccgcgcccaggagtatggctgaggccttgcccacccacctgcctgggaagtgcagagtggatggacgggtttagaggggaggggcgaaggtgctgtaaacaggtttgggcagtggggagtgtcttcatttctcaacacattgattccccaccatttgcggattcggaaaaaaaaccgaatcctactgtttagagaaatgtttttcttcctacatatacatacccattgctccctggaacttataccggttgtccacagtggtacaatccaaattgtgttacccttagtg

SEQ ID NO: 407561 - DNA, 1221 bp, Homo sapiens
  misc_feature (7)..(8): n is a, c, g, or t
  misc_feature (27)..(27): n is a, c, g, or t
  misc_feature (1194)..(1194): n is a, c, g, or t
aaaccannctccgctaatgcaactcantatcgtgacacgttggcctacttgagagtgccctggcagctgtcggctggaaggaactggtctgctcacacttgctggcttgcgcatcaggactggctttatctcctgactcacggtgcaaaggtgcactctgcgaacgttaagtccgtccccagcgcttggaatcctacggcccccacagccggatcccctcagccttccaggtcctcaactcccgcggacgctgaacaatggcctccatggggctacaggtaatgggcatcgcgctggccgtcctgggctggctggccgtcatgctgtgctgcgcgctgcccatgtggcgcgtgacggccttcatcggcagcaacattgtcacctcgcagaccatctgggagggcctatggatgaactgcgtggtgcagagcaccggccagatgcagtgcaaggtgtacgactcgctgctggcactgccgcaggacctgcaggcggcccgcgccctcgtcatcatcagcatcatcgtggctgctctgggcgtgctgctgtccgtggtggggggcaagtgtaccaactgcctggaggatgaaagcgccaaggccaagaccatgatcgtggcgggcgtggtgttcctgttggccggccttatggtgatagtgccggtgtcctggacggcccacaacatcatccaagacttctacaatccgctggtggcctccgggcagaagcgggagatgggtgcctcgctctacgtcggctgggccgcctccggcctgctgctccttggcggggggctgctttgctgcaactgtccaccccgcacagacaagccttactccgccaagtattctgctgcccgctctgctgctgccagcaactacgtgtaaggtgccacggctccactctgttcctctctgctttgttcttccctggactgagctcagcgcaggctgtgaccccaggagggccctgccacgggccactggctgctggggactggggactgggcagagactgagccaggcaggaaggcagcagccttcagcctctctggcccactcggacaacttcccaaggccgcctcctgctagcaagaacagagtccaccctcctctggatattggggagggacggaagtgacagggtgtggtggtggagtgaatccagtgtcgcactgcatcccccgagcctcantacacctccgtctgcatacccacaacc

SEQ ID NO: 407562 - DNA, 583 bp, Homo sapiens
  misc_feature (7)..(8): n is a, c, g, or t
  misc_feature (27)..(27): n is a, c, g, or t
aaaccannctccgctaatgcaactcantatcgtgacacgttggcctacttgagagtgccctggcagctgtcggctggaaggaactggtctgctcacacttgctggcttgcgcatcaggactggctttatctcctgactcacggtgcaaaggtgcactctgcgaacgttaagtccgtccccagcgcttggaatcctacggcccccacagccggatcccctcagccttccaggtcctcaactcccgcggacgctgaacaatggcctccatggggctacaggtaatgggcatcgcgctggccgtcctgggctggctggccgtcatgctgtgctgcgcgctgcccatgtggcgcgtgacggccttcatcggcagcaacattgtcacctcgcagaccatctgggagggcctatggatgaactgcgtggtgcagagcaccggccagatgcagtgcaaggtgtacgactcgctgctggcactgccgcaggacctgcaggcggcccgcgccctcgtcatcatcagcatcatcgtggctgcctctcggccgtgctgctgtccggaggtgggggccagcctacacactgcctg

SEQ ID NO: 407563 - DNA, 472 bp, Homo sapiens
  misc_feature (7)..(8): n is a, c, g, or t
  misc_feature (27)..(27): n is a, c, g, or t
aaaccannctccgctaatgcaactcantatcgtgacacgttggcctacttgagagtgccctggcagctgtcggctggaaggaactggtctgctcacacttgctggcttgcgcatcaggactggctttatctcctgactcacggtgcaaaggtgcactctgcgaacgttaagtccgtccccagcgcttggaatcctacggcccccacagccggatcccctcagccttccaggtcctcaactcccgcggacgctgaacaatggcctccatggggctacaggtaatgggcatcgcgctggccgtcctgggctggctggccgtcatgctgtgctgcgcgctgcccatgtggcgcgtgacggccttcatcggcagcaacattgtcacctcgcagaccatctgggagggcctatggatgaactgcgtgagtctggaaagctaacgtgagcggaccgctatgggttttgtctttttttc

SEQ ID NO: 407564 - DNA, 3251 bp, Homo sapiens
tgagtgacctcgcgggtgggcggggcctgggggtccgttccccaacttcctcggcgctccggactcccaagtctccgccggaccctcctttggatattcctcgtgtctccgattctgagacagagggggaagacggtggggcctccccacctgccccgcagaagatgcagttctttggccgcctggtcaataccttcagtggcgtcaccaacttgttctctaacccattccgggtgaaggaggtggctgtggccgactacacctcgagtgaccgagttcgggaggaagggcagctgattctgttccagaacactcccaaccgcacctgggactgcgtcctggtcaaccccaggaactcacagagtggattccgactcttccagctggagttggaggctgacgccctagtgaatttccatcagtattcttcccagctgctacccttctatgagagctcccctcaggtcctgcacactgaggtcctgcagcacctgaccgacctcatccgtaaccaccccagctggtcagtggcccacctggctgtggagctagggatccgcgagtgcttccatcacagccgtatcatcagctgtgccaattgcgcggagaacgaggagggctgcacacccctgcacctggcctgccgcaagggtgatggggagatcctggtggagctggtgcagtactgccacactcagatggatgtcaccgactacaagggagagaccgtcttccattatgctgtccagggtgacaattctcaggtgctgcagctccttggaaggaacgcagtggctggcctgaaccaggtgaataaccaagggctgaccccgctgcacctggcctgccagctggggaagcaggagatggtccgcgtgctgctgctgtgcaatgctcggtgcaacatcatgggccccaacggctaccccatccactcggccatgaagttctctcagaaggggtgtgcggagatgatcatcagcatggacagcagccagatccacagcaaagacccccgttacggagccagccccctccactgggccaagaacgcagagatggcccgcatgctgctgaaacggggctgcaacgtgaacagcaccagctccgcggggaacacggccctgcacgtggcggtgatgcgcaaccgcttcgactgtgccatagtgctgctgacccacggggccaacgcggatgcccgcggagagcacggcaacaccccgctgcacctggccatgtcgaaagacaacgtggagatgatcaaggccctcatcgtgttcggagcagaagtggacaccccgaatgactttggggagactcctacattcctagcctccaaaatcggcagacttgtcaccaggaaggcgatcttgactctgctgagaaccgtgggggccgaatactgcttcccacccatccacggggtccccgcggagcagggctctgcagcgccacatcatcccttctccctggaaagagctcagcccccaccgatcagcctaaacaacctagaactacaggatctcatgcacatctcacgggcccggaagccagcgttcatcctgggctccatgagggacgagaagcggacccacgaccacctgctgtgcctggatggaggaggagtgaaaggcctcatcatcatccagctcctcatcgccatcgagaaggcctcgggtgtggccaccaaggacctgtttgactgggtggcgggcaccagcactggaggcatcctggccctggccattctgcacagtaagtccatggcctacatgcgcggcatgtactttcgcatgaaggatgaggtgttccggggctccaggccctacgagtcggggcccctggaggagttcctgaagcgggagtttggggagcacaccaagatgacggacgtcaggaaacccaaggtgatgctgacagggacactgtctgaccggcagccggctgaactccacctcttccggaactacgatgctccagaaactgtccgggagcctcgtttcaaccagaacgttaacctcaggcctccagctcagccctcagaccagctggtgtggcgggcggcccgaagcagcggggcagctcctacttacttccgacccaatgggcgcttcctggacggtgggctgctggccaacaaccccacgctggatgccatgaccgagatccatgagtacaatcaggacctgatccgcaagggtcaggccaacaaggtgaagaaactctccatcgttgtctccctggggacagggaggtccccacaagtgcctgtgacctgtgtggatgtcttccgtcccagcaacccctgggagctggccaagactgtttttggggccaaggaactgggcaagatggtggtggactgttgcacggatccagacgggcgggctgtggaccgggcacgggcctggtgcgagatggtcggcatccagtacttcagattgaacccccagctggggacggacatcatgctggatgaggtcagtgacacagtgctggtcaacgccctctgggagaccgaggtctacatctatgagcaccgcgaggagttccagaagctcatccagctgctgctctcaccctgagggtccccagcctctcaccggccccagctgacctcgtccattcagcccctgccaggccaagcccagccactgccctcccgggcagatctgggcccaggcacctctgagtccatagaccaggcctgggagaatgccaagctgcctgcccgaggctggtcctgaaggcctgtctcccactaaccccgccttccagcactttctgtcattccaggctgggaaagtctagagccccctttggcccctttccctgactgtcaaggacaactgactcccccatcagctcaaacattaagggtacccgggcacaaccgtacccctgcccccagccccagcctccctgagggcctgccgggctgcctctgccccagcccccagcaagggcactcccaggcttcctggtgggtgcagcccactccctctgccctctgctccgttccctgggggctgggactaaagaaatgggtgtcccccaccccatcagctgggaaagcccaggccgcaggagtgggatgcccgttggactttgcccctcacactggcccagcccctcacactgccccaccccgagaaccctcagctctcaaaggtcactcctgggagtttcttcttcccaatggaagtggcttaagagccaaaactgaaataaatcatttggattcaagttca

SEQ ID NO: 407565 - DNA, 3176 bp, Homo sapiens
tgtttgcggaagtaggaggaagtagaagtgctgagtaagccgagacagagggggaagacggtggggcctccccacctgccccgcagaagatgcagttctttggccgcctggtcaataccttcagtggcgtcaccaacttgttctctaacccattccgggtgaaggaggtggctgtggccgactacacctcgagtgaccgagttcgggaggaagggcagctgattctgttccagaacactcccaaccgcacctgggactgcgtcctggtcaaccccaggaactcacagagtggattccgactcttccagctggagttggaggctgacgccctagtgaatttccatcagtattcttcccagctgctacccttctatgagagctcccctcaggtcctgcacactgaggtcctgcagcacctgaccgacctcatccgtaaccaccccagctggtcagtggcccacctggctgtggagctagggatccgcgagtgcttccatcacagccgtatcatcagctgtgccaattgcgcggagaacgaggagggctgcacacccctgcacctggcctgccgcaagggtgatggggagatcctggtggagctggtgcagtactgccacactcagatggatgtcaccgactacaagggagagaccgtcttccattatgctgtccagggtgacaattctcaggtgctgcagctccttggaaggaacgcagtggctggcctgaaccaggtgaataaccaagggctgaccccgctgcacctggcctgccagctggggaagcaggagatggtccgcgtgctgctgctgtgcaatgctcggtgcaacatcatgggccccaacggctaccccatccactcggccatgaagttctctcagaaggggtgtgcggagatgatcatcagcatggacagcagccagatccacagcaaagacccccgttacggagccagccccctccactgggccaagaacgcagagatggcccgcatgctgctgaaacggggctgcaacgtgaacagcaccagctccgcggggaacacggccctgcacgtggcggtgatgcgcaaccgcttcgactgtgccatagtgctgctgacccacggggccaacgcggatgcccgcggagagcacggcaacaccccgctgcacctggccatgtcgaaagacaacgtggagatgatcaaggccctcatcgtgttcggagcagaagtggacaccccgaatgactttggggagactcctacattcctagcctccaaaatcggcagacttgtcaccaggaaggcgatcttgactctgctgagaaccgtgggggccgaatactgcttcccacccatccacggggtccccgcggagcagggctctgcagcgccacatcatcccttctccctggaaagagctcagcccccaccgatcagcctaaacaacctagaactacaggatctcatgcacatctcacgggcccggaagccagcgttcatcctgggctccatgagggacgagaagcggacccacgaccacctgctgtgcctggatggaggaggagtgaaaggcctcatcatcatccagctcctcatcgccatcgagaaggcctcgggtgtggccaccaaggacctgtttgactgggtggcgggcaccagcactggaggcatcctggccctggccattctgcacagtaagtccatggcctacatgcgcggcatgtactttcgcatgaaggatgaggtgttccggggctccaggccctacgagtcggggcccctggaggagttcctgaagcgggagtttggggagcacaccaagatgacggacgtcaggaaacccaaggtgatgctgacagggacactgtctgaccggcagccggctgaactccacctcttccggaactacgatgctccagaaactgtccgggagcctcgtttcaaccagaacgttaacctcaggcctccagctcagccctcagaccagctggtgtggcgggcggcccgaagcagcggggcagctcctacttacttccgacccaatgggcgcttcctggacggtgggctgctggccaacaaccccacgctggatgccatgaccgagatccatgagtacaatcaggacctgatccgcaagggtcaggccaacaaggtgaagaaactctccatcgttgtctccctggggacagggaggtccccacaagtgcctgtgacctgtgtggatgtcttccgtcccagcaacccctgggagctggccaagactgtttttggggccaaggaactgggcaagatggtggtggactgttgcacggatccagacgggcgggctgtggaccgggcacgggcctggtgcgagatggtcggcatccagtacttcagattgaacccccagctggggacggacatcatgctggatgaggtcagtgacacagtgctggtcaacgccctctgggagaccgaggtctacatctatgagcaccgcgaggagttccagaagctcatccagctgctgctctcaccctgagggtccccagcctctcaccggccccagctgacctcgtccattcagcccctgccaggccaagcccagccactgccctcccgggcagatctgggcccaggcacctctgagtccatagaccaggcctgggagaatgccaagctgcctgcccgaggctggtcctgaaggcctgtctcccactaaccccgccttccagcactttctgtcattccaggctgggaaagtctagagccccctttggcccctttccctgactgtcaaggacaactgactcccccatcagctcaaacattaagggtacccgggcacaaccgtacccctgcccccagccccagcctccctgagggcctgccgggctgcctctgccccagcccccagcaagggcactcccaggcttcctggtgggtgcagcccactccctctgccctctgctccgttccctgggggctgggactaaagaaatgggtgtcccccaccccatcagctgggaaagcccaggccgcaggagtgggatgcccgttggactttgcccctcacactggcccagcccctcacactgccccaccccgagaaccctcagctctcaaaggtcactcctgggagtttcttcttcccaatggaagtggcttaagagccaaaactgaaataaatcatttggattcaagttca

SEQ ID NO: 407566 - DNA, 3564 bp, Homo sapiens
  misc_feature (15)..(15): n is a, c, g, or t
  misc_feature (37)..(37): n is a, c, g, or t
cgcggccgcgcgatnacggctgcgagaagacgacagnaaggtgagaaccctccagcccagggcaactgcctataatgtatgttcacatgtgctatctcctttggtcaataccacacactacaggtgaggaaactgagtctctgctgggacactgggtcaggaagcaggcagttaaggtcacctgtgcacagtggcagcacagggggacagccttctaggtagccagcctggcctgagggttctgtcacttttacctcccactcagtgttgtttctctttctttcccctccttttaagatccctccaggcccaggatctggggacaacgctggtggggagtgatctgggtgtctgtgcaggaaaccgctgcactgggtgagatgggcatgggagactgtgcctggctgaccagagacctcgttttcttccagaacagagggggaagacggtggggcctccccacctgccccgcagaagatgcagttctttggccgcctggtcaataccttcagtggcgtcaccaacttgttctctaacccattccgggtgaaggaggtggctgtggccgactacacctcgagtgaccgagttcgggaggaagggcagctgattctgttccagaacactcccaaccgcacctgggactgcgtcctggtcaaccccaggaactcacagagtggattccgactcttccagctggagttggaggctgacgccctagtgaatttccatcagtattcttcccagctgctacccttctatgagagctcccctcaggtcctgcacactgaggtcctgcagcacctgaccgacctcatccgtaaccaccccagctggtcagtggcccacctggctgtggagctagggatccgcgagtgcttccatcacagccgtatcatcagctgtgccaattgcgcggagaacgaggagggctgcacacccctgcacctggcctgccgcaagggtgatggggagatcctggtggagctggtgcagtactgccacactcagatggatgtcaccgactacaagggagagaccgtcttccattatgctgtccagggtgacaattctcaggtgctgcagctccttggaaggaacgcagtggctggcctgaaccaggtgaataaccaagggctgaccccgctgcacctggcctgccagctggggaagcaggagatggtccgcgtgctgctgctgtgcaatgctcggtgcaacatcatgggccccaacggctaccccatccactcggccatgaagttctctcagaaggggtgtgcggagatgatcatcagcatggacagcagccagatccacagcaaagacccccgttacggagccagccccctccactgggccaagaacgcagagatggcccgcatgctgctgaaacggggctgcaacgtgaacagcaccagctccgcggggaacacggccctgcacgtggcggtgatgcgcaaccgcttcgactgtgccatagtgctgctgacccacggggccaacgcggatgcccgcggagagcacggcaacaccccgctgcacctggccatgtcgaaagacaacgtggagatgatcaaggccctcatcgtgttcggagcagaagtggacaccccgaatgactttggggagactcctacattcctagcctccaaaatcggcagacttgtcaccaggaaggcgatcttgactctgctgagaaccgtgggggccgaatactgcttcccacccatccacggggtccccgcggagcagggctctgcagcgccacatcatcccttctccctggaaagagctcagcccccaccgatcagcctaaacaacctagaactacaggatctcatgcacatctcacgggcccggaagccagcgttcatcctgggctccatgagggacgagaagcggacccacgaccacctgctgtgcctggatggaggaggagtgaaaggcctcatcatcatccagctcctcatcgccatcgagaaggcctcgggtgtggccaccaaggacctgtttgactgggtggcgggcaccagcactggaggcatcctggccctggccattctgcacagtaagtccatggcctacatgcgcggcatgtactttcgcatgaaggatgaggtgttccggggctccaggccctacgagtcggggcccctggaggagttcctgaagcgggagtttggggagcacaccaagatgacggacgtcaggaaacccaaggtgatgctgacagggacactgtctgaccggcagccggctgaactccacctcttccggaactacgatgctccagaaactgtccgggagcctcgtttcaaccagaacgttaacctcaggcctccagctcagccctcagaccagctggtgtggcgggcggcccgaagcagcggggcagctcctacttacttccgacccaatgggcgcttcctggacggtgggctgctggccaacaaccccacgctggatgccatgaccgagatccatgagtacaatcaggacctgatccgcaagggtcaggccaacaaggtgaagaaactctccatcgttgtctccctggggacagggaggtccccacaagtgcctgtgacctgtgtggatgtcttccgtcccagcaacccctgggagctggccaagactgtttttggggccaaggaactgggcaagatggtggtggactgttgcacggatccagacgggcgggctgtggaccgggcacgggcctggtgcgagatggtcggcatccagtacttcagattgaacccccagctggggacggacatcatgctggatgaggtcagtgacacagtgctggtcaacgccctctgggagaccgaggtctacatctatgagcaccgcgaggagttccagaagctcatccagctgctgctctcaccctgagggtccccagcctctcaccggccccagctgacctcgtccattcagcccctgccaggccaagcccagccactgccctcccgggcagatctgggcccaggcacctctgagtccatagaccaggcctgggagaatgccaagctgcctgcccgaggctggtcctgaaggcctgtctcccactaaccccgccttccagcactttctgtcattccaggctgggaaagtctagagccccctttggcccctttccctgactgtcaaggacaactgactcccccatcagctcaaacattaagggtacccgggcacaaccgtacccctgcccccagccccagcctccctgagggcctgccgggctgcctctgccccagcccccagcaagggcactcccaggcttcctggtgggtgcagcccactccctctgccctctgctccgttccctgggggctgggactaaagaaatgggtgtcccccaccccatcagctgggaaagcccaggccgcaggagtgggatgcccgttggactttgcccctcacactggcccagcccctcacactgccccaccccgagaaccctcagctctcaaaggtcactcctgggagtttcttcttcccaatggaagtggcttaagagccaaaactgaaataaatcatttggattcaagttca

SEQ ID NO: 407567 - DNA, 3097 bp, Homo sapiens
tgtttgcggaagtaggaggaagtagaagtgctgagtaagccgagacagagggggaagacggtggggcctccccacctgccccgcagaagatgcagttctttggccgcctggtcaataccttcagtggcgtcaccaacttgttctctaacccattccgggtgaaggaggtggctgtggccgactacacctcgagtgaccgagttcgggaggaagggcagctgattctgttccagaacactcccaaccgcacctgggactgcgtcctggtcaaccccaggaactcacagagtggattccgactcttccagctggagttggaggctgacgccctagtgaatttccatcagtattcttcccagctgctacccttctatgagagctcccctcaggtcctgcacactgaggtcctgcagcacctgaccgacctcatccgtaaccaccccagctggtcagtggcccacctggctgtggagctagggatccgcgagtgcttccatcacagccgtatcatcagagtccggagtgctcaccaggtgccaggtctgtgggagctgatttctacccaccatgaaattgaattttcccaacccccacaagctgtgccaattgcgcggagaacgaggagggctgcacacccctgcacctggcctgccgcaagggtgatggggagatcctggtggagctggtgcagtactgccacactcagatggatgtcaccgactacaagggagagaccgtcttccattatgctgtccagggtgacaattctcaggtgctgcagctccttggaaggaacgcagtggctggcctgaaccaggtgaataaccaagggctgaccccgctgcacctggcctgccagctggggaagcaggagatggtccgcgtgctgctgctgtgcaatgctcggtgcaacatcatgggccccaacggctaccccatccactcggccatgaagttctctcagaaggggtgtgcggagatgatcatcagcatggacagcagccagatccacagcaaagacccccgttacggagccagccccctccactgggccaagaacgcagagatggcccgcatgctgctgaaacggggctgcaacgtgaacagcaccagctccgcggggaacacggccctgcacgtggcggtgatgcgcaaccgcttcgactgtgccatagtgctgctgacccacggggccaacgcggatgcccgcggagagcacggcaacaccccgctgcacctggccatgtcgaaagacaacgtggagatgatcaaggccctcatcgtgttcggagcagaagtggacaccccgaatgactttggggagactcctacattcctagcctccaaaatcggcagacaactacaggatctcatgcacatctcacgggcccggaagccagcgttcatcctgggctccatgagggacgagaagcggacccacgaccacctgctgtgcctggatggaggaggagtgaaaggcctcatcatcatccagctcctcatcgccatcgagaaggcctcgggtgtggccaccaaggacctgtttgactgggtggcgggcaccagcactggaggcatcctggccctggccattctgcacagtaagtccatggcctacatgcgcggcatgtactttcgcatgaaggatgaggtgttccggggctccaggccctacgagtcggggcccctggaggagttcctgaagcgggagtttggggagcacaccaagatgacggacgtcaggaaacccaaggtgatgctgacagggacactgtctgaccggcagccggctgaactccacctcttccggaactacgatgctccagaaactgtccgggagcctcgtttcaaccagaacgttaacctcaggcctccagctcagccctcagaccagctggtgtggcgggcggcccgaagcagcggggcagctcctacttacttccgacccaatgggcgcttcctggacggtgggctgctggccaacaaccccacgctggatgccatgaccgagatccatgagtacaatcaggacctgatccgcaagggtcaggccaacaaggtgaagaaactctccatcgttgtctccctggggacagggaggtccccacaagtgcctgtgacctgtgtggatgtcttccgtcccagcaacccctgggagctggccaagactgtttttggggccaaggaactgggcaagatggtggtggactgttgcacggatccagacgggcgggctgtggaccgggcacgggcctggtgcgagatggtcggcatccagtacttcagattgaacccccagctggggacggacatcatgctggatgaggtcagtgacacagtgctggtcaacgccctctgggagaccgaggtctacatctatgagcaccgcgaggagttccagaagctcatccagctgctgctctcaccctgagggtccccagcctctcaccggccccagctgacctcgtccattcagcccctgccaggccaagcccagccactgccctcccgggcagatctgggcccaggcacctctgagtccatagaccaggcctgggagaatgccaagctgcctgcccgaggctggtcctgaaggcctgtctcccactaaccccgccttccagcactttctgtcattccaggctgggaaagtctagagccccctttggcccctttccctgactgtcaaggacaactgactcccccatcagctcaaacattaagggtacccgggcacaaccgtacccctgcccccagccccagcctccctgagggcctgccgggctgcctctgccccagcccccagcaagggcactcccaggcttcctggtgggtgcagcccactccctctgccctctgctccgttccctgggggctgggactaaagaaatgggtgtcccccaccccatcagctgggaaagcccaggccgcaggagtgggatgcccgttggactttgcccctcacactggcccagcccctcacactgccccaccccgagaaccctcagctctcaaaggtcactcctgggagtttcttcttcccaatggaagtggcttaagagccaaaactgaaataaatcatttggattcaagttca

SEQ ID NO: 407568 - DNA, 3376 bp, Homo sapiens
  misc_feature (15)..(15): n is a, c, g, or t
  misc_feature (37)..(37): n is a, c, g, or t
cgcggccgcgcgatnacggctgcgagaagacgacagnaaggtgagaaccctccagcccagggcaactgcctataatgtatgttcacatgtgctatctcctttggtcaataccacacactacaggtgaggaaactgagtctctgctgggacactgggtcaggaagcaggcagttaaggtcacctgtgcacagtggcagcacagggggacagccttctaggtagccagcctggcctgagggttctgtcacttttacctcccactcagtgttgtttctctttctttcccctccttttaagatccctccaggcccaggatctggggacaacgctggtggggagtgatctgggtgtctgtgcaggaaaccgctgcactgggtgagatgggcatgggagactgtgcctggctgaccagagacctcgttttcttccagaacagagggggaagacggtggggcctccccacctgccccgcagaagatgcagttctttggccgcctggtcaataccttcagtggcgtcaccaacttgttctctaacccattccgggtgaaggaggtggctgtggccgactacacctcgagtgaccgagttcgggaggaagggcagctgattctgttccagaacactcccaaccgcacctgggactgcgtcctggtcaaccccaggaactcacagagtggattccgactcttccagctggagttggaggctgacgccctagtgaatttccatcagtattcttcccagctgctacccttctatgagagctcccctcaggtcctgcacactgaggtcctgcagcacctgaccgacctcatccgtaaccaccccagctggtcagtggcccacctggctgtggagctagggatccgcgagtgcttccatcacagccgtatcatcagctgtgccaattgcgcggagaacgaggagggctgcacacccctgcacctggcctgccgcaagggtgatggggagatcctggtggagctggtgcagtactgccacactcagatggatgtcaccgactacaagggagagaccgtcttccattatgctgtccagggtgacaattctcaggtgctgcaggtgtgcggagatgatcatcagcatggacagcagccagatccacagcaaagacccccgttacggagccagccccctccactgggccaagaacgcagagatggcccgcatgctgctgaaacggggctgcaacgtgaacagcaccagctccgcggggaacacggccctgcacgtggcggtgatgcgcaaccgcttcgactgtgccatagtgctgctgacccacggggccaacgcggatgcccgcggagagcacggcaacaccccgctgcacctggccatgtcgaaagacaacgtggagatgatcaaggccctcatcgtgttcggagcagaagtggacaccccgaatgactttggggagactcctacattcctagcctccaaaatcggcagacttgtcaccaggaaggcgatcttgactctgctgagaaccgtgggggccgaatactgcttcccacccatccacggggtccccgcggagcagggctctgcagcgccacatcatcccttctccctggaaagagctcagcccccaccgatcagcctaaacaacctagaactacaggatctcatgcacatctcacgggcccggaagccagcgttcatcctgggctccatgagggacgagaagcggacccacgaccacctgctgtgcctggatggaggaggagtgaaaggcctcatcatcatccagctcctcatcgccatcgagaaggcctcgggtgtggccaccaaggacctgtttgactgggtggcgggcaccagcactggaggcatcctggccctggccattctgcacagtaagtccatggcctacatgcgcggcatgtactttcgcatgaaggatgaggtgttccggggctccaggccctacgagtcggggcccctggaggagttcctgaagcgggagtttggggagcacaccaagatgacggacgtcaggaaacccaaggtgatgctgacagggacactgtctgaccggcagccggctgaactccacctcttccggaactacgatgctccagaaactgtccgggagcctcgtttcaaccagaacgttaacctcaggcctccagctcagccctcagaccagctggtgtggcgggcggcccgaagcagcggggcagctcctacttacttccgacccaatgggcgcttcctggacggtgggctgctggccaacaaccccacgctggatgccatgaccgagatccatgagtacaatcaggacctgatccgcaagggtcaggccaacaaggtgaagaaactctccatcgttgtctccctggggacagggaggtccccacaagtgcctgtgacctgtgtggatgtcttccgtcccagcaacccctgggagctggccaagactgtttttggggccaaggaactgggcaagatggtggtggactgttgcacggatccagacgggcgggctgtggaccgggcacgggcctggtgcgagatggtcggcatccagtacttcagattgaacccccagctggggacggacatcatgctggatgaggtcagtgacacagtgctggtcaacgccctctgggagaccgaggtctacatctatgagcaccgcgaggagttccagaagctcatccagctgctgctctcaccctgagggtccccagcctctcaccggccccagctgacctcgtccattcagcccctgccaggccaagcccagccactgccctcccgggcagatctgggcccaggcacctctgagtccatagaccaggcctgggagaatgccaagctgcctgcccgaggctggtcctgaaggcctgtctcccactaaccccgccttccagcactttctgtcattccaggctgggaaagtctagagccccctttggcccctttccctgactgtcaaggacaactgactcccccatcagctcaaacattaagggtacccgggcacaaccgtacccctgcccccagccccagcctccctgagggcctgccgggctgcctctgccccagcccccagcaagggcactcccaggcttcctggtgggtgcagcccactccctctgccctctgctccgttccctgggggctgggactaaagaaatgggtgtcccccaccccatcagctgggaaagcccaggccgcaggagtgggatgcccgttggactttgcccctcacactggcccagcccctcacactgccccaccccgagaaccctcagctctcaaaggtcactcctgggagtttcttcttcccaatggaagtggcttaagagccaaaactgaaataaatcatttggattcaagttca

SEQ ID NO: 407569 - DNA, 3267 bp, Homo sapiens
tgtttgcggaagtaggaggaagtagaagtgctgagtaagccgagacagagggggaagacggtggggcctccccacctgccccgcagaagatgcagttctttggccgcctggtcaataccttcagtggcgtcaccaacttgttctctaacccattccgggtgaaggaggtggctgtggccgactacacctcgagtgaccgagttcgggaggaagggcagctgattctgttccagaacactcccaaccgcacctgggactgcgtcctggtcaaccccaggaactcacagagtggattccgactcttccagctggagttggaggctgacgccctagtgaatttccatcagtattcttcccagctgctacccttctatgagagctcccctcaggtcctgcacactgaggtcctgcagcacctgaccgacctcatccgtaaccaccccagctggtcagtggcccacctggctgtggagctagggatccgcgagtgcttccatcacagccgtatcatcagctgtgccaattgcgcggagaacgaggagggctgcacacccctgcacctggcctgccgcaagggtgatggggagatcctggtggagctggtgcagtactgccacactcagatggatgtcaccgactacaagggagagaccgtcttccattatgctgtccagggtgacaattctcaggtgctgcagctccttggaaggaacgcagtggctggcctgaaccaggtgaataaccaagggctgaccccgctgcacctggcctgccagctggggaagcaggagatggtccgcgtgctgctgctgtgcaatgctcggtgcaacatcatgggccccaacggctaccccatccactcggccatgaagttctctcagaaggggtgtgcggagatgatcatcagcatggacagcagccagatccacagcaaagacccccgttacggagccagccccctccactgggccaagaacgcagagatggcccgcatgctgctgaaacggggctgcaacgtgaacagcaccagctccgcggggaacacggccctgcacgtggcggtgatgcgcaaccgcttcgactgtgccatagtgctgctgacccacggggccaacgcggatgcccgcggagagcacggcaacaccccgctgcacctggccatgtcgaaagacaacgtggagatgatcaaggccctcatcgtgttcggagcagaagtggacaccccgaatgactttggggagactcctacattcctagcctccaaaatcggcagacttgtcaccaggaaggcgatcttgactctgctgagaaccgtgggggccgaatactgcttcccacccatccacggggtccccgcggagcagggctctgcagcgccacatcatcccttctccctggaaagagctcagcccccaccgatcagcctaaacaacctagaactacaggatctcatgcacatctcacgggcccggaagccagcgttcatcctgggctccatgagggacgagaagcggacccacgaccacctgctgtgcctggatggaggaggagtgaaaggcctcatcatcatccagctcctcatcgccatcgagaaggcctcgggtgtggccaccaaggacctgtttgactgggtggcgggcaccagcactggaggcatcctggccctggccattctgcacagtaagtccatggcctacatgcgcggcatgtactttcgcatgaaggatgaggtgttccggggctccaggccctacgagtcggggcccctggaggagttcctgaagcgggagtttggggagcacaccaagatgacggacgtcaggaaacccaagttggaccaatctgacactcctccagcactgccggagagagcctgttttgcggggatggtgcggggagaagcccacctatcccgaacagagggtgatgctgacagggacactgtctgaccggcagccggctgaactccacctcttccggaactacgatgctccagaaactgtccgggagcctcgtttcaaccagaacgttaacctcaggcctccagctcagccctcagaccagctggtgtggcgggcggcccgaagcagcggggcagctcctacttacttccgacccaatgggcgcttcctggacggtgggctgctggccaacaaccccacgctggatgccatgaccgagatccatgagtacaatcaggacctgatccgcaagggtcaggccaacaaggtgaagaaactctccatcgttgtctccctggggacagggaggtccccacaagtgcctgtgacctgtgtggatgtcttccgtcccagcaacccctgggagctggccaagactgtttttggggccaaggaactgggcaagatggtggtggactgttgcacggatccagacgggcgggctgtggaccgggcacgggcctggtgcgagatggtcggcatccagtacttcagattgaacccccagctggggacggacatcatgctggatgaggtcagtgacacagtgctggtcaacgccctctgggagaccgaggtctacatctatgagcaccgcgaggagttccagaagctcatccagctgctgctctcaccctgagggtccccagcctctcaccggccccagctgacctcgtccattcagcccctgccaggccaagcccagccactgccctcccgggcagatctgggcccaggcacctctgagtccatagaccaggcctgggagaatgccaagctgcctgcccgaggctggtcctgaaggcctgtctcccactaaccccgccttccagcactttctgtcattccaggctgggaaagtctagagccccctttggcccctttccctgactgtcaaggacaactgactcccccatcagctcaaacattaagggtacccgggcacaaccgtacccctgcccccagccccagcctccctgagggcctgccgggctgcctctgccccagcccccagcaagggcactcccaggcttcctggtgggtgcagcccactccctctgccctctgctccgttccctgggggctgggactaaagaaatgggtgtcccccaccccatcagctgggaaagcccaggccgcaggagtgggatgcccgttggactttgcccctcacactggcccagcccctcacactgccccaccccgagaaccctcagctctcaaaggtcactcctgggagtttcttcttcccaatggaagtggcttaagagccaaaactgaaataaatcatttggattcaagttca

SEQ ID NO: 407570 - DNA, 1890 bp, Homo sapiens
agccttttgactaaatgaccttgggtgaattatggaccctcttagagcctcacctgtcaatagggaataagaattcttaggccccaggtggttattgcagcatcggctccgatgcaagaagaagcactttgtctgaagaggacacgcaaggaactacaggatctcatgcacatctcacgggcccggaagccagcgttcatcctgggctccatgagggacgagaagcggacccacgaccacctgctgtgcctggatggaggaggagtgaaaggcctcatcatcatccagctcctcatcgccatcgagaaggcctcgggtgtggccaccaaggacctgtttgactgggtggcgggcaccagcactggaggcatcctggccctggccattctgcacagtaagtccatggcctacatgcgcggcatgtactttcgcatgaaggatgaggtgttccggggctccaggccctacgagtcggggcccctggaggagttcctgaagcgggagtttggggagcacaccaagatgacggacgtcaggaaacccaaggtgatgctgacagggacactgtctgaccggcagccggctgaactccacctcttccggaactacgatgctccagaaactgtccgggagcctcgtttcaaccagaacgttaacctcaggcctccagctcagccctcagaccagctggtgtggcgggcggcccgaagcagcggggcagctcctacttacttccgacccaatgggcgcttcctggacggtgggctgctggccaacaaccccacgctggatgccatgaccgagatccatgagtacaatcaggacctgatccgcaagggtcaggccaacaaggtgaagaaactctccatcgttgtctccctggggacagggaggtccccacaagtgcctgtgacctgtgtggatgtcttccgtcccagcaacccctgggagctggccaagactgtttttggggccaaggaactgggcaagatggtggtggactgttgcacggatccagacgggcgggctgtggaccgggcacgggcctggtgcgagatggtcggcatccagtacttcagattgaacccccagctggggacggacatcatgctggatgaggtcagtgacacagtgctggtcaacgccctctgggagaccgaggtctacatctatgagcaccgcgaggagttccagaagctcatccagctgctgctctcaccctgagggtccccagcctctcaccggccccagctgacctcgtccattcagcccctgccaggccaagcccagccactgccctcccgggcagatctgggcccaggcacctctgagtccatagaccaggcctgggagaatgccaagctgcctgcccgaggctggtcctgaaggcctgtctcccactaaccccgccttccagcactttctgtcattccaggctgggaaagtctagagccccctttggcccctttccctgactgtcaaggacaactgactcccccatcagctcaaacattaagggtacccgggcacaaccgtacccctgcccccagccccagcctccctgagggcctgccgggctgcctctgccccagcccccagcaagggcactcccaggcttcctggtgggtgcagcccactccctctgccctctgctccgttccctgggggctgggactaaagaaatgggtgtcccccaccccatcagctgggaaagcccaggccgcaggagtgggatgcccgttggactttgcccctcacactggcccagcccctcacactgccccaccccgagaaccctcagctctcaaaggtcactcctgggagtttcttcttcccaatggaagtggcttaagagccaaaactgaaataaatcatttggattcaagttca

SEQ ID NO: 407571 - DNA, 1943 bp, Homo sapiens
agccttttgactaaatgaccttgggtgaattatggaccctcttagagcctcacctgtcaatagggaataagaattcttaggccccaggtggttattgcagcatcggctccgatgcaagaagaagcactttgtctgaagaggacacgcaaggaactacaggatctcatgcacatctcacgggcccggaagccagcgttcatcctgggctccatgagggacgagaagcggacatgcagaacctgagcccctgagaggtgaagtgacttgctcaaggtcacacggaccacgaccacctgctgtgcctggatggaggaggagtgaaaggcctcatcatcatccagctcctcatcgccatcgagaaggcctcgggtgtggccaccaaggacctgtttgactgggtggcgggcaccagcactggaggcatcctggccctggccattctgcacagtaagtccatggcctacatgcgcggcatgtactttcgcatgaaggatgaggtgttccggggctccaggccctacgagtcggggcccctggaggagttcctgaagcgggagtttggggagcacaccaagatgacggacgtcaggaaacccaaggtgatgctgacagggacactgtctgaccggcagccggctgaactccacctcttccggaactacgatgctccagaaactgtccgggagcctcgtttcaaccagaacgttaacctcaggcctccagctcagccctcagaccagctggtgtggcgggcggcccgaagcagcggggcagctcctacttacttccgacccaatgggcgcttcctggacggtgggctgctggccaacaaccccacgctggatgccatgaccgagatccatgagtacaatcaggacctgatccgcaagggtcaggccaacaaggtgaagaaactctccatcgttgtctccctggggacagggaggtccccacaagtgcctgtgacctgtgtggatgtcttccgtcccagcaacccctgggagctggccaagactgtttttggggccaaggaactgggcaagatggtggtggactgttgcacggatccagacgggcgggctgtggaccgggcacgggcctggtgcgagatggtcggcatccagtacttcagattgaacccccagctggggacggacatcatgctggatgaggtcagtgacacagtgctggtcaacgccctctgggagaccgaggtctacatctatgagcaccgcgaggagttccagaagctcatccagctgctgctctcaccctgagggtccccagcctctcaccggccccagctgacctcgtccattcagcccctgccaggccaagcccagccactgccctcccgggcagatctgggcccaggcacctctgagtccatagaccaggcctgggagaatgccaagctgcctgcccgaggctggtcctgaaggcctgtctcccactaaccccgccttccagcactttctgtcattccaggctgggaaagtctagagccccctttggcccctttccctgactgtcaaggacaactgactcccccatcagctcaaacattaagggtacccgggcacaaccgtacccctgcccccagccccagcctccctgagggcctgccgggctgcctctgccccagcccccagcaagggcactcccaggcttcctggtgggtgcagcccactccctctgccctctgctccgttccctgggggctgggactaaagaaatgggtgtcccccaccccatcagctgggaaagcccaggccgcaggagtgggatgcccgttggactttgcccctcacactggcccagcccctcacactgccccaccccgagaaccctcagctctcaaaggtcactcctgggagtttcttcttcccaatggaagtggcttaagagccaaaactgaaataaatcatttggattcaagttca

SEQ ID NO: 407572 - DNA, 1551 bp, Homo sapiens
gtggggtggtgggtgggagtcgtgcacttgccatcaggcaccctcaccgtgccaccagcccacccgctgcactggtctttattggctgaggacagggattgcgggggagctgtcaggcccctggcaggttagaaaagtccctggaaagtcctcagctgtacctgccttccaccaggacgaactagccagagagtgtggcttcgtgggtcctgcttctgaagagttcccagcctcccctcttcccgcacccccagcccccaacacgcacaccctgagatctggagtgcatgggttttatgccagtcccttgtgccactgggccgccctccttccccgcccctagaccagctggtgtggcgggcggcccgaagcagcggggcagctcctacttacttccgacccaatgggcgcttcctggacggtgggctgctggccaacaaccccacgctggatgccatgaccgagatccatgagtacaatcaggacctgatccgcaagggtcaggccaacaaggtgaagaaactctccatcgttgtctccctggggacagggaggtccccacaagtgcctgtgacctgtgtggatgtcttccgtcccagcaacccctgggagctggccaagactgtttttggggccaaggaactgggcaagatggtggtggactgttgcacggatccagacgggcgggctgtggaccgggcacgggcctggtgcgagatggtcggcatccagtacttcagattgaacccccagctggggacggacatcatgctggatgaggtcagtgacacagtgctggtcaacgccctctgggagaccgaggtctacatctatgagcaccgcgaggagttccagaagctcatccagctgctgctctcaccctgagggtccccagcctctcaccggccccagctgacctcgtccattcagcccctgccaggccaagcccagccactgccctcccgggcagatctgggcccaggcacctctgagtccatagaccaggcctgggagaatgccaagctgcctgcccgaggctggtcctgaaggcctgtctcccactaaccccgccttccagcactttctgtcattccaggctgggaaagtctagagccccctttggcccctttccctgactgtcaaggacaactgactcccccatcagctcaaacattaagggtacccgggcacaaccgtacccctgcccccagccccagcctccctgagggcctgccgggctgcctctgccccagcccccagcaagggcactcccaggcttcctggtgggtgcagcccactccctctgccctctgctccgttccctgggggctgggactaaagaaatgggtgtcccccaccccatcagctgggaaagcccaggccgcaggagtgggatgcccgttggactttgcccctcacactggcccagcccctcacactgccccaccccgagaaccctcagctctcaaaggtcactcctgggagtttcttcttcccaatggaagtggcttaagagccaaaactgaaataaatcatttggattcaagttca

SEQ ID NO: 407573 - DNA, 1526 bp, Homo sapiens
  misc_feature (1478)..(1478): n is a, c, g, or t
  misc_feature (1493)..(1493): n is a, c, g, or t
  misc_feature (1506)..(1506): n is a, c, g, or t
tgtttgcggaagtaggaggaagtagaagtgctgagtaagccgagacagagggggaagacggtggggcctccccacctgccccgcagaagatgcagttctttggccgcctggtcaataccttcagtggcgtcaccaacttgttctctaacccattccgggtgaaggaggtggctgtggccgactacacctcgagtgaccgagttcgggaggaagggcagctgattctgttccagaacactcccaaccgcacctgggactgcgtcctggtcaaccccaggaactcacagagtggattccgactcttccagctggagttggaggctgacgccctagtgaatttccatcagtattcttcccagctgctacccttctatgagagctcccctcaggtcctgcacactgaggtcctgcagcacctgaccgacctcatccgtaaccaccccagctggtcagtggcccacctggctgtggagctagggatccgcgagtgcttccatcacagccgtatcatcagctgtgccaattgcgcggagaacgaggagggctgcacacccctgcacctggcctgccgcaagggtgatggggagatcctggtggagctggtgcagtactgccacactcagatggatgtcaccgactacaagggagagaccgtcttccattatgctgtccagggtgacaattctcaggtgctgcagctccttggaaggaacgcagtggctggcctgaaccaggtgaataaccaagggctgaccccgctgcacctggcctgccagctggggaagcaggagatggtccgcgtgctgctgctgtgcaatgctcggtgcaacatcatgggccccaacggctaccccatccactcggccatgaagttctctcagaaggggtgtgcggagatgatcatcagcatggacagcagccagatccacagcaaagacccccgttacggagccagccccctccactgggccaagaacgcagagatggcccgcatgctgctgaaacggggctgcaacgtgaacagcaccagctccgcggggaacacggccctgcacgtggcggtgatgcgcaaccgcttcgactgtgccatagtgctgctgacccacggggccaacgcggatgcccgcggagagcacggcaacaccccgctgcacctggccatgtcgaaagacaacgtggagatgatcaaggccctcatcgtgttcggagcagaagtggacaccccgaatgactttggggagactcctacattcctagcctccaaaatcggcagacttgtcaccaggaaggcgatcttgactctgctgagaaccgtgggggccgaatactgcttcccacccatccacggggtccccgcggagcagggctctgcagcgccacatcatcccttctccctggaaagagctcagcccccaccgatcagcctaaacaacctagagcccttaaaccaacccttaaggcaggtcaacccccaaaancccaagggccccggnattgggttggggncccttggggggtttgcccgg

SEQ ID NO: 407574 - DNA, 326 bp, Homo sapiens
ctaatttttgtatttttagtagaggcagggtttcgccatgttggccaggctggtctcgaatttctgacctcaaatgatccgcccgcctcagcctctcgaagtgctgggattacatgcctgagccactgtgtctggtccatactagcctctttgagtgctgaaaggttatctctgtaacttatttagtgagaaccctccagcccagggcaactgcctataatgtatgttcacatgtgctatctcctttggtcaataccacacactacaggtgaggaaactgagtctctgctgggacactgggtcaggaagcaggcagttaaggtcac

SEQ ID NO: 407575 - DNA, 390 bp, Homo sapiens
gcaacaggtttttccattggattagcctttcaaaaaaaccaacttttgctgaattgtgcccccaaggttggaccaatctgacactcctccagcactgccggagagagcctgttttgcggggatggtgcggggagaagcccacctatcccgaacagaggttggagtgggcactctgctacccaaggccctggggtgtgaattgtggggaaagggaaaggtggatgggcgggtggctcagccgtcctcctgcctcatttctctccagggtgatgctgacagggacactgtctgaccggcagccggctgaactccacctcttccggaactacgatgctccagaaactgtccgggagcctcgtttcaaccagaacgttaacctcaggcctccag

SEQ ID NO: 407576 - DNA, 1277 bp, Homo sapiens
gcagggcgggcttcctgcaggcggcagagaccgtcagactgtcagacactagccagtctaactctcctattgcgtgcggatggggagcctgggacccagagtgggaggcatcacccaagatcatccagcaaatcggcagcagagcttgttcggaagcaaataagagaggcagcggccgggcgcagcggctcacgcctgtaatcccagcactttgggaggccgagggtcaggccaacaaggtgaagaaactctccatcgttgtctccctggggacagggaggtccccacaagtgcctgtgacctgtgtggatgtcttccgtcccagcaacccctgggagctggccaagactgtttttggggccaaggaactgggcaagatggtggtggactgttgcacggatccagacgggcgggctgtggaccgggcacgggcctggtgcgagatggtcggcatccagtacttcagattgaacccccagctggggacggacatcatgctggatgaggtcagtgacacagtgctggtcaacgccctctgggagaccgaggtctacatctatgagcaccgcgaggagttccagaagctcatccagctgctgctctcaccctgagggtccccagcctctcaccggccccagctgacctcgtccattcagcccctgccaggccaagcccagccactgccctcccgggcagatctgggcccaggcacctctgagtccatagaccaggcctgggagaatgccaagctgcctgcccgaggctggtcctgaaggcctgtctcccactaaccccgccttccagcactttctgtcattccaggctgggaaagtctagagccccctttggcccctttccctgactgtcaaggacaactgactcccccatcagctcaaacattaagggtacccgggcacaaccgtacccctgcccccagccccagcctccctgagggcctgccgggctgcctctgccccagcccccagcaagggcactcccaggcttcctggtgggtgcagcccactccctctgccctctgctccgttccctgggggctgggactaaagaaatgggtgtcccccaccccatcagctgggaaagcccaggccgcaggagtgggatgcccgttggactttgcccctcacactggcccagcccctcacactgccccaccccgagaaccctcagctctcaaaggtcactcctgggagtttcttcttcccaatggaagtggcttaagagccaaaactgaaataaatcatttggattcaagttca

SEQ ID NO: 407577 - DNA, 922 bp, Homo sapiens
gtggggtggtgggtgggagtcgtgcacttgccatcaggcaccctcaccgtgccaccagcccacccgctgcactggtctttattggctgaggacagggattgcgggggagctgtcaggcccctggcaggttagaaaagtccctggaaagtcctcagctgtacctgccttccaccaggacgaactagccagagagtgtggcttcgtgggtcctgcttctgaagagttcccagcctcccctcttcccgcacccccagcccccaacacgcacaccctgagatctggagtgcatgggttttatgccagtcccttgtgccactgggccgccctccttccccgcccctagaccagctggtgtggcgggcggcccgaagcagcggggcagctcctacttacttccgacccaatgggcgcttcctggacggtgggctgctggccaacaaccccacgctggatgccatgaccgagatccatgagtacaatcaggacctgatccgcaagggtcaggccaacaaggtgaagaaactctccatcgttgtctccctggggacagggaggtccccacaagtgcctgtgacctgtgtggatgtcttccgtcccagcaacccctgggagctggccaagactgtttttggggccaaggaaccaggcttcctggtgggtgcagcccactccctctgccctctgctccgttccctgggggctgggactaaagaaatgggtgtcccccaccccatcagctgggaaagcccaggccgcaggagtgggatgcccgttggactttgcccctcacactggcccagcccctcacactgccccaccccgagaaccctcagctctcaaaggtcactcctgggagtttcttcttcccaatggaagtggcttaagagccaaaactgaaataaatcatttggattcaagttca

SEQ ID NO: 407578 - DNA, 3014 bp, Homo sapiens
tgtttgcggaagtaggaggaagtagaagtgctgagtaagccgagacagagggggaagacggtggggcctccccacctgccccgcagaagatgcagttctttggccgcctggtcaataccttcagtggcgtcaccaacttgttctctaacccattccgggtgaaggaggtggctgtggccgactacacctcgagtgaccgagttcgggaggaagggcagctgattctgttccagaacactcccaaccgcacctgggactgcgtcctggtcaaccccaggaactcacagagtggattccgactcttccagctggagttggaggctgacgccctagtgaatttccatcagtattcttcccagctgctacccttctatgagagctcccctcaggtcctgcacactgaggtcctgcagcacctgaccgacctcatccgtaaccaccccagctggtcagtggcccacctggctgtggagctagggatccgcgagtgcttccatcacagccgtatcatcagctgtgccaattgcgcggagaacgaggagggctgcacacccctgcacctggcctgccgcaagggtgatggggagatcctggtggagctggtgcagtactgccacactcagatggatgtcaccgactacaagggagagaccgtcttccattatgctgtccagggtgacaattctcaggtgctgcagctccttggaaggaacgcagtggctggcctgaaccaggtgaataaccaagggctgaccccgctgcacctggcctgccagctggggaagcaggagatggtccgcgtgctgctgctgtgcaatgctcggtgcaacatcatgggccccaacggctaccccatccactcggccatgaagttctctcagaaggggtgtgcggagatgatcatcagcatggacagcagccagatccacagcaaagacccccgttacggagccagccccctccactgggccaagaacgcagagatggcccgcatgctgctgaaacggggctgcaacgtgaacagcaccagctccgcggggaacacggccctgcacgtggcggtgatgcgcaaccgcttcgactgtgccatagtgctgctgacccacggggccaacgcggatgcccgcggagagcacggcaacaccccgctgcacctggccatgtcgaaagacaacgtggagatgatcaaggccctcatcgtgttcggagcagaagtggacaccccgaatgactttggggagactcctacattcctagcctccaaaatcggcagacaactacaggatctcatgcacatctcacgggcccggaagccagcgttcatcctgggctccatgagggacgagaagcggacccacgaccacctgctgtgcctggatggaggaggagtgaaaggcctcatcatcatccagctcctcatcgccatcgagaaggcctcgggtgtggccaccaaggacctgtttgactgggtggcgggcaccagcactggaggcatcctggccctggccattctgcacagtaagtccatggcctacatgcgcggcatgtactttcgcatgaaggatgaggtgttccggggctccaggccctacgagtcggggcccctggaggagttcctgaagcgggagtttggggagcacaccaagatgacggacgtcaggaaacccaaggtgatgctgacagggacactgtctgaccggcagccggctgaactccacctcttccggaactacgatgctccagaaactgtccgggagcctcgtttcaaccagaacgttaacctcaggcctccagctcagccctcagaccagctggtgtggcgggcggcccgaagcagcggggcagctcctacttacttccgacccaatgggcgcttcctggacggtgggctgctggccaacaaccccacgctggatgccatgaccgagatccatgagtacaatcaggacctgatccgcaagggtcaggccaacaaggtgaagaaactctccatcgttgtctccctggggacagggaggtccccacaagtgcctgtgacctgtgtggatgtcttccgtcccagcaacccctgggagctggccaagactgtttttggggccaaggaactgggcaagatggtggtggactgttgcacggatccagacgggcgggctgtggaccgggcacgggcctggtgcgagatggtcggcatccagtacttcagattgaacccccagctggggacggacatcatgctggatgaggtcagtgacacagtgctggtcaacgccctctgggagaccgaggtctacatctatgagcaccgcgaggagttccagaagctcatccagctgctgctctcaccctgagggtccccagcctctcaccggccccagctgacctcgtccattcagcccctgccaggccaagcccagccactgccctcccgggcagatctgggcccaggcacctctgagtccatagaccaggcctgggagaatgccaagctgcctgcccgaggctggtcctgaaggcctgtctcccactaaccccgccttccagcactttctgtcattccaggctgggaaagtctagagccccctttggcccctttccctgactgtcaaggacaactgactcccccatcagctcaaacattaagggtacccgggcacaaccgtacccctgcccccagccccagcctccctgagggcctgccgggctgcctctgccccagcccccagcaagggcactcccaggcttcctggtgggtgcagcccactccctctgccctctgctccgttccctgggggctgggactaaagaaatgggtgtcccccaccccatcagctgggaaagcccaggccgcaggagtgggatgcccgttggactttgcccctcacactggcccagcccctcacactgccccaccccgagaaccctcagctctcaaaggtcactcctgggagtttcttcttcccaatggaagtggcttaagagccaaaactgaaataaatcatttggattcaagttca

SEQ ID NO: 407579 - DNA, 3222 bp, Homo sapiens
aagaactaggatgagttgcttgaggtcacaccgatgaggttgaagctggaatctgacaccagagcctgtgtgattgtcctgatgtgtaagacagagggggaagacggtggggcctccccacctgccccgcagaagatgcagttctttggccgcctggtcaataccttcagtggcgtcaccaacttgttctctaacccattccgggtgaaggaggtggctgtggccgactacacctcgagtgaccgagttcgggaggaagggcagctgattctgttccagaacactcccaaccgcacctgggactgcgtcctggtcaaccccaggaactcacagagtggattccgactcttccagctggagttggaggctgacgccctagtgaatttccatcagtattcttcccagctgctacccttctatgagagctcccctcaggtcctgcacactgaggtcctgcagcacctgaccgacctcatccgtaaccaccccagctggtcagtggcccacctggctgtggagctagggatccgcgagtgcttccatcacagccgtatcatcagctgtgccaattgcgcggagaacgaggagggctgcacacccctgcacctggcctgccgcaagggtgatggggagatcctggtggagctggtgcagtactgccacactcagatggatgtcaccgactacaagggagagaccgtcttccattatgctgtccagggtgacaattctcaggtgctgcagctccttggaaggaacgcagtggctggcctgaaccaggtgaataaccaagggctgaccccgctgcacctggcctgccagctggggaagcaggagatggtccgcgtgctgctgctgtgcaatgctcggtgcaacatcatgggccccaacggctaccccatccactcggccatgaagttctctcagaaggggtgtgcggagatgatcatcagcatggacagcagccagatccacagcaaagacccccgttacggagccagccccctccactgggccaagaacgcagagatggcccgcatgctgctgaaacggggctgcaacgtgaacagcaccagctccgcggggaacacggccctgcacgtggcggtgatgcgcaaccgcttcgactgtgccatagtgctgctgacccacggggccaacgcggatgcccgcggagagcacggcaacaccccgctgcacctggccatgtcgaaagacaacgtggagatgatcaaggccctcatcgtgttcggagcagaagtggacaccccgaatgactttggggagactcctacattcctagcctccaaaatcggcagacttgtcaccaggaaggcgatcttgactctgctgagaaccgtgggggccgaatactgcttcccacccatccacggggtccccgcggagcagggctctgcagcgccacatcatcccttctccctggaaagagctcagcccccaccgatcagcctaaacaacctagaactacaggatctcatgcacatctcacgggcccggaagccagcgttcatcctgggctccatgagggacgagaagcggacccacgaccacctgctgtgcctggatggaggaggagtgaaaggcctcatcatcatccagctcctcatcgccatcgagaaggcctcgggtgtggccaccaaggacctgtttgactgggtggcgggcaccagcactggaggcatcctggccctggccattctgcacagtaagtccatggcctacatgcgcggcatgtactttcgcatgaaggatgaggtgttccggggctccaggccctacgagtcggggcccctggaggagttcctgaagcgggagtttggggagcacaccaagatgacggacgtcaggaaacccaaggtgatgctgacagggacactgtctgaccggcagccggctgaactccacctcttccggaactacgatgctccagaaactgtccgggagcctcgtttcaaccagaacgttaacctcaggcctccagctcagccctcagaccagctggtgtggcgggcggcccgaagcagcggggcagctcctacttacttccgacccaatgggcgcttcctggacggtgggctgctggccaacaaccccacgctggatgccatgaccgagatccatgagtacaatcaggacctgatccgcaagggtcaggccaacaaggtgaagaaactctccatcgttgtctccctggggacagggaggtccccacaagtgcctgtgacctgtgtggatgtcttccgtcccagcaacccctgggagctggccaagactgtttttggggccaaggaactgggcaagatggtggtggactgttgcacggatccagacgggcgggctgtggaccgggcacgggcctggtgcgagatggtcggcatccagtacttcagattgaacccccagctggggacggacatcatgctggatgaggtcagtgacacagtgctggtcaacgccctctgggagaccgaggtctacatctatgagcaccgcgaggagttccagaagctcatccagctgctgctctcaccctgagggtccccagcctctcaccggccccagctgacctcgtccattcagcccctgccaggccaagcccagccactgccctcccgggcagatctgggcccaggcacctctgagtccatagaccaggcctgggagaatgccaagctgcctgcccgaggctggtcctgaaggcctgtctcccactaaccccgccttccagcactttctgtcattccaggctgggaaagtctagagccccctttggcccctttccctgactgtcaaggacaactgactcccccatcagctcaaacattaagggtacccgggcacaaccgtacccctgcccccagccccagcctccctgagggcctgccgggctgcctctgccccagcccccagcaagggcactcccaggcttcctggtgggtgcagcccactccctctgccctctgctccgttccctgggggctgggactaaagaaatgggtgtcccccaccccatcagctgggaaagcccaggccgcaggagtgggatgcccgttggactttgcccctcacactggcccagcccctcacactgccccaccccgagaaccctcagctctcaaaggtcactcctgggagtttcttcttcccaatggaagtggcttaagagccaaaactgaaataaatcatttggattcaagttca

SEQ ID NO: 407580 - DNA, 2770 bp, Homo sapiens
accaccgcaccccagcctgggttacagagcaagaccttgtctctaaaaaacaaaactcttccagctggagttggaggctgacgccctagtgaatttccatcagtattcttcccagctgctacccttctatgagagctcccctcaggtcctgcacactgaggtcctgcagcacctgaccgacctcatccgtaaccaccccagctggtcagtggcccacctggctgtggagctagggatccgcgagtgcttccatcacagccgtatcatcagctgtgccaattgcgcggagaacgaggagggctgcacacccctgcacctggcctgccgcaagggtgatggggagatcctggtggagctggtgcagtactgccacactcagatggatgtcaccgactacaagggagagaccgtcttccattatgctgtccagggtgacaattctcaggtgctgcagctccttggaaggaacgcagtggctggcctgaaccaggtgaataaccaagggctgaccccgctgcacctggcctgccagctggggaagcaggagatggtccgcgtgctgctgctgtgcaatgctcggtgcaacatcatgggccccaacggctaccccatccactcggccatgaagttctctcagaaggggtgtgcggagatgatcatcagcatggacagcagccagatccacagcaaagacccccgttacggagccagccccctccactgggccaagaacgcagagatggcccgcatgctgctgaaacggggctgcaacgtgaacagcaccagctccgcggggaacacggccctgcacgtggcggtgatgcgcaaccgcttcgactgtgccatagtgctgctgacccacggggccaacgcggatgcccgcggagagcacggcaacaccccgctgcacctggccatgtcgaaagacaacgtggagatgatcaaggccctcatcgtgttcggagcagaagtggacaccccgaatgactttggggagactcctacattcctagcctccaaaatcggcagacaactacaggatctcatgcacatctcacgggcccggaagccagcgttcatcctgggctccatgagggacgagaagcggacccacgaccacctgctgtgcctggatggaggaggagtgaaaggcctcatcatcatccagctcctcatcgccatcgagaaggcctcgggtgtggccaccaaggacctgtttgactgggtggcgggcaccagcactggaggcatcctggccctggccattctgcacagtaagtccatggcctacatgcgcggcatgtactttcgcatgaaggatgaggtgttccggggctccaggccctacgagtcggggcccctggaggagttcctgaagcgggagtttggggagcacaccaagatgacggacgtcaggaaacccaaggtgatgctgacagggacactgtctgaccggcagccggctgaactccacctcttccggaactacgatgctccagaaactgtccgggagcctcgtttcaaccagaacgttaacctcaggcctccagctcagccctcagaccagctggtgtggcgggcggcccgaagcagcggggcagctcctacttacttccgacccaatgggcgcttcctggacggtgggctgctggccaacaaccccacgctggatgccatgaccgagatccatgagtacaatcaggacctgatccgcaagggtcaggccaacaaggtgaagaaactctccatcgttgtctccctggggacagggaggtccccacaagtgcctgtgacctgtgtggatgtcttccgtcccagcaacccctgggagctggccaagactgtttttggggccaaggaactgggcaagatggtggtggactgttgcacggatccagacgggcgggctgtggaccgggcacgggcctggtgcgagatggtcggcatccagtacttcagattgaacccccagctggggacggacatcatgctggatgaggtcagtgacacagtgctggtcaacgccctctgggagaccgaggtctacatctatgagcaccgcgaggagttccagaagctcatccagctgctgctctcaccctgagggtccccagcctctcaccggccccagctgacctcgtccattcagcccctgccaggccaagcccagccactgccctcccgggcagatctgggcccaggcacctctgagtccatagaccaggcctgggagaatgccaagctgcctgcccgaggctggtcctgaaggcctgtctcccactaaccccgccttccagcactttctgtcattccaggctgggaaagtctagagccccctttggcccctttccctgactgtcaaggacaactgactcccccatcagctcaaacattaagggtacccgggcacaaccgtacccctgcccccagccccagcctccctgagggcctgccgggctgcctctgccccagcccccagcaagggcactcccaggcttcctggtgggtgcagcccactccctctgccctctgctccgttccctgggggctgggactaaagaaatgggtgtcccccaccccatcagctgggaaagcccaggccgcaggagtgggatgcccgttggactttgcccctcacactggcccagcccctcacactgccccaccccgagaaccctcagctctcaaaggtcactcctgggagtttcttcttcccaatggaagtggcttaagagccaaaactgaaataaatcatttggattcaagttca

SEQ ID NO: 407581 - DNA, 3215 bp, Homo sapiens
tgagtgacctcgcgggtgggcggggcctgggggtccgttccccaacttcctcggcgctccggactcccaagtctccgccggaccctcctttggatattcctcgtgtctccgattctgagacagagggggaagacggtggggcctccccacctgccccgcagaagatgcagttctttggccgcctggtcaataccttcagtggcgtcaccaacttgttctctaacccattccgggtgaaggaggtggctgtggccgactacacctcgagtgaccgagttcgggaggaagggcagctgattctgttccagaacactcccaaccgcacctgggactgcgtcctggtcaaccccaggaactcacagagtggattccgatcacatgcccagtagttaactgttaatcaacgcactctctgtggaacaacaggctggtcccgttgagccaacactctctgggcactgccttcactagactctggctggctgctgcgcttgtagagactcttccagctggagttggaggctgacgccctagtgaatttccatcagtattcttcccagctgctacccttctatgagagctcccctcaggtcctgcacactgaggtcctgcagcacctgaccgacctcatccgtaaccaccccagctggtcagtggcccacctggctgtggagctagggatccgcgagtgcttccatcacagccgtatcatcagctgtgccaattgcgcggagaacgaggagggctgcacacccctgcacctggcctgccgcaagggtgatggggagatcctggtggagctggtgcagtactgccacactcagatggatgtcaccgactacaagggagagaccgtcttccattatgctgtccagggtgacaattctcaggtgctgcagctccttggaaggaacgcagtggctggcctgaaccaggtgaataaccaagggctgaccccgctgcacctggcctgccagctggggaagcaggagatggtccgcgtgctgctgctgtgcaatgctcggtgcaacatcatgggccccaacggctaccccatccactcggccatgaagttctctcagaaggggtgtgcggagatgatcatcagcatggacagcagccagatccacagcaaagacccccgttacggagccagccccctccactgggccaagaacgcagagatggcccgcatgctgctgaaacggggctgcaacgtgaacagcaccagctccgcggggaacacggccctgcacgtggcggtgatgcgcaaccgcttcgactgtgccatagtgctgctgacccacggggccaacgcggatgcccgcggagagcacggcaacaccccgctgcacctggccatgtcgaaagacaacgtggagatgatcaaggccctcatcgtgttcggagcagaagtggacaccccgaatgactttggggagactcctacattcctagcctccaaaatcggcagacaactacaggatctcatgcacatctcacgggcccggaagccagcgttcatcctgggctccatgagggacgagaagcggacccacgaccacctgctgtgcctggatggaggaggagtgaaaggcctcatcatcatccagctcctcatcgccatcgagaaggcctcgggtgtggccaccaaggacctgtttgactgggtggcgggcaccagcactggaggcatcctggccctggccattctgcacagtaagtccatggcctacatgcgcggcatgtactttcgcatgaaggatgaggtgttccggggctccaggccctacgagtcggggcccctggaggagttcctgaagcgggagtttggggagcacaccaagatgacggacgtcaggaaacccaaggtgatgctgacagggacactgtctgaccggcagccggctgaactccacctcttccggaactacgatgctccagaaactgtccgggagcctcgtttcaaccagaacgttaacctcaggcctccagctcagccctcagaccagctggtgtggcgggcggcccgaagcagcggggcagctcctacttacttccgacccaatgggcgcttcctggacggtgggctgctggccaacaaccccacgctggatgccatgaccgagatccatgagtacaatcaggacctgatccgcaagggtcaggccaacaaggtgaagaaactctccatcgttgtctccctggggacagggaggtccccacaagtgcctgtgacctgtgtggatgtcttccgtcccagcaacccctgggagctggccaagactgtttttggggccaaggaactgggcaagatggtggtggactgttgcacggatccagacgggcgggctgtggaccgggcacgggcctggtgcgagatggtcggcatccagtacttcagattgaacccccagctggggacggacatcatgctggatgaggtcagtgacacagtgctggtcaacgccctctgggagaccgaggtctacatctatgagcaccgcgaggagttccagaagctcatccagctgctgctctcaccctgagggtccccagcctctcaccggccccagctgacctcgtccattcagcccctgccaggccaagcccagccactgccctcccgggcagatctgggcccaggcacctctgagtccatagaccaggcctgggagaatgccaagctgcctgcccgaggctggtcctgaaggcctgtctcccactaaccccgccttccagcactttctgtcattccaggctgggaaagtctagagccccctttggcccctttccctgactgtcaaggacaactgactcccccatcagctcaaacattaagggtacccgggcacaaccgtacccctgcccccagccccagcctccctgagggcctgccgggctgcctctgccccagcccccagcaagggcactcccaggcttcctggtgggtgcagcccactccctctgccctctgctccgttccctgggggctgggactaaagaaatgggtgtcccccaccccatcagctgggaaagcccaggccgcaggagtgggatgcccgttggactttgcccctcacactggcccagcccctcacactgccccaccccgagaaccctcagctctcaaaggtcactcctgggagtttcttcttcccaatggaagtggcttaagagccaaaactgaaataaatcatttggattcaagttca

SEQ ID NO: 407582 - DNA, 3320 bp, Homo sapiens
tgtttgcggaagtaggaggaagtagaagtgctgagtaagccgagacagagggggaagacggtggggcctccccacctgccccgcagaagatgcagttctttggccgcctggtcaataccttcagtggcgtcaccaacttgttctctaacccattccgggtgaaggaggtggctgtggccgactacacctcgagtgaccgagttcgggaggaagggcagctgattctgttccagaacactcccaaccgcacctgggactgcgtcctggtcaaccccaggaactcacagagtggattccgactcttccagctggagttggaggctgacgccctagtgaatttccatcagtattcttcccagctgctacccttctatgagagctcccctcaggtcctgcacactgaggtcctgcagcacctgaccgacctcatccgtaaccaccccagctggtcagtggcccacctggctgtggagctagggatccgcgagtgcttccatcacagccgtatcatcagctgtgccaattgcgcggagaacgaggagggctgcacacccctgcacctggcctgccgcaagggtgatggggagatcctggtggagctggtgcagtactgccacactcagatggatgtcaccgactacaagggagagaccgtcttccattatgctgtccagggtgacaattctcaggtgctgcagctccttggaaggaacgcagtggctggcctgaaccaggtgaataaccaagggctgaccccgctgcacctggcctgccagctggggaagcaggagatggtccgcgtgctgctgctgtgcaatgctcggtgcaacatcatgggccccaacggctaccccatccactcggccatgaagttctctcagaaggggtgtgcggagatgatcatcagcatggacagcagccagatccacagcaaagacccccgttacggagccagccccctccactgggccaagaacgcagagatggcccgcatgctgctgaaacggggctgcaacgtgaacagcaccagctccgcggggaacacggccctgcacgtggcggtgatgcgcaaccgcttcgactgtgccatagtgctgctgacccacggggccaacgcggatgcccgcggagagcacggcaacaccccgctgcacctggccatgtcgaaagacaacgtggagatgatcaaggccctcatcgtgttcggagcagaagtggacaccccgaatgactttggggagactcctacattcctagcctccaaaatcggcagacttgtcaccaggaaggcgatcttgactctgctgagaaccgtgggggccgaatactgcttcccacccatccacggggtccccgcggagcagggctctgcagcgccacatcatcccttctccctggaaagagctcagcccccaccgatcagcctaaacaacctagaactacaggatctcatgcacatctcacgggcccggaagccagcgttcatcctgggctccatgagggacgagaagcggacatgcagaacctgagcccctgagaggtgaagtgacttgctcaaggtcacacggaccacgaccacctgctgtgcctggatggaggaggagtgaaaggcctcatcatcatccagctcctcatcgccatcgagaaggcctcgggtgtggccaccaaggacctgtttgactgggtggcgggcaccagcactggaggcatcctggccctggccattctgcacagtaagtccatggcctacatgcgcggcatgtactttcgcatgaaggatgaggtgttccggggctccaggccctacgagtcggggcccctggaggagttcctgaagcgggagtttggggagcacaccaagatgacggacgtcaggaaacccaagttggaccaatctgacactcctccagcactgccggagagagcctgttttgcggggatggtgcggggagaagcccacctatcccgaacagagggtgatgctgacagggacactgtctgaccggcagccggctgaactccacctcttccggaactacgatgctccagaaactgtccgggagcctcgtttcaaccagaacgttaacctcaggcctccagctcagccctcagaccagctggtgtggcgggcggcccgaagcagcggggcagctcctacttacttccgacccaatgggcgcttcctggacggtgggctgctggccaacaaccccacgctggatgccatgaccgagatccatgagtacaatcaggacctgatccgcaagggtcaggccaacaaggtgaagaaactctccatcgttgtctccctggggacagggaggtccccacaagtgcctgtgacctgtgtggatgtcttccgtcccagcaacccctgggagctggccaagactgtttttggggccaaggaactgggcaagatggtggtggactgttgcacggatccagacgggcgggctgtggaccgggcacgggcctggtgcgagatggtcggcatccagtacttcagattgaacccccagctggggacggacatcatgctggatgaggtcagtgacacagtgctggtcaacgccctctgggagaccgaggtctacatctatgagcaccgcgaggagttccagaagctcatccagctgctgctctcaccctgagggtccccagcctctcaccggccccagctgacctcgtccattcagcccctgccaggccaagcccagccactgccctcccgggcagatctgggcccaggcacctctgagtccatagaccaggcctgggagaatgccaagctgcctgcccgaggctggtcctgaaggcctgtctcccactaaccccgccttccagcactttctgtcattccaggctgggaaagtctagagccccctttggcccctttccctgactgtcaaggacaactgactcccccatcagctcaaacattaagggtacccgggcacaaccgtacccctgcccccagccccagcctccctgagggcctgccgggctgcctctgccccagcccccagcaagggcactcccaggcttcctggtgggtgcagcccactccctctgccctctgctccgttccctgggggctgggactaaagaaatgggtgtcccccaccccatcagctgggaaagcccaggccgcaggagtgggatgcccgttggactttgcccctcacactggcccagcccctcacactgccccaccccgagaaccctcagctctcaaaggtcactcctgggagtttcttcttcccaatggaagtggcttaagagccaaaactgaaataaatcatttggattcaagttca

SEQ ID NO: 407583 - DNA, 2761 bp, Homo sapiens
aagaactaggatgagttgcttgaggtcacaccgatgaggttgaagctggaatctgacaccagagcctgtgtgattgtcctgatgtgtaagacagagggggaagacggtggggcctccccacctgccccgcagaagatgcagttctttggccgcctggtcaataccttcagtggcgtcaccaacttgttctctaacccattccgggtgaaggaggtggctgtggccgactacacctcgagtgaccgagttcgggaggaagggcagctgattctgttccagaacactcccaaccgcacctgggactgcgtcctggtcaaccccaggaactcacagagtggattccgactcttccagctggagttggaggctgacgccctagtgaatttccatcagtattcttcccagctgctacccttctatgagagctcccctcaggtcctgcacactccttggaaggaacgcagtggctggcctgaaccaggtgaataaccaagggctgaccccgctgcacctggcctgccagctggggaagcaggagatggtccgcgtgctgctgctgtgcaatgctcggtgcaacatcatgggccccaacggctaccccatccactcggccatgaagttctctcagaaggggtgtgcggagatgatcatcagcatggacagcagccagatccacagcaaagacccccgttacggagccagccccctccactgggccaagaacgcagagatggcccgcatgctgctgaaacggggctgcaacgtgaacagcaccagctccgcggggaacacggccctgcacgtggcggtgatgcgcaaccgcttcgactgtgccatagtgctgctgacccacggggccaacgcggatgcccgcggagagcacggcaacaccccgctgcacctggccatgtcgaaagacaacgtggagatgatcaaggccctcatcgtgttcggagcagaagtggacaccccgaatgactttggggagactcctacattcctagcctccaaaatcggcagacaactacaggatctcatgcacatctcacgggcccggaagccagcgttcatcctgggctccatgagggacgagaagcggacccacgaccacctgctgtgcctggatggaggaggagtgaaaggcctcatcatcatccagctcctcatcgccatcgagaaggcctcgggtgtggccaccaaggacctgtttgactgggtggcgggcaccagcactggaggcatcctggccctggccattctgcacagtaagtccatggcctacatgcgcggcatgtactttcgcatgaaggatgaggtgttccggggctccaggccctacgagtcggggcccctggaggagttcctgaagcgggagtttggggagcacaccaagatgacggacgtcaggaaacccaaggtgatgctgacagggacactgtctgaccggcagccggctgaactccacctcttccggaactacgatgctccagaaactgtccgggagcctcgtttcaaccagaacgttaacctcaggcctccagctcagccctcagaccagctggtgtggcgggcggcccgaagcagcggggcagctcctacttacttccgacccaatgggcgcttcctggacggtgggctgctggccaacaaccccacgctggatgccatgaccgagatccatgagtacaatcaggacctgatccgcaagggtcaggccaacaaggtgaagaaactctccatcgttgtctccctggggacagggaggtccccacaagtgcctgtgacctgtgtggatgtcttccgtcccagcaacccctgggagctggccaagactgtttttggggccaaggaactgggcaagatggtggtggactgttgcacggatccagacgggcgggctgtggaccgggcacgggcctggtgcgagatggtcggcatccagtacttcagattgaacccccagctggggacggacatcatgctggatgaggtcagtgacacagtgctggtcaacgccctctgggagaccgaggtctacatctatgagcaccgcgaggagttccagaagctcatccagctgctgctctcaccctgagggtccccagcctctcaccggccccagctgacctcgtccattcagcccctgccaggccaagcccagccactgccctcccgggcagatctgggcccaggcacctctgagtccatagaccaggcctgggagaatgccaagctgcctgcccgaggctggtcctgaaggcctgtctcccactaaccccgccttccagcactttctgtcattccaggctgggaaagtctagagccccctttggcccctttccctgactgtcaaggacaactgactcccccatcagctcaaacattaagggtacccgggcacaaccgtacccctgcccccagccccagcctccctgagggcctgccgggctgcctctgccccagcccccagcaagggcactcccaggcttcctggtgggtgcagcccactccctctgccctctgctccgttccctgggggctgggactaaagaaatgggtgtcccccaccccatcagctgggaaagcccaggccgcaggagtgggatgcccgttggactttgcccctcacactggcccagcccctcacactgccccaccccgagaaccctcagctctcaaaggtcactcctgggagtttcttcttcccaatggaagtggcttaagagccaaaactgaaataaatcatttggattcaagttca

SEQ ID NO: 407584 - DNA, 2547 bp, Homo sapiens
tgtttgcggaagtaggaggaagtagaagtgctgagtaagccgagacagagggggaagacggtggggcctccccacctgccccgcagaagatgcagttctttggccgcctggtcaataccttcagtggcgtcaccaacttgttctctaacccattccgggtgaaggaggtggctgtggccgactacacctcgagtgaccgagttcgggaggaagggcagctgattctgttccagaacactcccaaccgcacctgggactgcgtcctggtcaaccccaggaactcacagagtggattccgactcttccagctggagttggaggctgacgccctagtgaatttccatcagtattcttcccagctgctacccttctatgagagctcccctcaggtcctgcacactgaggtcctgcagcacctgaccgacctcatccgtaaccaccccagctggtcagtggcccacctggctgtggagctagggatccgcgagtgcttccatcacagccgtatcatcagctgtgccaattgcgcggagaacgaggagggctgcacacccctgcacctggcctgccgcaagggtgatggggagatcctggtggagctggtgcagtactgccacactcagatggatgtcaccgactacaagggagagaccgtcttccattatgctgtccagggtgacaattctcaggtgctgcagctccttggaaggaacgcagtggctggcctgaaccaggtgaataaccaagggctgaccccgctgcacctggcctgccagctggggaagcaggagatggtccgcgtgctgctgctgtgcaatgctcggtgcaacatcatgggccccaacggctaccccatccactcggccatgaagttctctcagaaggggtgtgcggagatgatcatcagcatggacagcagccagatccacagcaaagacccccgttacggagccagccccctccactgggccaagaacgcagagatggcccgcatgctgctgaaacggggctgcaacgtgaacagcaccagctccgcggggaacacggccctgcacgtggcggtgatgcgcaaccgcttcgactgtgccatagtgctgctgacccacggggccaacgcggatgcccgcggagagcacggcaacaccccgctgcacctggccatgtcgaaagacaacgtggagatgatcaaggccctcatcgtgttcggagcagaagtggacaccccgaatgactttggggagactcctacattcctagcctccaaaatcggcagacttgtcaccaggaaggcgatcttgactctgctgagaaccgtgggggccgaatactgcttcccacccatccacggggtccccgcggagcagggctctgcagcgccacatcatcccttctccctggaaagagctcagcccccaccgatcagcctaaacaacctagaactacaggatctcatgcacatctcacgggcccggaagccagcgttcatcctgggctccatgagggacgagaagcggacccacgaccacctgctgtgcctggatggaggaggagtgaaaggcctcatcatcatccagctcctcatcgccatcgagaaggcctcgggtgtggccaccaaggacctgtttgactgggtggcgggcaccagcactggaggcatcctggccctggccattctgcacagtaagtccatggcctacatgcgcggcatgtactttcgcatgaaggatgaggtgttccggggctccaggccctacgagtcggggcccctggaggagttcctgaagcgggagtttggggagcacaccaagatgacggacgtcaggaaacccaaggtgatgctgacagggacactgtctgaccggcagccggctgaactccacctcttccggaactacgatgctccagaaactgtccgggagcctcgtttcaaccagaacgttaacctcaggcctccagctcagccctcagaccagctggtgtggcgggcggcccgaagcagcggggcagctcctacttacttccgacccaatgggcgcttcctggacggtgggctgctggccaacaaccccacgctggatgccatgaccgagatccatgagtacaatcaggacctgatccgcaagggtcaggccaacaaggtgaagaaactctccatcgttgtctccctggggacagggaggtccccacaagtgcctgtgacctgtgtggatgtcttccgtcccagcaacccctgggagctggccaagactgtttttggggccaaggaaccaggcttcctggtgggtgcagcccactccctctgccctctgctccgttccctgggggctgggactaaagaaatgggtgtcccccaccccatcagctgggaaagcccaggccgcaggagtgggatgcccgttggactttgcccctcacactggcccagcccctcacactgccccaccccgagaaccctcagctctcaaaggtcactcctgggagtttcttcttcccaatggaagtggcttaagagccaaaactgaaataaatcatttggattcaagttca

SEQ ID NO: 407585 - DNA, 1553 bp, Homo sapiens
tgtttgcggaagtaggaggaagtagaagtgctgagtaagccgagacagagggggaagacggtggggcctccccacctgccccgcagaagatgcagttctttggccgcctggtcaataccttcagtggcgtcaccaacttgttctctaacccattccgggtgaaggaggtggctgtggccgactacacctcgagtgaccgagttcgggaggaagggcagctgattctgttccagaacactcccaaccgcacctgggactgcgtcctggtcaaccccaggaactcacagagtggattccgactcttccagctggagttggaggctgacgccctagtgaatttccatcagtattcttcccagctgctacccttctatgagagctcccctcaggtcctgcacactgaggtcctgcagcacctgaccgacctcatccgtaaccaccccagctggtcagtggcccacctggctgtggagctagggatccgcgagtgcttccatcacagccgtatcatcagctgtgccaattgcgcggagaacgaggagggctgcacacccctgcacctggcctgccgcaagggtgatggggagatcctggtggagctggtgcagtactgccacactcagatggatgtcaccgactacaagggagagaccgtcttccattatgctgtccagggtgacaattctcaggtgctgcagctccttggaaggaacgcagtggctggcctgaaccaggtgaataaccaagggctgaccccgctgcacctggcctgccagctggggaagcaggagatggtccgcgtgctgctgctgtgcaatgctcggtgcaacatcatgggccccaacggctaccccatccactcggccatgaagttctctcagaaggggtgtgcggagatgatcatcagcatggacagcagccagatccacagcaaagacccccgttacggagccagccccctccactgggccaagaacgcagagatggcccgcatgctgctgaaacggggctgcaacgtgaacagcaccagctccgcggggaacacggccctgcacgtggcggtgatgcgcaaccgcttcgactgtgccatagtgctgctgacccacggggccaacgcggatgcccgcggagagcacggcaacaccccgctgcacctggccatgtcgaaagacaacgtggagatgatcaaggccctcatcgtgttcggagcagaagtggacaccccgaatgactttggggagactcctacattcctagcctccaaaatcggcagacttgtcaccaggaaggcgatcttgactctgctgagaaccgtgggggccgaatactgcttcccacccatccacggggtccccgcggagcagggctctgcagcgccacatcatcccttctccctggaaagagctcagcccccaccgatcagcctaaacaacctagcaacctaggtaggcctcgcctcccgactccctcttctccagctggttcccaggcccctggatcacagcaggccccaccaaagcaacaggatccctaggacggaagtcactaaagga

SEQ ID NO: 407586 - DNA, 292 bp, Homo sapiens
gtttgtttatttaaataaggaatgaatgttgccttgaatctcaaaaatgataacttatttccagtctggtaggcagagtaaaataagtcacatgtttttgaatttcaactgagagtttcattctgttttgaatttttaaacatgaccttcagagagtgaaaagttcaaacaaattcatttaatctcagcccaacagttagatattaatatacctccaataattttactaatactaatcctgtgtatttctttgtaaaaagaaataaacttctttatatatatacgtgtattt

SEQ ID NO: 407587 - DNA, 1795 bp, Homo sapiens
  misc_feature (1456)..(1456): n is a, c, g, or t
cccaggccccacaatgcacttcggggcgcgtcactcggagcggcgggtcccgtctcgacaggtcttctctgttggttgaaatgtctatgattttatctgcctcagtcattcgtgtcagagatggactgccactttctgcttctactgattatgaacaaagcacaggaatgcaggagtgcagaaagtattttaaaatgctttcgaggaaacttgctcaacttcctgatagatgtacactgaaaactggacattataacattaattttattagctctctgggagtgagctacatgatgttgtgcactgaaaattacccaaatgttctcgccttctctttcctggatgagcttcagaaggagttcattactacttataacatgatgaagacaaatactgctgtcagaccatactgtttcattgaatttgataacttcattcagaggaccaagcagcgatataataatcccaggtctctttcaacaaagataaatctttctgacatgcagacggaaatcaagctgaggcctccttatcaaatttccatgtgcgaactggggtcagccaatggagtcacatcagcattttctgttgactgtaaaggtgctggtaagatttcttctgctcaccagcgactggaaccagcaactctgtcagggattgtaggatttatccttagtcttttatgtggagctctgaatttaattcgaggctttcatgctatagaaagtctcctgcagagtgatggtgatgattttaattacatcattgcatttttccttggaacagcagcctgcctttaccagtgttatttacttgtctactacaccggctggcggaatgtcaaatcttttttgacttttggcttaatctgtctatgcaacatgtatctctatgaactgcgcaacctctggcagcttttctttcatgtgactgtgggagcatttgttacactacagatctggctaaggcaagcccagggcaaggctcccgattatgatgtctgacaccatccttcagatctattgccttggcttcagggggataaggagggaacatatcataactgcactgtgatgaagaagctgttccccacagaggagaagctctgctttctttctctccaactttccttttttaaaatcagcatgatgtgcctgtgagcatggaagagtcctctcagaagaatgttggccatgagactatcattcagaggaggaggggatttctctcttcaaggccataacagtggaagaacagtcatatgccattggaagtcttggccagcagtcctgaatccttcctgaagagttcagaaaatagatgtggtattgctctgaggaccaggcaggaggaactctacaacctgagtttgcctttgtgaggcattagtatagaccaaataaaaagctgcagaaattggaaagtttatgttttaaataaatgactgtgataaatntcagattatttgcacatttatggtactacgagtttataaagtccaagatggtgtgaaattggttctttttacttttatatttttgcttgaatcttaactctggaaatcacctgatgtagaagaagactgtgatgagctcgtctgtggaacatcacaagtatcgaaaatacagtaatggatgtttcctttctaatccacatttattgtttcttttgaaatcacgtctaaaaaatatgactcagactatagccgttgtttcccaaacttcagtctctttagtactacttgtattattttcttaatatttatcttttaaattttaaagtttttttaaaaaaa

SEQ ID NO: 407588 - DNA, 1455 bp, Homo sapiens
cccaggccccacaatgcacttcggggcgcgtcactcggagcggcgggtcccgtctcgacaggtcttctctgttggttgaaatgtctatgattttatctgcctcagtcattcgtgtcagagatggactgccactttctgcttctactgattatgaacaaagcacaggaatgcaggagtgcagaaagtattttaaaatgctttcgaggaaacttgctcaacttcctgatagatgtacactgaaaactggacattataacattaattttattagctctctgggagtgagctacatgatgttgtgcactgaaaattacccaaatgttctcgccttctctttcctggatgagcttcagaaggagttcattactacttataacatgatgaagacaaatactgctgtcagaccatactgtttcattgaatttgataacttcattcagaggaccaagcagcgatataataatcccaggtctctttcaacaaagataaatctttctgacatgcagacggaaatcaagctgaggcctccttatcaaatttccatgtgcgaactggggtcagccaatggagtcacatcagcattttctgttgactgtaaaggtgctggtaagatttcttctgctcaccagcgactggaaccagcaactctgtcagggattgtaggatttatccttagtcttttatgtggagctctgaatttaattcgaggctttcatgctatagaaagtctcctgcagagtgatggtgatgattttaattacatcattgcatttttccttggaacagcagcctgcctttaccagtgttatttacttgtctactacaccggctggcggaatgtcaaatcttttttgacttttggcttaatctgtctatgcaacatgtatctctatgaactgcgcaacctctggcagcttttctttcatgtgactgtgggagcatttgttacactacagatctggctaaggcaagcccagggcaaggctcccgattatgatgtctgacaccatccttcagatctattgccttggcttcagggggataaggagggaacatatcataactgcactgtgatgaagaagctgttccccacagaggagaagctctgctttctttctctccaactttccttttttaaaatcagcatgatgtgcctgtgagcatggaagagtcctctcagaagaatgttggccatgagactatcattcagaggaggaggggatttctctcttcaaggccataacagtggaagaacagtcatatgccattggaagtcttggccagcagtcctgaatccttcctgaagagttcagaaaatagatgtggtattgctctgaggaccaggcaggaggaactctacaacctgagtttgcctttgtgaggcattagtatagaccaaataaaaagctgcagaaattggaaagtttatgttttaaataaatgactgtgataaat

SEQ ID NO: 407589 - DNA, 760 bp, Homo sapiens
cccaggccccacaatgcacttcggggcgcgtcactcggagcggcgggtcccgtctcgacaggtcttctctgttggttgaaatgtctatgattttatctgcctcagtcattcgtgtcagagatggactgccactttctgcttctactgattatgaacaaagcacaggaatgcaggagtgcagaaagtattttaaaatgctttcgaggaaacttgctcaacttcctgatagatgtacactgaaaactggacattataacattaattttattagctctctgggagtgagctacatgatgttgtgcactgaaaattacccaaatgttctcgccttctctttcctggatgagcttcagaaggagttcattactacttataacatgatgaagacaaatactgctgtcagaccatactgtttcattgaatttgataacttcattcagaggaccaagcagcgatataataatcccaggtctctttcaacaaagataaatctttctgacatgcagacggaaatcaagctgaggcctccttatcaaatttccatgtgcgaactggggtcagccaatggagtcacatcagcattttctgttgactgtaaaggtgctggtaagatttcttctggaacttttgcagagtctccataaaccattggtacattttcagaaacatttaattttgttatcaacatgccatccttgggttcaagaagactaaagaaaagactttataggagaaggcaataataacaaaagcaaaacaa

SEQ ID NO: 407590 - DNA, 387 bp, Homo sapiens
  misc_feature (44)..(44): n is a, c, g, or t
aaaaaaaaaaaaaaaaaaaaaaaaaaaaagcggccgcccgaatnggggagcggcgggtcccgtctcgacaggtcttctctgttggttgaaatgtctatgattttatctgcctcagtcattcgtgtcagagatggactgccactttctgcttctactgattatgaacaaagcacaggaatgcaggagtgcagaaagtattttaaaatgctttcgaggaaacttgctcaacttcctgatagatgtacactgaaaactggacattataacattaagtaagacttcagtttgcttcatttgactcatttgcccagtagttgtcattttaatgaagtttaagtggttgcaatagaaaggagtgattaggaaaacctgttcaagtcgagcatc

SEQ ID NO: 407591 - DNA, 1345 bp, Homo sapiens
cccaggccccacaatgcacttcggggcgcgtcactcggagcggcgggtcccgtctcgacaggtcttctctgttggttgaaatgtctatgattttatctgcctcagtcattcgtgtcagagatggactgccactttctgcttctactgattatgaacaaagcacaggaatgcaggagtgcagaaagtattttaaaatgctttcgaggaaacttgctcaacttcctgatagatgtacactgaaaactggacattataacattaattttattagctctctgggagtgagctacatgatgttgtgcactgaaaattacccaaatgttctcgccttctctttcctggatgagcttcagaaggagttcattactacttataacatgatgaagacaaatactgctgtcagaccatactgtttcattgaatttgataacttcattcagaggaccaagcagcgatataataatcccaggtctctttcaacaaagataaatctttctgacatgcagacggaaatcaagctgaggcctccttatcaaatttccatgtgcgaactggggtcagccaatggagtcacatcagcattttctgttgactgtaaaggtgctggtaagatttcttctgctcaccagcgactggaaccagcaactctgtcagggattgtaggatttatccttagtcttttatgtggagctctgaatttaattcgaggctttcatgctatagaaagtctcctgcagagtgatggtgatgattttaattacatcattgcatttttccttggaacagcagcctgcctttaccaggtaggttttcttccattttaaagaaacacttaccattattgtttacttcgggtatcagttctaacaattgtgcattttaaataaattattaaaactctgagttctttgcttctcttttaatttgagcctcttttaactttgtgacctatgtctccattttgagtagacatacatcccagtgaacctgatgttaaccttcttcctgtgctgaggcttcagtggtggtatgtcatctgcctatggtagtaaagactacttctaggctgggtgtggtggctcatgcctgtaatcccagcactttaggaggccgaggtgggcagatcacttgaggtcaggagttcaaggccagctggccaacacggtgaaaccttgtctgtactaaaaatacaaaaattagccgggcatggtgatgtgtgcctgtagtcccagctacttgggaggctgagacaggagaattgcttgaacccaggaggcagaggttgcagtgagccaagatcgcgccactgcactccggcctgggcaacagagcgagactacatctc

SEQ ID NO: 407592 - DNA, 1365 bp, Homo sapiens
  misc_feature (1026)..(1026): n is a, c, g, or t
tttagcagtaggaggagaggcttttatcgttatgtcagaacttttccccagtggttttcctcttttgagtggaatgaaattgatgggggtggccaaaatgaagaggaacacttgtacctctacctcacactctttaggtcttagaatgtgctttatgttttcattttaggactcttgagaatttctatataccagtgtgtgacaattttgactgtttgtaaatattgttacatcctatcttgatggattgtttctggaaatgggctcccaccggaaacaaaaataatcttttattttgcttttgcagagtgatggtgatgattttaattacatcattgcatttttccttggaacagcagcctgcctttaccagtgttatttacttgtctactacaccggctggcggaatgtcaaatcttttttgacttttggcttaatctgtctatgcaacatgtatctctatgaactgcgcaacctctggcagcttttctttcatgtgactgtgggagcatttgttacactacagatctggctaaggcaagcccagggcaaggctcccgattatgatgtctgacaccatccttcagatctattgccttggcttcagggggataaggagggaacatatcataactgcactgtgatgaagaagctgttccccacagaggagaagctctgctttctttctctccaactttccttttttaaaatcagcatgatgtgcctgtgagcatggaagagtcctctcagaagaatgttggccatgagactatcattcagaggaggaggggatttctctcttcaaggccataacagtggaagaacagtcatatgccattggaagtcttggccagcagtcctgaatccttcctgaagagttcagaaaatagatgtggtattgctctgaggaccaggcaggaggaactctacaacctgagtttgcctttgtgaggcattagtatagaccaaataaaaagctgcagaaattggaaagtttatgttttaaataaatgactgtgataaatntcagattatttgcacatttatggtactacgagtttataaagtccaagatggtgtgaaattggttctttttacttttatatttttgcttgaatcttaactctggaaatcacctgatgtagaagaagactgtgatgagctcgtctgtggaacatcacaagtatcgaaaatacagtaatggatgtttcctttctaatccacatttattgtttcttttgaaatcacgtctaaaaaatatgactcagactatagccgttgtttcccaaacttcagtctctttagtactacttgtattattttcttaatatttatcttttaaattttaaagtttttttaaaaaaa

SEQ ID NO: 407593 - DNA, 1090 bp, Homo sapiens
  misc_feature (44)..(44): n is a, c, g, or t
aaaaaaaaaaaaaaaaaaaaaaaaaaaaagcggccgcccgaatnggggagcggcgggtcccgtctcgacaggtcttctctgttggttgaaatgtctatgattttatctgcctcagtcattcgtgtcagagatggactgccactttctgcttctactgattatgaacaaagcacaggaatgcaggagtgcagaaagtattttaaaatgctttcgaggaaacttgctcaacttcctgatagatgtacactgaaaactggacattataacattaattttattagctctctgggagtgagctacatgatgttgtgcactgaaaattacccaaatgttctcgccttctctttcctggatgagcttcagaaggagttcattactacttataacatgatgaagacaaatactgctgtcagaccatactgtttcattgaatttgataacttcattcagaggaccaagcagcgatataataatcccaggtctctttcaacaaagataaatctttctgacatgcagacggaaatcaagctgaggcctccttatcaaatttccatgtgcgaactggggtcagccaatggagtcacatcagcattttctgttgactgtaaaggtgctggtaagatttcttctggtgagttctggatctcagttattttattttaaaaaaatccttgggaaaaactgagaaactcttgaaaatgaattactttattctaatattttaaatcaagtacatgagagaatatagaagttcaaagcaatcctttcagtgatttataaagtaagctaccagatgtgtgactaatcgggaaaatactttcaaatagcaacctcagaggatctctttgctagaaaaacatttttttaaatttaaaattaaaaaaagttaattttcatgggtacatattcggtgtgtaatatatttatggggtacatgagatattttgatacaggtatgcaatgtgtaataatcacattagggtaaatggggtattcatcacctcaagcatttattatttctttgtgttataaacatgtcagttgtgctctgttaatttttaaatgtacaataaattattgttgactgtag

SEQ ID NO: 407594 - DNA, 1330 bp, Homo sapiens
  misc_feature (44)..(44): n is a, c, g, or t
  misc_feature (991)..(991): n is a, c, g, or t
aaaaaaaaaaaaaaaaaaaaaaaaaaaaagcggccgcccgaatnggggagcggcgggtcccgtctcgacaggtcttctctgttggttgaaatgtctatgattttatctgcctcagtcattcgtgtcagagatggactgccactttctgcttctactgattatgaacaaagcacaggaatgcaggagtgcagaaagtattttaaaatgctttcgaggaaacttgctcaacttcctgatagatgtacactgaaaactggacattataacattaaagtgatggtgatgattttaattacatcattgcatttttccttggaacagcagcctgcctttaccagtgttatttacttgtctactacaccggctggcggaatgtcaaatcttttttgacttttggcttaatctgtctatgcaacatgtatctctatgaactgcgcaacctctggcagcttttctttcatgtgactgtgggagcatttgttacactacagatctggctaaggcaagcccagggcaaggctcccgattatgatgtctgacaccatccttcagatctattgccttggcttcagggggataaggagggaacatatcataactgcactgtgatgaagaagctgttccccacagaggagaagctctgctttctttctctccaactttccttttttaaaatcagcatgatgtgcctgtgagcatggaagagtcctctcagaagaatgttggccatgagactatcattcagaggaggaggggatttctctcttcaaggccataacagtggaagaacagtcatatgccattggaagtcttggccagcagtcctgaatccttcctgaagagttcagaaaatagatgtggtattgctctgaggaccaggcaggaggaactctacaacctgagtttgcctttgtgaggcattagtatagaccaaataaaaagctgcagaaattggaaagtttatgttttaaataaatgactgtgataaatntcagattatttgcacatttatggtactacgagtttataaagtccaagatggtgtgaaattggttctttttacttttatatttttgcttgaatcttaactctggaaatcacctgatgtagaagaagactgtgatgagctcgtctgtggaacatcacaagtatcgaaaatacagtaatggatgtttcctttctaatccacatttattgtttcttttgaaatcacgtctaaaaaatatgactcagactatagccgttgtttcccaaacttcagtctctttagtactacttgtattattttcttaatatttatcttttaaattttaaagtttttttaaaaaaa

SEQ ID NO: 407595 - DNA, 1328 bp, Homo sapiens
gctggtaccggccggaagtctaggatcgggtcccgtctcgacaggtcttctctgttggttgaaatgtctatgattttatctgcctcagtcattcgtgtcagagatggactgccactttctgcttctactgattatgaacaaagcacaggaatgcaggagtgcagaaagtattttaaaatgctttcgaggaaacttgctcaacttcctgatagatgtacactgaaaactggacattataacattaattttattagctctctgggagtgagctacatgatgttgtgcactgaaaattacccaaatgttctcgccttctctttcctggatgagcttcagaaggagttcattactacttataacatgatgaagacaaatactgctgtcagaccatactgtttcattgaatttgataacttcattcagaggaccaagcagcgatataataatcccaggtctctttcaacaaagataaatctttctgacatgcagacggaaatcaagctgaggcctccttatcaaatttccatgtgcgaactggggtcagccaatggagtcacatcagcattttctgttgactgtaaaggtgctggtaagatttcttctgctcaccagcgactggaaccagcaactctgtcagggattgtaggatttatccttagtcttttatgtggagctctgaatttaattcgaggctttcatgctatagaaagtctcctgcagagtgatggtgatgattttaattacatcattgcatttttccttggaacagcagcctgcctttaccaggtaggttttcttccattttaaagaaacacttaccattattgtttacttcgggtatcagttctaacaattgtgcattttaaataaattattaaaactctgagttctttgcttctcttttaatttgagcctcttttaactttgtgacctatgtctccattttgagtagacatacatcccagtgaacctgatgttaaccttcttcctgtgctgaggcttcagtggtggtatgtcatctgcctatggtagtaaagactacttctaggctgggtgtggtggctcatgcctgtaatcccagcactttaggaggccgaggtgggcagatcacttgaggtcaggagttcaaggccagctggccaacacggtgaaaccttgtctgtactaaaaatacaaaaattagccgggcatggtgatgtgtgcctgtagtcccagctacttgggaggctgagacaggagaattgcttgaacccaggaggcagaggttgcagtgagccaagatcgcgccactgcactccggcctgggcaacagagcgagactacatctc

SEQ ID NO: 407596 - DNA, 1778 bp, Homo sapiens
  misc_feature (1439)..(1439): n is a, c, g, or t
gctggtaccggccggaagtctaggatcgggtcccgtctcgacaggtcttctctgttggttgaaatgtctatgattttatctgcctcagtcattcgtgtcagagatggactgccactttctgcttctactgattatgaacaaagcacaggaatgcaggagtgcagaaagtattttaaaatgctttcgaggaaacttgctcaacttcctgatagatgtacactgaaaactggacattataacattaattttattagctctctgggagtgagctacatgatgttgtgcactgaaaattacccaaatgttctcgccttctctttcctggatgagcttcagaaggagttcattactacttataacatgatgaagacaaatactgctgtcagaccatactgtttcattgaatttgataacttcattcagaggaccaagcagcgatataataatcccaggtctctttcaacaaagataaatctttctgacatgcagacggaaatcaagctgaggcctccttatcaaatttccatgtgcgaactggggtcagccaatggagtcacatcagcattttctgttgactgtaaaggtgctggtaagatttcttctgctcaccagcgactggaaccagcaactctgtcagggattgtaggatttatccttagtcttttatgtggagctctgaatttaattcgaggctttcatgctatagaaagtctcctgcagagtgatggtgatgattttaattacatcattgcatttttccttggaacagcagcctgcctttaccagtgttatttacttgtctactacaccggctggcggaatgtcaaatcttttttgacttttggcttaatctgtctatgcaacatgtatctctatgaactgcgcaacctctggcagcttttctttcatgtgactgtgggagcatttgttacactacagatctggctaaggcaagcccagggcaaggctcccgattatgatgtctgacaccatccttcagatctattgccttggcttcagggggataaggagggaacatatcataactgcactgtgatgaagaagctgttccccacagaggagaagctctgctttctttctctccaactttccttttttaaaatcagcatgatgtgcctgtgagcatggaagagtcctctcagaagaatgttggccatgagactatcattcagaggaggaggggatttctctcttcaaggccataacagtggaagaacagtcatatgccattggaagtcttggccagcagtcctgaatccttcctgaagagttcagaaaatagatgtggtattgctctgaggaccaggcaggaggaactctacaacctgagtttgcctttgtgaggcattagtatagaccaaataaaaagctgcagaaattggaaagtttatgttttaaataaatgactgtgataaatntcagattatttgcacatttatggtactacgagtttataaagtccaagatggtgtgaaattggttctttttacttttatatttttgcttgaatcttaactctggaaatcacctgatgtagaagaagactgtgatgagctcgtctgtggaacatcacaagtatcgaaaatacagtaatggatgtttcctttctaatccacatttattgtttcttttgaaatcacgtctaaaaaatatgactcagactatagccgttgtttcccaaacttcagtctctttagtactacttgtattattttcttaatatttatcttttaaattttaaagtttttttaaaaaaa

SEQ ID NO: 407597 - DNA, 1471 bp, Homo sapiens
  misc_feature (1132)..(1132): n is a, c, g, or t
gtcgatctagcaggatctcgaggagatagcaggagttcattactacttataacatgatgaagacaaatactgctgtcagaccatactgtttcattgaatttgataacttcattcagaggaccaagcagcgatataataatcccaggtctctttcaacaaagataaatctttctgacatgcagacggaaatcaagctgaggcctccttatcaaatttccatgtgcgaactggggtcagccaatggagtcacatcagcattttctgttgactgtaaaggtgctggtaagatttcttctgctcaccagcgactggaaccagcaactctgtcagggattgtaggatttatccttagtcttttatgtggagctctgaatttaattcgaggctttcatgctatagaaagtctcctgcagagtgatggtgatgattttaattacatcattgcatttttccttggaacagcagcctgcctttaccagtgttatttacttgtctactacaccggctggcggaatgtcaaatcttttttgacttttggcttaatctgtctatgcaacatgtatctctatgaactgcgcaacctctggcagcttttctttcatgtgactgtgggagcatttgttacactacagatctggctaaggcaagcccagggcaaggctcccgattatgatgtctgacaccatccttcagatctattgccttggcttcagggggataaggagggaacatatcataactgcactgtgatgaagaagctgttccccacagaggagaagctctgctttctttctctccaactttccttttttaaaatcagcatgatgtgcctgtgagcatggaagagtcctctcagaagaatgttggccatgagactatcattcagaggaggaggggatttctctcttcaaggccataacagtggaagaacagtcatatgccattggaagtcttggccagcagtcctgaatccttcctgaagagttcagaaaatagatgtggtattgctctgaggaccaggcaggaggaactctacaacctgagtttgcctttgtgaggcattagtatagaccaaataaaaagctgcagaaattggaaagtttatgttttaaataaatgactgtgataaatntcagattatttgcacatttatggtactacgagtttataaagtccaagatggtgtgaaattggttctttttacttttatatttttgcttgaatcttaactctggaaatcacctgatgtagaagaagactgtgatgagctcgtctgtggaacatcacaagtatcgaaaatacagtaatggatgtttcctttctaatccacatttattgtttcttttgaaatcacgtctaaaaaatatgactcagactatagccgttgtttcccaaacttcagtctctttagtactacttgtattattttcttaatatttatcttttaaattttaaagtttttttaaaaaaa

SEQ ID NO: 407598 - DNA, 2733 bp, Homo sapiens
tgccattgctgggtataaaacgaggagctctctgttgacctgtaaatcattaatacttcttgacttagagtgaagtgacactctaagtcaagaagtattgaatgatttacaggtcacttcactttatagatgacattttcctctttccccttgatattttctatgttgtgttagataattggtagatatatagttgtggtttagtacatttagggcttctatttatttagattttgtttgttggagtctgtttccaaaagggaatgtgccatttagtctgcatctgtatctttgtggacttgatgatcactggtttgattttgaaaaatgtcttttccagcttttagttactctcatcaaatgtcacatattttctaatcacatgcactcctttaccacagaggcacataatcatttggcctcatagcagttatccatggccgtactgtagtaaagttccttagaactttgccaggagtgaactagaaaaaagtgcttactagggcctaagagttgctttgtgccgtgtagtctggcctttgcactagtagatcattgctgacataggtcagtttagagacctttctgtgttaatgcctcctggtactgtcttaagatacgtacagtgtctgtttttagatctatgcatatgtcatgaagctccttgtgggctctgcatgaagctgctgctttgtttttgggttaacagatgtgcctgtcaactagcatgtgtattgtccaaattccataaacttaaggtttttaagggctgtgtggtttctgagctctatgtgtctttcctatccttgtaccttcaaagggtgagaaatgagatttatacatccaaagttagtctgataaatatggctttttgtttctccatgtaacctagactgtcaaaaataagtgatggtgataagtaggcctggagcctcagcttctgtaaatctcattcctaaaattttgctagactcgtgttggcaaaaacaaatacctgtggattgtccttaaggcttttaatcagatacctgtgttgctgttagctgaactgtagtgaagcatcgatccaaatcggtcttctgaagtatcagttatgcttttgagtttagaaaatacttaggtgttagtctagtcttcccattcatgaatcagtgtatgtccatatcagagagcctcaacttcttttttcttcctttttaaaaatgattttagtgttttgatttagtgtatactacatagttcagtattattggctttaccagtgttgacagaaaaattttaaatctccagttgcaaacagcaatggattaggatatggaaataaaatcatggtgacatcactgctgagttatcttaaacctctgctacttaattctccatattgaaatgcatactcctccacatacatggcttccaagtaaaggcaattgtagaggggccctgtctatcccagtatggttggattttaaacatatctgtgtttccgttattttgggaactgattaatatttacaattttttttgtttatgagttattttgatactaagaaaagagagaatctagaacatcttgaagttgaaatacaaattttattcttttggtcttgggagaatttaagcagtctatgcaactcatcaaatggtgagaaatagccctccgaggttccagtaagctttcagtgactttgatacctccccaagtttcttgagttgctgcttgttaacacccagcttttaactgagtgtttgctcctgatggtttaggagattttcatgttgtatcacactgtcaagttttattttgtctttttatccctccgtggatgtgagtttgaaacaagcacggtacagtaatcctgcctgatagagtagtctggaatgagaattactttttgggtgagagagttctccattttaatgtttctaaagtttttcatatgaacttggcattggaaaagggaggtaaagaaaaaggacgtttactaaaagcagtgtctactcttcccctttgtgagtgtttattcatggctaatgaaaaaaagagaaggactcttgggttttgtgttgccatgttaagcatggagagggatgcttgacagcatgctaattgaagccagagcaagtatgtccttcatcaggtaatcaggaactcttcagttgaagctgaggaactaactgattagttgttgatcataatataattggttacaaagtggaagtgccagctggcttaagtacccaaagaaaagaatgcagcagcctaacttagtgttaccatatgttactgaatttgaaactgaccttttttcccaccctacttcacacacctaaaactcttttcttgtcagaccaaagagcgaaaagaaaaaaaaaagtaaaacactttaccaatctgtcactcaggtacaattttgtggtgagatttttgtctgttctctttgtattgctcttaagagtcctttctcagcatattattctgccattgcctctgtcttccttggggcacctcagctctggatgctacccctgggatatctactgctgttatgtgaatgataggaggtaagtgaccattatagtaagggctctttgtaaaaaaattcaaaaaatttaaaaaggatgtatacattttatagtctggctatcagtttgatatcttgctgtcaagtatgtttctcaatctgtatttatccatcccatcaataaatgttaatggtaaaacactcaaaagat

SEQ ID NO: 407599 - DNA, 2692 bp, Homo sapiens
tgccattgctgggtataaaacgaggagctctctgttgacctgtaaatcattaatacttcttgacttagagtgtcacttcactttatagatgacattttcctctttccccttgatattttctatgttgtgttagataattggtagatatatagttgtggtttagtacatttagggcttctatttatttagattttgtttgttggagtctgtttccaaaagggaatgtgccatttagtctgcatctgtatctttgtggacttgatgatcactggtttgattttgaaaaatgtcttttccagcttttagttactctcatcaaatgtcacatattttctaatcacatgcactcctttaccacagaggcacataatcatttggcctcatagcagttatccatggccgtactgtagtaaagttccttagaactttgccaggagtgaactagaaaaaagtgcttactagggcctaagagttgctttgtgccgtgtagtctggcctttgcactagtagatcattgctgacataggtcagtttagagacctttctgtgttaatgcctcctggtactgtcttaagatacgtacagtgtctgtttttagatctatgcatatgtcatgaagctccttgtgggctctgcatgaagctgctgctttgtttttgggttaacagatgtgcctgtcaactagcatgtgtattgtccaaattccataaacttaaggtttttaagggctgtgtggtttctgagctctatgtgtctttcctatccttgtaccttcaaagggtgagaaatgagatttatacatccaaagttagtctgataaatatggctttttgtttctccatgtaacctagactgtcaaaaataagtgatggtgataagtaggcctggagcctcagcttctgtaaatctcattcctaaaattttgctagactcgtgttggcaaaaacaaatacctgtggattgtccttaaggcttttaatcagatacctgtgttgctgttagctgaactgtagtgaagcatcgatccaaatcggtcttctgaagtatcagttatgcttttgagtttagaaaatacttaggtgttagtctagtcttcccattcatgaatcagtgtatgtccatatcagagagcctcaacttcttttttcttcctttttaaaaatgattttagtgttttgatttagtgtatactacatagttcagtattattggctttaccagtgttgacagaaaaattttaaatctccagttgcaaacagcaatggattaggatatggaaataaaatcatggtgacatcactgctgagttatcttaaacctctgctacttaattctccatattgaaatgcatactcctccacatacatggcttccaagtaaaggcaattgtagaggggccctgtctatcccagtatggttggattttaaacatatctgtgtttccgttattttgggaactgattaatatttacaattttttttgtttatgagttattttgatactaagaaaagagagaatctagaacatcttgaagttgaaatacaaattttattcttttggtcttgggagaatttaagcagtctatgcaactcatcaaatggtgagaaatagccctccgaggttccagtaagctttcagtgactttgatacctccccaagtttcttgagttgctgcttgttaacacccagcttttaactgagtgtttgctcctgatggtttaggagattttcatgttgtatcacactgtcaagttttattttgtctttttatccctccgtggatgtgagtttgaaacaagcacggtacagtaatcctgcctgatagagtagtctggaatgagaattactttttgggtgagagagttctccattttaatgtttctaaagtttttcatatgaacttggcattggaaaagggaggtaaagaaaaaggacgtttactaaaagcagtgtctactcttcccctttgtgagtgtttattcatggctaatgaaaaaaagagaaggactcttgggttttgtgttgccatgttaagcatggagagggatgcttgacagcatgctaattgaagccagagcaagtatgtccttcatcaggtaatcaggaactcttcagttgaagctgaggaactaactgattagttgttgatcataatataattggttacaaagtggaagtgccagctggcttaagtacccaaagaaaagaatgcagcagcctaacttagtgttaccatatgttactgaatttgaaactgaccttttttcccaccctacttcacacacctaaaactcttttcttgtcagaccaaagagcgaaaagaaaaaaaaaagtaaaacactttaccaatctgtcactcaggtacaattttgtggtgagatttttgtctgttctctttgtattgctcttaagagtcctttctcagcatattattctgccattgcctctgtcttccttggggcacctcagctctggatgctacccctgggatatctactgctgttatgtgaatgataggaggtaagtgaccattatagtaagggctctttgtaaaaaaattcaaaaaatttaaaaaggatgtatacattttatagtctggctatcagtttgatatcttgctgtcaagtatgtttctcaatctgtatttatccatcccatcaataaatgttaatggtaaaacactcaaaagat

SEQ ID NO: 407600 - DNA, 2679 bp, Homo sapiens
tgccattgctgggtataaaacgaggagctctctgttgacctgtaaatcattaatacttcttgacttagagtgaagtgacactctaagtcaagaagtattgaatgatttacaggtcacttcactttatagatgacattttcctctttccccttgatattttctatgttgtgttagataattggtagatatatagttgtggtttagtacatttagggcttctatttatttagattttgtttgttggagtctgtttccaaaagggaatgtgccatttagtctgcatctgtatctttgtggacttgatgatcactggtttgattttgaaaaatgtcttttccagcttttagttactctcatcaaatgtcacatattttctaatcacatgcactcctttaccacagaggcacataatcatttggcctcatagcagttatccatggccgtactgtagtaaagttccttagaactttgccaggagtgaactagaaaaaagtgcttactagggcctaagagttgctttgtgccgtgtagtctggcctttgcactagtagatcattgctgacataggtcagtttagagacctttctgtgttaatgcctcctggtactgtcttaagatacgtacagtgtctgtttttagatctatgcatatgtcatgaagctccttgtgggctctgcatgaagctgctgctttgtttttgggttaacagatgtgcctgtcaactagcatgtgtattgtccaaattccataaacttaaggtttttaagggctgtgtggtttctgagctctatgtgtctttcctatccttgtaccttcaaagggtgagaaatgagatttatacatccaaagttagtctgataaatatggctttttgtttctccatgtaacctagactgtcaaaaataagtgatggtgataagtaggcctggagcctcagcttctgtaaatctcattcctaaaattttgctagactcgtgttggcaaaaacaaatacctgtggattgtccttaaggcttttaatcagatacctgtgttgctgttagctgaactgtagtgaagcatcgatccaaatcggtcttctgaagtatcagttatgcttttgagtttagaaaatacttaggtgttagtctagtcttcccattcatgaatcagtgtatgtccatatcagagagcctcaacttcttttttcttcctttttaaaaatgattttagtgttttgatttagtgtatactacatagttcagtattattggctttaccagtgttgacagaaaaattttaaatctccagttgcaaacagcaatggattaggatatggaaatccatattgaaatgcatactcctccacatacatggcttccaagtaaaggcaattgtagaggggccctgtctatcccagtatggttggattttaaacatatctgtgtttccgttattttgggaactgattaatatttacaattttttttgtttatgagttattttgatactaagaaaagagagaatctagaacatcttgaagttgaaatacaaattttattcttttggtcttgggagaatttaagcagtctatgcaactcatcaaatggtgagaaatagccctccgaggttccagtaagctttcagtgactttgatacctccccaagtttcttgagttgctgcttgttaacacccagcttttaactgagtgtttgctcctgatggtttaggagattttcatgttgtatcacactgtcaagttttattttgtctttttatccctccgtggatgtgagtttgaaacaagcacggtacagtaatcctgcctgatagagtagtctggaatgagaattactttttgggtgagagagttctccattttaatgtttctaaagtttttcatatgaacttggcattggaaaagggaggtaaagaaaaaggacgtttactaaaagcagtgtctactcttcccctttgtgagtgtttattcatggctaatgaaaaaaagagaaggactcttgggttttgtgttgccatgttaagcatggagagggatgcttgacagcatgctaattgaagccagagcaagtatgtccttcatcaggtaatcaggaactcttcagttgaagctgaggaactaactgattagttgttgatcataatataattggttacaaagtggaagtgccagctggcttaagtacccaaagaaaagaatgcagcagcctaacttagtgttaccatatgttactgaatttgaaactgaccttttttcccaccctacttcacacacctaaaactcttttcttgtcagaccaaagagcgaaaagaaaaaaaaaagtaaaacactttaccaatctgtcactcaggtacaattttgtggtgagatttttgtctgttctctttgtattgctcttaagagtcctttctcagcatattattctgccattgcctctgtcttccttggggcacctcagctctggatgctacccctgggatatctactgctgttatgtgaatgataggaggtaagtgaccattatagtaagggctctttgtaaaaaaattcaaaaaatttaaaaaggatgtatacattttatagtctggctatcagtttgatatcttgctgtcaagtatgtttctcaatctgtatttatccatcccatcaataaatgttaatggtaaaacactcaaaagat

SEQ ID NO: 407601 - DNA, 2679 bp, Homo sapiens
tgccattgctgggtataaaacgaggagctctctgttgacctgtaaatcattaatacttcttgacttagagtgaagtgacactctaagtcaagaagtattgaatgatttacaggtcacttcactttatagatgacattttcctctttccccttgatattttctatgttgtgttagataattggtagatatatagttgtggtttagtacatttagggcttctatttatttagattttgtttgttggagtctgtttccaaaagggaatgtgccatttagtctgcatctgtatctttgtggacttgatgatcactggtttgattttgaaaaatgtcttttccagcttttagttactctcatcaaatgtcacatattttctaatcacatgcactcctttaccacagaggcacataatcatttggcctcatagcagttatccatggccgtactgtagtaaagttccttagaactttgccaggagtgaactagaaaaaagtgcttactagggcctaagagttgctttgtgccgtgtagtctggcctttgcactagtagatcattgctgacataggtcagtttagagacctttctgtgttaatgcctcctggtactgtcttaagatacgtacagtgtctgtttttagatctatgcatatgtcatgaagctccttgtgggctctgcatgaagctgctgctttgtttttgggttaacagatgtgcctgtcaactagcatgtgtattgtccaaattccataaacttaaggtttttaagggctgtgtggtttctgagctctatgtgtctttcctatccttgtaccttcaaagggtgagaaatgagatttatacatccaaagttagtctgataaatatggctttttgtttctccatgtaacctagactgtcaaaaataagtgatggtgataagtaggcctggagcctcagcttctgtaaatctcattcctaaaattttgctagactcgtgttggcaaaaacaaatacctgtggattgtccttaaggcttttaatcagatacctgtgttgctgttagctgaactgtagtgaagcatcgatccaaatcggtcttctgaagtatcagttatgcttttgagtttagaaaatacttaggtgttagtctagtcttcccattcatgaatcagtgtatgtccatatcagagagcctcaacttcttttttcttcctttttaaaaatgattttagtgttttgatttagtgtatactacatagttcagtattattggctttaccagtgttgacagaaaaattttaaatctccagttgcaaacagcaatggattaggatatggaaataaaatcatggtgacatcactgctgagttatcttaaacctctgctacttaattctccatattgaaatgcatactcctccacatacatggcttccaagtaaaggcaattgtagaggggccctgtctatcccagtatggttggattttaaacatatctgtgtttccgttattttgggaactgattaatatttacaattttttttgtttatgagttattttgatactaagaaaagagagaatctagaacatcttgaagttgaaatacaaattttattcttttggtcttgggagaatttaagcagtctatgcaactcatcaaatggtgagaaatagccctccgaggttccagtaagctttcagtgactttgatacctccccaagtttcttgagttgctgcttgttaacacccagcttttaactgagtgtttgctcctgatggtttaggagattttcatgttgtatcacactgtcaagttttattttgtctttttatccctccgtggatgtgagtttgaaacaagcacggtacagtaatcctgcctgatagagtagtctggaatgagaattactttttgggtgagagagttctccattttaatgtttctaaagtttttcatatgaacttggcattggaaaagggaggtaaagaaaaaggacgtttactaaaagcagtgtctactcttcccctttgtgagtgtttattcatggctaatgatgcttgacagcatgctaattgaagccagagcaagtatgtccttcatcaggtaatcaggaactcttcagttgaagctgaggaactaactgattagttgttgatcataatataattggttacaaagtggaagtgccagctggcttaagtacccaaagaaaagaatgcagcagcctaacttagtgttaccatatgttactgaatttgaaactgaccttttttcccaccctacttcacacacctaaaactcttttcttgtcagaccaaagagcgaaaagaaaaaaaaaagtaaaacactttaccaatctgtcactcaggtacaattttgtggtgagatttttgtctgttctctttgtattgctcttaagagtcctttctcagcatattattctgccattgcctctgtcttccttggggcacctcagctctggatgctacccctgggatatctactgctgttatgtgaatgataggaggtaagtgaccattatagtaagggctctttgtaaaaaaattcaaaaaatttaaaaaggatgtatacattttatagtctggctatcagtttgatatcttgctgtcaagtatgtttctcaatctgtatttatccatcccatcaataaatgttaatggtaaaacactcaaaagat

SEQ ID NO: 407602 - DNA, 393 bp, Homo sapiens
gatggcttagcttgggctcagaggcctgacacctttcacctaagatgggccttgccacataggggtaggagaacagggatttttagagaacacctttgtcagaaaaggtcctattgaggggctggctgattgaagagtataccaagtcctgtggccatttgcctggtggctttcagggaggaaagagaataatgtgttctcgggtacattctcagtactgtgtaaaaaggcactagcacagactaggcacttctttgttaaaaaaaagtttgtagaaacagaatattgcagtgttgaccagggtgatctcaaactcctgacttcaagtagtcctcctacctctgcctcctaaagtgctgaaattacaggcatgaatcaccatacctggccaga

SEQ ID NO: 407603 - DNA, 389 bp, Homo sapiens
gggctgctggtcttcacttcctgactccaaaaggatatgataaaacctaccttcttggataactgcaagaattaaataatactttatgtaaaaaagtttaggcggggtctgggtgccgtggctcatgcctataatcccagtactttgggaggctgaggtgggtggatcacttgaggccaggagctcaagtccagcctggccaacatggtgaaacctcgtctctacttaaaaactacaaaaattagccaggcacggtggcatgtgcctatggtcctagctactcgagaggctgaggcaggaggatcgcttgaaccaaggaggtggaagtgagccaagattatgccactgaactccagcctgggcaacagagcgagactctgtctcaaaaa

SEQ ID NO: 407604 - DNA, 2219 bp, Homo sapiens
aaaaaatagaagataaagagaacaaaacaacaaaaaattatagaaactaaatccttatataattccactacttggggatacaattgtcaatactttatggatgtccttccagatatattctttgtatatacacacaaatataaataaacacacttgtaagatatataaagacatcaaattttaaatgttcttctatagtttttatttcactcaacatgttactaaacttttgagttcagtagacatacatcataccgccatattaatgccttcgattttctcattatatgaatgcatcaaaattttttgactaatctgaaggctatttttaaaatttatttatttttaattttttttctgaagaaaaaatgatttttttctatacaatgatgctagaagaaactgatttaaaagttacagctttgaatgttaaatgatgaagggttttggagtcattccttttgacctactaattttacaattctcttgaacatcaagtgttttttagtggtcatcatgtgatatttatgtgcatattttgggcatcactgttctaattcccattgactgacgtgttggggacctcattcatttctttcagttcttaaacctatagattgatactaatctattaatgtacttaaaatgtaaaggaaccccaggtgtttagacaattaaccaataaaaattatttctctcagtttctaaacctatagattgatactattaaatttatttaaaatgtaaaggaactccaggtatttagacaattaaaccaataaaaattaggtcaaagaacatcaaacttttcttttaagctaatataaaaatatctaagaccttctgctgattgtcacatagtataagggtatgtgagtaaatggttgctaaactgcattttggcactaacatatgaccagatccatctgttgggatcccatgccgtggtcccatggcagtgagctattgtggaaaatgtattctactgagtggagggagatgaaggaagtgatcactaaggttggtgagcttgaggggaggtctcttagcccctctagagctcagattgttcatcttcaaaaccatggtgctaaagaatatagctctaaatttttctccagtgcaaatattctatgcttctgtgacagagaactctgaagtcacatggcctaagtcagggcagctgctacagacccgagtactacagatccttggctgcttggtgtacatccctggccactgacctcttctcacccactgttctttctctcttaattgattctgtcctgacccaggactcagatcttaactgtgtatctgaacacctttgtcttgcactttctttcctcaattctcaattatgacctgtttcttgcttgtgttctgggcagtttttcatgtctcactgggttaacccaactacttgggtttcccataacccttagggctacaccgtaaatgtgctgcctgtgaccatggcatccaaggctcgtcataagactggactgggtctgcaccaactccatacatctggaagaaaagaaaagcttcaacacctcattaccttggacacagtaattacttggaagatgttagtacagatacatgtatgacatgaataaacttgaaaacattctgctgggtgaaagaagccaaacacaaaaggtgacatattgtatgattccatttatatgaaataatcagaaataaaaagtaggctagtgattgccaggggctgaggggaagggaaagcaggagtgaatggttattggtacagggtttcttttggggctgaatacaatgttctggaattagagaatggtgatggttgcacaaccttatgaatatactaaaaaccactgaattatacactttaaacatgttggattttattatatgtaaattatatatcaataaaaaatggttaggatgggaacgatagctcacgcctgtaatcccagcactttgggaggccgaggcgggcggatcatgaggtcaggagtttgagaccagcctggccaacatagtgaaaccctgtctctactgaaaatacaaaaattagctgggcatggtggcacacacctgtagtcccagctacttgggaggctgaggcaggagaatctcttgaacctgggagcagaaattatggtcagccaagattgcaccattgcactccagcctgggcaacagagcgagactccgtctcacaaaaaaaaaaa

SEQ ID NO: 407605 - DNA, 706 bp, Homo sapiens
  misc_feature (655)..(655): n is a, c, g, or t
  misc_feature (705)..(706): n is a, c, g, or t
aaaaaatagaagataaagagaacaaaacaacaaaaaattatagaaactaaatccttatataattccactacttggggatacaattgtcaatactttatggatgtccttccagatatattctttgtatatacacacaaatataaataaacacacttgtaagatatataaagacatcaaattttaaatgttcttctatagtttttatttcactcaacatgttactaaacttttgagttcagtagacatacatcataccgccatattaatgccttcgattttctcattatatgaatgcatcaaaattttttgactaatctgaaggctatttttaaaatttatttatttttaattttttttctgaagaaaaaatgatttttttctatacaatgatgctagaagaaactgatttaaaagttacagctttgaatgttaaatgatgaagggttttggagtcattccttttgacctactaattttacaattctcttgaacatcaagtgttttttagtggtcatcatgtgatatttatgtgcatattttgggcatcactgttctaattcccattgactgacgtgttggggacctcattcatttctttcagttcttaaacctatagattgatactaatctattaatgtacttaaaaaaaaaattngggggtttaaaaaaaaaaaaggggggggggaaaaaaaaaacccccccccnn

SEQ ID NO: 407606 - DNA, 445 bp, Homo sapiens
atttgtcaagattcctcattaaatgtaatagataattcaactgagtggctggaaggttttttctaaaggcctcaccggatgaagctggtgttatgcctaggaatctatagaatggaagtgctgtacaatgaatctgagactgacttcctctttgatacaggtcaagaaattgaagtttgttacttctgatctctctcagaatacattttgagataaatgtcacaataaaacataactgtcctgacctcagcactaccttttacatttttagacttttacagaagagtttatttctccagggatactaatatacattaaactacacatgtccatttaccctctgttttttgaagtataacccacaggacctggtaaacaaagtattgggttcattagggtgtgaatttgagcctacataaaatctagaactgtttgaacacatcag

SEQ ID NO: 407607 - DNA, 536 bp, Homo sapiens
gcaggctgtggtccagaactatgagcagacttgcctgtcactctccaaacatttactgaacacctactgtgtgccaggccctgtgctttgtcaggctctgggggagacaggtcattactctgcagtgtgggaagcggggctgccctggaagtgtgtactcagtgctgtgggggtacagagggagggctggagaacttagctggtgggaaaggagggttctggaaggcttcctcagaggtagtggcattgggccagaacttacagtagggaagagcatgtggcaaggcacagaggagatgggagcctgccctggtgaggggtccagtggtgacagagctcagtgtgggtccagagatggtgtcaggtgagggctgagaggggagggcaagtgccccttgagatgggctgaacgtgatgatgatctgtggccagtgggagatgatagaagtcttgaggttgggaatataagaattaggtctcttttagaaagagaggacatggagaaaatccatatatttttagctaccaaaaaaaaa

SEQ ID NO: 407608 - DNA, 401 bp, Homo sapiens
gcaggctgtggtccagaactatgagcagacttgcctgtcactctccaaacatttactgaacacctactgtgtgccaggccctgtgctttgtcaggctctgggggagacaggtcattactctgcagtgtgggaagcggggctgccctggaagtgtgtactcagtgctgtgggggtacagagggagggctggagaacttagctggtgggaaaggagggttctggaaggcttcctcagaggtagtggcattgggcttacaagggagggcgatctgtgtggacaagagtgttacagcacaaaagcatgtaaacaaaaaagcatggagcatctttaagaaatagcacggagtttgctgtgactggatctgctgagattggagggtgagaaggacgtgcaggcctgt

SEQ ID NO: 407609 - DNA, 708 bp, Homo sapiens
agaaagcaaactgggatggtgctgtgctatgggctagcaacagcaggaagtcatttctgtccctaggtctgaagagggaagcaggggagccaacaccaaggaaccagagatcttagagtctgaaagtctgcatgatagaagccatggcctttagtagagggatcttgcctactcttagcagcctggcttggaggggcctggggaaataataccccaacctctctcctcttcttcaatattgatgacttccattggttaatatcaaactggaagttggagagaaagggagtctatctatacaagtcagcaccctgtagcccagaagagagtaaaaagggggtaaaaagcaatttcccgaggggacaaaccagaaaacacccagcacagaaggaggaacaaacatttggaggaacaaacagaaaatatcagaaaacattttaatcctgggtcctgggacgtcatggaaggttttgaagttaggagcaccgccatcctctagggggagctcaagcatttctctccactcatcccaaaggcggtgcatcaaaagatcagggtgaaactgacttcaaggaaagagccctcggctagaggaagaagcctggagaagtaaagggattgctcctggaattggaaatctaccctttgcacttctatttactgcatttggattgatttgcaagaataaccattaaaataatcaaagct

SEQ ID NO: 407610 - DNA, 325 bp, Homo sapiens
atgcttagaaaggaggatagaatttggaggagcaggggctgggcacggtggctaatgctgtaatcccagcactttgggaggccgaggcaggtgaatcacttgaggccaggagtttgagaccagcctggtcaagatgatgagaccccatctctactaaaaatacaaaaattagctgggcatggtagcacgggcctgtggtcccagctactctggaggcagaggtgggaggatcacttgagcctgggactcagaggtagcagtgagccgagatcctgccacctgccactgaactccagcttgggtgacaagaatgagaccccatcaa

SEQ ID NO: 407611 - DNA, 2073 bp, Homo sapiens
ggaacataaaaactaagactatgtcagccccggtgttactcaggccgaggtatagaaggaggctatgatgaagcctacccatagggcttctggggctgaaacgagctaatgatgtcgaagctgctagaactgtacctgtgtcagagcgagtgtgcagcatacgttatcatcactgtcatcactccagcattctgactgtgcctttaaactagtgtgggattttgcccaaacctctaaaccctcccctagccgtggtttcccccgcagtctgaagactctaatacttgacactcgttcagagagatgtttggggaatttatagacacttaacatttatgcatccttatatatcgggtccaggaggaattacagacacttaaaccattactgccttcttcctcaaaagaataacagctttggtaactgggttagcagaggtgttagtggacttagggttgtaaacagatactcatggcactgacatcgatgagtctatgagggaaattagaaagataaatacatctgggatgtaaactcggaaaggcgaggctgttcaaaatgttggtgctattgaattgtgattctcggtgtttgtacattgctaataatgttaaaccatgaagcctgtgagatcttgtgttgcagcgtggtttggccctagcgttcttgcatgctaacctaaggtagaagattagcagcctgtttgcatgcagccggatgctgcccctgacgtgaagcatgttctgggaggttgacccaacctcctttggctgtggcctcattcaccccgtcctgtctgtggcctcattcaccgtgatattaggttgaaaaagctggttgatgaacgggaatgcttattggaacagattaagaaactcaaagggcagctggaggagagacagaagattggcaaactagacaatcttcgatctgaagatgatgtcttggaaaacgggacagacatgcatgtaatggacctacaaagggatgccaacagacagatcagcgacctcaaatttaaacttgcaaaatctgagcaagagataactgcattagaacaaaatgtaataaggttagagagtcaagtatcacgttacaaatcagcggctgaaaatgcagaaaaaatagaagatgaacttaaggcagaaaaacggaaactccaaagagagctccgctctgcattggataaaacagaagagctcgaggtgagcaacggccacttagtgaagcgtctggaaaaaatgaaagcaaatcggagtgcactcttgtcccagcagtaaattccagctctgatcaggcaactggttggtgactggagagcattgtttcataggcttttctctgtcctgtctgggagcgctgcttcttcccctgccttccgagagacgaagaccgtggcgagcttggcgcttaggggctcccgtgccatggctcaccccagggagccccagcagccaccaggtgcctctgtctgcagacccctggcccgggctggcgccgacgctcagaacctgcaggtacttcataagcacacaggggcctcgagggagctctgtgtctgaccgcacagcagcctctgaatgccgctggaagtgatgatcaaagtaaagattcagttgggacttgagttttttttttttttcatgtgtcttgctgaagattaaggggaaatgttacagtgttgggacttcctttcatggcagaatctacaatttgagcgacttcagtagtatctcttagtctacgcttttcatacacaaaacactgtggaaccacaagccattaccaagcaaaactctttcactggaaacaagggggcagtctagaagtaaaagtgaccttaagaagactctttacaggcaacaaatgaagcttttctaagggatttttgcatcagttcagtcataagaatacttttttccagggtaattaggcaatagcttcactgaaaatgacagcttttcattgcattatttaatccttatatttggaattgaagtcgttaacttcttttaaagaatgtactattagaaaaattaaaaatgaaatgttgagagacttcaaaaaaaaagt

SEQ ID NO: 407612 - DNA, 1344 bp, Homo sapiens
ctgagaagagtactgatggacacaaagtgccttctgtcatttgacatgctgcttcctttctgatgggctctaacttcagcttttcggtctcattcagagtagagaaattaacagattttactggcgggtgttttcagattaagaaactcaaagggcagctggaggagagacagaagattggcaaactagacaatcttcgatctgaagatgatgtcttggaaaacgggacagacatgcatgtaatggacctacaaagggatgccaacagacagatcagcgacctcaaatttaaacttgcaaaatctgagcaagagataactgcattagaacaaaatgtaataaggttagagagtcaagtatcacgttacaaatcagcggctgaaaatgcagaaaaaatagaagatgaacttaaggcagaaaaacggaaactccaaagagagctccgctctgcattggataaaacagaagagctcgaggtgagcaacggccacttagtgaagcgtctggaaaaaatgaaagcaaatcggagtgcactcttgtcccagcagtaaattccagctctgatcaggcaactggttggtgactggagagcattgtttcataggcttttctctgtcctgtctgggagcgctgcttcttcccctgccttccgagagacgaagaccgtggcgagcttggcgcttaggggctcccgtgccatggctcaccccagggagccccagcagccaccaggtgcctctgtctgcagacccctggcccgggctggcgccgacgctcagaacctgcaggtacttcataagcacacaggggcctcgagggagctctgtgtctgaccgcacagcagcctctgaatgccgctggaagtgatgatcaaagtaaagattcagttgggacttgagttttttttttttttcatgtgtcttgctgaagattaaggggaaatgttacagtgttgggacttcctttcatggcagaatctacaatttgagcgacttcagtagtatctcttagtctacgcttttcatacacaaaacactgtggaaccacaagccattaccaagcaaaactctttcactggaaacaagggggcagtctagaagtaaaagtgaccttaagaagactctttacaggcaacaaatgaagcttttctaagggatttttgcatcagttcagtcataagaatacttttttccagggtaattaggcaatagcttcactgaaaatgacagcttttcattgcattatttaatccttatatttggaattgaagtcgttaacttcttttaaagaatgtactattagaaaaattaaaaatgaaatgttgagagacttcaaaaaaaaagt

SEQ ID NO: 407613 - DNA, 1377 bp, Homo sapiens
cgtggtggctcatgcctgtaatcccagcactttgggaggccaaggcggacagatcacgaggtcaggagatcgagaccatcctggccaacatggcaaaaccccgtctctactaaaatacaaaaaattaactgagggtggtggcgcacacctgtagtcccgggaggctgaggcaggggaatcgcttgaacccgtgaggcggagcttgcagtgagccgagatcacgccactgcactccagcctgggcgactgagcgagattccatctcaagagaaaaaaaagagaaccatcaggatccccaagggtgttccctctctggagtccagttgtttcagaggaggaagggcatcatgagggaccaggggccaagttatcattttatttttcagtaggattggaatttcggtaacacagaaccctgttatgtttggaggaaacaagttccttaaagctcactggctttcctccgttcccagctccgctctgcattggataaaacagaagagctcgaggtgagcaacggccacttagtgaagcgtctggaaaaaatgaaagcaaatcggagtgcactcttgtcccagcagtaaattccagctctgatcaggcaactggttggtgactggagagcattgtttcataggcttttctctgtcctgtctgggagcgctgcttcttcccctgccttccgagagacgaagaccgtggcgagcttggcgcttaggggctcccgtgccatggctcaccccagggagccccagcagccaccaggtgcctctgtctgcagacccctggcccgggctggcgccgacgctcagaacctgcaggtacttcataagcacacaggggcctcgagggagctctgtgtctgaccgcacagcagcctctgaatgccgctggaagtgatgatcaaagtaaagattcagttgggacttgagttttttttttttttcatgtgtcttgctgaagattaaggggaaatgttacagtgttgggacttcctttcatggcagaatctacaatttgagcgacttcagtagtatctcttagtctacgcttttcatacacaaaacactgtggaaccacaagccattaccaagcaaaactctttcactggaaacaagggggcagtctagaagtaaaagtgaccttaagaagactctttacaggcaacaaatgaagcttttctaagggatttttgcatcagttcagtcataagaatacttttttccagggtaattaggcaatagcttcactgaaaatgacagcttttcattgcattatttaatccttatatttggaattgaagtcgttaacttcttttaaagaatgtactattagaaaaattaaaaatgaaatgttgagagacttcaaaaaaaaagt

SEQ ID NO: 407614 - DNA, 1320 bp, Homo sapiens
cgtggtggctcatgcctgtaatcccagcactttgggaggccaaggcggacagatcacgaggtcaggagatcgagaccatcctggccaacatggcaaaaccccgtctctactaaaatacaaaaaattaactgagggtggtggcgcacacctgtagtcccgggaggctgaggcaggggaatcgcttgaacccgtgaggcggagcttgcagtgagccgagatcacgccactgcactccagcctgggcgactgagcgagattccatctcaagagaaaaaaaagagaaccatcaggatccccaagggtgttccctctctggagtccagttgtttcagaggaggaagggcatcatgagggaccaggggccaagttatcattttatttttcagtaggattggaatttcggtaacacagaaccctgttatgtttggaggaaacaagttccttaaagctcactggctttcctccgttcccagctccgctctgcattggataaaacagaagagctcgaggtgagcaacggccacttagtgaagcctctgatcaggcaactggttggtgactggagagcattgtttcataggcttttctctgtcctgtctgggagcgctgcttcttcccctgccttccgagagacgaagaccgtggcgagcttggcgcttaggggctcccgtgccatggctcaccccagggagccccagcagccaccaggtgcctctgtctgcagacccctggcccgggctggcgccgacgctcagaacctgcaggtacttcataagcacacaggggcctcgagggagctctgtgtctgaccgcacagcagcctctgaatgccgctggaagtgatgatcaaagtaaagattcagttgggacttgagttttttttttttttcatgtgtcttgctgaagattaaggggaaatgttacagtgttgggacttcctttcatggcagaatctacaatttgagcgacttcagtagtatctcttagtctacgcttttcatacacaaaacactgtggaaccacaagccattaccaagcaaaactctttcactggaaacaagggggcagtctagaagtaaaagtgaccttaagaagactctttacaggcaacaaatgaagcttttctaagggatttttgcatcagttcagtcataagaatacttttttccagggtaattaggcaatagcttcactgaaaatgacagcttttcattgcattatttaatccttatatttggaattgaagtcgttaacttcttttaaagaatgtactattagaaaaattaaaaatgaaatgttgagagacttcaaaaaaaaagt

SEQ ID NO: 407615 - DNA, 2241 bp, Homo sapiens
gtaatttgactgtaaattaaaatagaactcaaaaggatgataaatttaatttatattgtgcttaacattatctggtgtttactgtgcctttcaaaacaacttaggatctttggaaaacataattagagaaaaatgtaacttggattagcatgtggctagatgattttttaaatgaaaatgaagatgcattttatatgaattattttcttttcacatggctaatcaaggttagtttttcattctatgaagaatctggaggtaggctctgcatgacagcagtgtcctagtgagctaagagctttgagtcagggtctgactcgggcgtgtgagtttggatctggaaaaacagcgggtgcagtgtttaggggagtgttcccgtggctgggccgcaaggcctgaagaaacttgcttagtggttctgggcctctgagcctcatctatagaaggaggctatgatgaagcctacccatagggcttctggggctgaaacgagctaatgatgtcgaagctgctagaactgtacctgtgtcagagcgagtgtgcagcatacgttatcatcactgtcatcactccagcattctgactgtgcctttaaactagtgtgggattttgcccaaacctctaaaccctcccctagccgtggtttcccccgcagtctgaagactctaatacttgacactcgttcagagagatgtttggggaatttatagacacttaacatttatgcatccttatatatcgggtccaggaggaattacagacacttaaaccattactgccttcttcctcaaaagaataacagctttggtaactgggttagcagaggtgttagtggacttagggttgtaaacagatactcatggcactgacatcgatgagtctatgagggaaattagaaagataaatacatctgggatgtaaactcggaaaggcgaggctgttcaaaatgttggtgctattgaattgtgattctcggtgtttgtacattgctaataatgttaaaccatgaagcctgtgagatcttgtgttgcagcgtggtttggccctagcgttcttgcatgctaacctaaggtagaagattagcagcctgtttgcatgcagccggatgctgcccctgacgtgaagcatgttctgggaggttgacccaacctcctttggctgtggcctcattcaccccgtcctgtctgtggcctcattcaccgtgatattaggttgaaaaagctggttgatgaacgggaatgcttattggaacagattaagaaactcaaagggcagctggaggagagacagaagattggcaaactagacaatcttcgatctgaagatgatgtcttggaaaacgggacagacatgcatgtaatggacctacaaagggatgccaacagacagatcagcgacctcaaatttaaacttgcaaaatctgagcaagagataactgcattagaacaaaatgtaataaggttagagagtcaagtatcacgttacaaatcagcggctgaaaatgcagaaaaaatagaagatgaacttaaggcagaaaaacggaaactccaaagagagctccgctctgcattggataaaacagaagagctcgaggtgagcaacggccacttagtgaagcgtctggaaaaaatgaaagcaaatcggagtgcactcttgtcccagcagtaaattccagctctgatcaggcaactggttggtgactggagagcattgtttcataggcttttctctgtcctgtctgggagcgctgcttcttcccctgccttccgagagacgaagaccgtggcgagcttggcgcttaggggctcccgtgccatggctcaccccagggagccccagcagccaccaggtgcctctgtctgcagacccctggcccgggctggcgccgacgctcagaacctgcaggtacttcataagcacacaggggcctcgagggagctctgtgtctgaccgcacagcagcctctgaatgccgctggaagtgatgatcaaagtaaagattcagttgggacttgagttttttttttttttcatgtgtcttgctgaagattaaggggaaatgttacagtgttgggacttcctttcatggcagaatctacaatttgagcgacttcagtagtatctcttagtctacgcttttcatacacaaaacactgtggaaccacaagccattaccaagcaaaactcttgccccgactgcatcttgactttgttcatctcttcgagcgcttatcaagcttgt

SEQ ID NO: 407616 - DNA, 2101 bp, Homo sapiens
gtaatttgactgtaaattaaaatagaactcaaaaggatgataaatttaatttatattgtgcttaacattatctggtgtttactgtgcctttcaaaacaacttaggatctttggaaaacataattagagaaaaatgtaacttggattagcatgtggctagatgattttttaaatgaaaatgaagatgcattttatatgaattattttcttttcacatggctaatcaaggttagtttttcattctatgaagaatctggaggtaggctctgcatgacagcagtgtcctagtgagctaagagctttgagtcagggtctgactcgggcgtgtgagtttggatctggaaaaacagcgggtgcagtgtttaggggagtgttcccgtggctgggccgcaaggcctgaagaaacttgcttagtggttctgggcctctgagcctcatctatagaaggaggctatgatgaagcctacccatagggcttctggggctgaaacgagctaatgatgtcgaagctgctagaactgtacctgtgtcagagcgagtgtgcagcatacgttatcatcactgtcatcactccagcattctgactgtgcctttaaactagtgtgggattttgcccaaacctctaaaccctcccctagccgtggtttcccccgcagtctgaagactctaatacttgacactcgttcagagagatgtttggggaatttatagacacttaacatttatgcatccttatatatcgggtccaggaggaattacagacacttaaaccattactgccttcttcctcaaaagaataacagctttggtaactgggttagcagaggtgttagtggacttagggttgtaaacagatactcatggcactgacatcgatgagtctatgagggaaattagaaagataaatacatctgggatgtaaactcggaaaggcgaggctgttcaaaatgttggtgctattgaattgtgattctcggtgtttgtacattgctaataatgttaaaccatgaagcctgtgagatcttgtgttgcagcgtggtttggccctagcgttcttgcatgctaacctaaggtagaagattagcagcctgtttgcatgcagccggatgctgcccctgacgtgaagcatgttctgggaggttgacccaacctcctttggctgtggcctcattcaccccgtcctgtctgtggcctcattcaccgtgatattaggttgaaaaagctggttgatgaacgggaatgcttattggaacaggtaacaatctttttattactttaccggttcatgaacagggcacctgaaaccacctgcccatccttccttcttgcttactcagaaaacccctaagttaatcatgtctgaaagtctttatcaagccaactggtgttcttaagattgctatccaaatagaacatcaaagttaatattttcatccaaagagaacatcctgagtcatatgaggtttaataaggatgtctcaaagacccaaagccatggaattgaatttggtacattttactgaattgctgcttaaaataaatataaatgttgattattaataatattaatgattaactgttgagagacaagagcattactgagtcattccaaatagcacttctcttgtccatatgggttgtttgtccataaaagtcagttttgtactcttggtgatcagcacccctctctcacaggtgtttctttgttacagctaaacaaagttgttttaaccatgtttatcttcattgctctctcctacctcaagaagtagcaggccaggtgcagtggctcacacctgtaatcgtagcactttgggaggccaaggcgggcggatcacttgaggtcaggagttcaagagcagtctgccaacatggtgaaaccccgtctctactaaaaatacaaaaattagccgggtgtgatggtgcgcgcccgtaatcccagctactgggaggtgaagagaaattcttgaaccggaagcaaagtgcgtggaccgatcgcacatgcttccactggttagaaaggaatccttaaaacagaactcgaagtctttcgttttttcggggggtatactcacccttctttctagacaagtgtttctcca

SEQ ID NO: 407617 - DNA, 2012 bp, Homo sapiens
ctgagaagagtactgatggacacaaagtgccttctgtcatttgacatgctgcttcctttctgatgggctctaacttcagcttttcggtctcattcagagtagagaaattaacagattttactggcgggtgttttcagattaagaaactcaaagggcagctggaggagagacagaagattggcaaactagacaatcttcgatctgaagatgatgtcttggaaaacgggacagacatgcatgtaatggacctacaaagtaaatgtcaattcttgtgtagaagtaaatgctttcacatgtgctgttttagtatacttgtgctggcagagaaaactgtcacggcaaagaatgccctcattccctcacatccccacaaaagcccttaaaaataaaagcacaaggaggggtaggtagacagaacaatggtgtttctctctgagcctatgaaatagaacaggtacccaaaaacgtgcaccaagataccaccacatgttgtgccgatggaaaccacatttactttgctggatacagcaatctttcgatctgttgattgtatgaaaaaaaaaaaaatgaaaggcttttttcatgctaataaactagaaacagtcttaagggagataaaattatgcccagtctctctccgcccttttccctaccccctaccatctctttgtcttcttcactcataggcactctcttgcctgaggtttcctgccccaagcacaggggcggaaggcactttccctgggttcatggggagagagtgccttctcctactctcagctctgggaggttgtggaggcagggccagaactaacagatttgtgagatgattacaaagtaagggcttggttcccagtaactattgttttaatatttgaaaagcccaagagcttaacagattttccttctctttcaacctttaggggatgccaacagacagatcagcgacctcaaatttaaacttgcaaaatctgagcaagagataactgcattagaacaaaatgtaataaggttagagagtcaagtatcacgttacaaatcagcggctgaaaatgcagaaaaaatagaagatgaacttaaggcagaaaaacggaaactccaaagagagctccgctctgcattggataaaacagaagagctcgaggtgagcaacggccacttagtgaagcgtctggaaaaaatgaaagcaaatcggagtgcactcttgtcccagcagtaaattccagctctgatcaggcaactggttggtgactggagagcattgtttcataggcttttctctgtcctgtctgggagcgctgcttcttcccctgccttccgagagacgaagaccgtggcgagcttggcgcttaggggctcccgtgccatggctcaccccagggagccccagcagccaccaggtgcctctgtctgcagacccctggcccgggctggcgccgacgctcagaacctgcaggtacttcataagcacacaggggcctcgagggagctctgtgtctgaccgcacagcagcctctgaatgccgctggaagtgatgatcaaagtaaagattcagttgggacttgagttttttttttttttcatgtgtcttgctgaagattaaggggaaatgttacagtgttgggacttcctttcatggcagaatctacaatttgagcgacttcagtagtatctcttagtctacgcttttcatacacaaaacactgtggaaccacaagccattaccaagcaaaactctttcactggaaacaagggggcagtctagaagtaaaagtgaccttaagaagactctttacaggcaacaaatgaagcttttctaagggatttttgcatcagttcagtcataagaatacttttttccagggtaattaggcaatagcttcactgaaaatgacagcttttcattgcattatttaatccttatatttggaattgaagtcgttaacttcttttaaagaatgtactattagaaaaattaaaaatgaaatgttgagagacttcaaaaaaaaagt

SEQ ID NO: 407618 - DNA, 862 bp, Homo sapiens
cttatgttaccactttgtgttcctttctccccatctctttcaggttcactgatcagttgtacgcactttggtctctttacgaaatcccatatttcttggaggttttgttcattgtttcataggcttttctctgtcctgtctgggagcgctgcttcttcccctgccttccgagagacgaagaccgtggcgagcttggcgcttaggggctcccgtgccatggctcaccccagggagccccagcagccaccaggtgcctctgtctgcagacccctggcccgggctggcgccgacgctcagaacctgcaggtacttcataagcacacaggggcctcgagggagctctgtgtctgaccgcacagcagcctctgaatgccgctggaagtgatgatcaaagtaaagattcagttgggacttgagttttttttttttttcatgtgtcttgctgaagattaaggggaaatgttacagtgttgggacttcctttcatggcagaatctacaatttgagcgacttcagtagtatctcttagtctacgcttttcatacacaaaacactgtggaaccacaagccattaccaagcaaaactctttcactggaaacaagggggcagtctagaagtaaaagtgaccttaagaagactctttacaggcaacaaatgaagcttttctaagggatttttgcatcagttcagtcataagaatacttttttccagggtaattaggcaatagcttcactgaaaatgacagcttttcattgcattatttaatccttatatttggaattgaagtcgttaacttcttttaaagaatgtactattagaaaaattaaaaatgaaatgttgagagacttcaaaaaaaaagt

SEQ ID NO: 407619 - DNA, 2461 bp, Homo sapiens
gtaatttgactgtaaattaaaatagaactcaaaaggatgataaatttaatttatattgtgcttaacattatctggtgtttactgtgcctttcaaaacaacttaggatctttggaaaacataattagagaaaaatgtaacttggattagcatgtggctagatgattttttaaatgaaaatgaagatgcattttatatgaattattttcttttcacatggctaatcaaggttagtttttcattctatgaagaatctggaggtaggctctgcatgacagcagtgtcctagtgagctaagagctttgagtcagggtctgactcgggcgtgtgagtttggatctggaaaaacagcgggtgcagtgtttaggggagtgttcccgtggctgggccgcaaggcctgaagaaacttgcttagtggttctgggcctctgagcctcatctatagaaggaggctatgatgaagcctacccatagggcttctggggctgaaacgagctaatgatgtcgaagctgctagaactgtacctgtgtcagagcgagtgtgcagcatacgttatcatcactgtcatcactccagcattctgactgtgcctttaaactagtgtgggattttgcccaaacctctaaaccctcccctagccgtggtttcccccgcagtctgaagactctaatacttgacactcgttcagagagatgtttggggaatttatagacacttaacatttatgcatccttatatatcgggtccaggaggaattacagacacttaaaccattactgccttcttcctcaaaagaataacagctttggtaactgggttagcagaggtgttagtggacttagggttgtaaacagatactcatggcactgacatcgatgagtctatgagggaaattagaaagataaatacatctgggatgtaaactcggaaaggcgaggctgttcaaaatgttggtgctattgaattgtgattctcggtgtttgtacattgctaataatgttaaaccatgaagcctgtgagatcttgtgttgcagcgtggtttggccctagcgttcttgcatgctaacctaaggtagaagattagcagcctgtttgcatgcagccggatgctgcccctgacgtgaagcatgttctgggaggttgacccaacctcctttggctgtggcctcattcaccccgtcctgtctgtggcctcattcaccgtgatattaggttgaaaaagctggttgatgaacgggaatgcttattggaacagattaagaaactcaaagggcagctggaggagagacagaagattggcaaactagacaatcttcgatctgaagatgatgtcttggaaaacgggacagacatgcatgtaatggacctacaaagggatgccaacagacagatcagcgacctcaaatttaaacttgcaaaatctgagcaagagataactgcattagaacaaaatgtaataaggttagagagtcaagtatcacgttacaaatcagcggctgaaaatgcagaaaaaatagaagatgaacttaaggcagaaaaacggaaactccaaagagagctccgctctgcattggataaaacagaagagctcgaggtgagcaacggccacttagtgaagcgtctggaaaaaatgaaagcaaatcggagtgcactcttgtcccagcagtaaattccagctctgatcaggcaactggttggtgactggagagcattgtttcataggcttttctctgtcctgtctgggagcgctgcttcttcccctgccttccgagagacgaagaccgtggcgagcttggcgcttaggggctcccgtgccatggctcaccccagggagccccagcagccaccaggtgcctctgtctgcagacccctggcccgggctggcgccgacgctcagaacctgcaggtacttcataagcacacaggggcctcgagggagctctgtgtctgaccgcacagcagcctctgaatgccgctggaagtgatgatcaaagtaaagattcagttgggacttgagttttttttttttttcatgtgtcttgctgaagattaaggggaaatgttacagtgttgggacttcctttcatggcagaatctacaatttgagcgacttcagtagtatctcttagtctacgcttttcatacacaaaacactgtggaaccacaagccattaccaagcaaaactctttcactggaaacaagggggcagtctagaagtaaaagtgaccttaagaagactctttacaggcaacaaatgaagcttttctaagggatttttgcatcagttcagtcataagaatacttttttccagggtaattaggcaatagcttcactgaaaatgacagcttttcattgcattatttaatccttatatttggaattgaagtcgttaacttcttttaaagaatgtactattagaaaaattaaaaatgaaatgttgagagacttcaaaaaaaaagt

SEQ ID NO: 407620 - DNA, 2006 bp, Homo sapiens
cctccatctacagcctcgtggcggacgggacctgttaggacactgccattgtgggtaacaaggacccgccttccatctgggccgccgtcccagggaaaaccttcctcaacatcacgccagctgaggttggtgtcctggttggcaaagactggtcaagctttgtcatgaatgggctgacactggggggccagaaatatactgtggtcctggactcactgctgcaggatggggaattgaccacggatcttcgtatgaagagcatcggtggagcccccaccttcaacgtcattgtcaccatgactgccaagacgctaggcctgctgatgggcaaagaaggtatccatggcaatttcatcgacaagtaatgttatgaaatggcctcccaccttcagcgttcccagtactgacctcctttgttccttccactccaccgctccccacagctttgcccgcctttccttcacatacacacaccattttaatttcaggagtcattactccacacaccttattgctgccaaaaccacatgggctgggggccagggatagatggacagacaccttcccccacccatacccctcctgtgtgtggctggaaaacttttttgttttgatggattttttatgaataaaaaagtttctactaaaaaaaatcaataactgtacatatgtgggcatattgtttgagtctgtattctttcactttgatgtatttatgaatactgacaccattactactgttttaaaattactgtagctttaaaatcaggtttgaaatctagcagagtaagtcctccaacttattgcttcttcaataccgacttgcttattctaggttctttgattttcaaatacattttgaaactagctttcaaatttctctaaaatctcctactagaaatattaagcagaattgtgttgatgtaatatgctaacaaaattgagtcttccaagcaatgaacatgatatatatttatttagccttctttaatttttctcaccaattgcttttaggggccttgtacctgcttcattgcatgtattgttaagcatgtaatgattctggctgttaatctctattatgttttattgaatttcattttctagctgctaattgctagtatggagaaattaagatgatgaaatcaactttataaaggcataatttcggtacaacagactgcaccactttaaaatgtgtaattcaatgcacgtttacaaatggatacactaacggaactactgccacaaccaagatagaggaaattccctatgccccaaagtttcttgtacccctttgcagttcatcagcctttcaaccctcagccccaaggagccactgtcacttcaggtccgtttgcatttttaaccattttctataaatgaaatgatacctgtgttcttttgtgtctgccttctttcatgcatcaatgtaattttaaaatccatctgtaatgtcttgtaaatactgagtagtattccttcgtgtggctataccatgtatgtttgtactttcacttattattggacatttctatcattccacgtttgggctattatgaagaaactatcatgagcatccatacgtggcaggccaggtctcactaacacaggcctccctaacaactgtttcagtaccgactgagtggttcaattaaatattaagaggaaaaaaaaaaaaaagaagccagtgcccttatacaaaggctggaatgtaacaaaagcccaccaagagttttgcctaggtttttcctgggccttaaagcatgacgaaataacgaaggcattcttaacaggagccatttagtattaaacgagttttattgggggtctgaagaaactccccaggcctccacaaacaagtttattggagatctgaagggactctccaaacctctgtgatttagcaggagacaagataagggaccccagcacctagacccatttagattaactgaatttaactgaggttccagaggaaggtcttcaggactcagacttagtta

SEQ ID NO: 407621 - DNA, 664 bp, Homo sapiens
tgttctgtggtggatgatggaataaacaggtttcgaggcctggctcagcagccgctgcaggtgctggtggtgctggagctctgtgtgttcctgagccgctgtctgctcggtgttttcaggcggagctctgggccccatgtagggcactcgtctcggtaccgtctccattctcgtccgtgcagtgggaagtgaaatgtcagcactgtatgatcatcgtgggtgggaaggccccgctcccctacttggagctgcatttcacagtggtcttctgtaggtagatgtactgcgatcccagggtatgcttgagctgaatcattaaaagtcagagatatttgtcaacgtattttagctcctttcctactgtccttcacctagcgagatgatctgttaggggtataaggtagctgttcgagaggggttctcagctccctgacacctgttgtactctgttgatctccaacaatgtccctttgcagtactttaggaagaatcatcaaagtaactcaggaggtgattgactaccggaggtggatcaaagagaagtggggcagcaaagcccacccgtcgccaggcatgggtgagagattaattcatttgtgttcatcctaaccactggctggcatgttcatgcagaagtgtctctattcctttgtggtaaattggt

SEQ ID NO: 407622 - DNA, 378 bp, Homo sapiens
atggttttcctctgattgctttggtacccatggccgtctctcattttgttcctagaccaggtttactatacctccaccgaccctaggggttgctcctgttccttgcagacaagctggtgtagaaggaactgcgtctttgaaagccgtccaccacatgtcttccccggccattccctcagcgtcccccaacccgctctcgagccctcatctgtatcataaggtatagctctgtcctggtgcattcacctacctgttcaagctgccatgtgagaggcggtgctaaatgttttctcctccagagagaattccagagagatcatttgaaaacggaatttgctttgttgtcattcagccgtcgacgcggccgcgaatttagta

SEQ ID NO: 407623 - DNA, 3805 bp, Homo sapiens
gtgcggccgctctcagcggagggggcggccccggggcccaggcgccgcggcccggcaccccgtggaagagccgcgcgtacagcccgggcatccagggactacatgaggaaataattgacttttataacttcatgtccccttgtcctgaagaagcagctatgagaagagaggtggtgaaacggatcgaaactgtggtgaaagacctttggccgacggctgatgtacagatatttggcagctttagtacaggtctttatcttccaactagcgacatagacctggtggtcttcgggaaatgggagcgtcctcctttacagctgctggagcaagccctgcggaagcacaacgtggctgagccgtgttccatcaaagtccttgacaaggctacggtaccaataataaagctcacagatcaggagactgaagtgaaagttgacatcagctttaacatggagacgggcgtccgggcagcggagttcatcaagaattacatgaagaaatattcattgctgccttacttgattttagtattgaaacagttccttctgcagagggacctgaatgaagtttttacaggtggaattagctcatacagcctaattttaatggccattagctttctacagttgcatccaagaattgatgcccggagagctgatgaaaaccttggaatgcttcttgtagaattttttgaactctatgggagaaattttaattacttgaaaaccggtattagaatcaaagaaggaggtgcctatatcgccaaagaggagatcatgaaagccatgaccagcgggtacagaccgtcgatgctgtgcattgaggaccccctgctgccagggaatgacgttggccggagctcctatggcgccatgcaggtgaagcaggtcttcgattatgcctacatagtgctcagccatgccgtgtcaccgctggccaggtcctatccaaacagagacgccgaaagtactttaggaagaatcatcaaagtaactcaggaggtgattgactaccggaggtggatcaaagagaagtggggcagcaaagcccacccgtcgccaggcatggacagcaggatcaagatcaaagagcgaatagccacatgcaatggggagcagacgcagaaccgagagcccgagtctccctatggccagcgcttgactttgtcgctgtccagcccccagctcctgtcttcaggctcctcggcctcttctgtgtcttcactttctgggagtgacgttgattcagacacaccgccctgcacaacgcccagtgtttaccagttcagtctgcaagcgccagctcctctcatggccggcttacccaccgccttgccaatgcccagtggcaaacctcagcccaccacttccagaacactgatcatgacaaccaacaatcagaccaggtttactatacctccaccgaccctaggggttgctcctgttccttgcagacaagctggtgtagaaggaactgcgtctttgaaagccgtccaccacatgtcttccccggccattccctcagcgtcccccaacccgctctcgagccctcatctgtatcataagcagcacaacggcatgaaactgtccatgaagggctctcacggccacacccaaggcggcggctacagctctgtgggtagcggaggtgtgcggccccctgtgggcaacaggggacaccaccagtataaccgcaccggctggaggaggaaaaaacacacacacacacgggacagtctgcccgtgagcctcagcagataatggctcctggctgcgtcagcctcccccacccctctgcagactgccccgcggcctcggccaccggcaggggaaccgagaccagcaccccgcacgtcagccgggctcgcggcacgcccgccgctgatcactctgcatgtttcttcgtgtggtggtcgcgtccatcttcaagaacagctcgttgtgctcatctgtgaagccttattaaacgtggacgttgttttctgccttcccaggattcttccttcagtgctgaggcaggttgggctcaggaactgcagggacgtgaacatgcgcttgcggtttgaggtagccgtgtctgttccttcgcggtttgctattttcatttcctgttcgtcaaagcagcagaggagatcaaaccccgttcgtgtgtctttcctccatggataagcttgggaggtcattgttttactgccctcacattttgtttgaaatttcagaactgtttttctatgtaaatattgcacataagttatatttaagggaggagggaattttttttaaacaagcttaggtcctttcccgagctgcattttctaagttgggtcatcgtgtcggctggttgtctgacgagcatcgttacaaacaccatgatgaggggtttggggttttattttgatgtcttttcttttggtcggaagtgagtgaaggagccaggtcgccctgaaggttttccaaagggcttggctccagagccacctggcagactgcccgtggccctgctgtcgggccccaggccgttgtcctgctctgaccacagagttttaatgttttggttttcacttcttttaaactggacaacaaatccagcatttcaagtgccagaagtataactttctaaggagagaagggttgtcacattataaaatctttaggaaaatgtgaactggaaaacgcttcggtcagttttagtgacatagcctgtgatgatgggtctggtgactattattgcggaccgtggtacccagttttaggaatgtggagaaaggaattctgttgattccgttgaggaatctgtagcgtatgcattcgttctgttaagagcaaatctaggagaagtgcttcagctgcccagtgcgccgtggggagtgttttaacggatcgtgtcgcaggagagcacagcccagcgttggggccgggaccgctggcgcccgacgtcggaagcatacaggtatactatgcaagtgtattctgccacaacaaccactgtctttgttacctttttttgaacaagaatatatccatcctgcctaaccctgagtttttggagcaccacagttgtcctgggagttggttgcatcttgtaggccatctgacttcctgtttttaaaacgggggtctggtcttgctaaacactacaggtaggttggtctttgaagtccactagtggagaatgtcaagacaagatacttattaccatgacatctgatgcatgtgcagcagtggggagttctagattgatctctgaatgtgatcgacgcccagcaaggacaagctttaaaatgtctgcggtctgcccttttgaagcaggactggctcactctgtcattgggagctgtcagctgcgactgcaggttctctaggaggcattccagaatagagtagcacactgtgtctgcagttctcgatgaccgaaagttatcaaaaatatttaaaatatttaaattgtgaacctattgataaagaatatttataaaaactgatctgtaggcctgtactaatctctacgcattagcaatattgactgtaaacccacattaaggaaaccactacgggtctggcagtgcgtgtcccgtggggtgtgcattttaaaactcgattcatagacacaggtaccatgttccatttccgtcatggtgaagcaaatgaattggcctggctaccactgtggtcgcgtgctacaggtttgacaaaaagatatcatgtttcgatttttttgtgtgtggacaacaatatggaagctaaaattgacatatttttatgtaaagtttttctattctttgatttttaataaactttggaaacca

SEQ ID NO: 407624 - DNA, 3806 bp, Homo sapiens
gtgcggccgctctcagcggagggggcggccccggggcccaggcgccgcggcccggcaccccgtggaagagccgcgcgtacagcccgggcatccagggactacatgaggaaataattgacttttataacttcatgtccccttgtcctgaagaagcagctatgagaagagaggtggtgaaacggatcgaaactgtggtgaaagacctttggccgacggctgatgtacagatatttggcagctttagtacaggtctttatcttccaactagcgacatagacctggtggtcttcgggaaatgggagcgtcctcctttacagctgctggagcaagccctgcggaagcacaacgtggctgagccgtgttccatcaaagtccttgacaaggctacggtaccaataataaagctcacagatcaggagactgaagtgaaagttgacatcagctttaacatggagacgggcgtccgggcagcggagttcatcaagaattacatgaagaaatattcattgctgccttacttgattttagtattgaaacagttccttctgcagagggacctgaatgaagtttttacaggtggaattagctcatacagcctaattttaatggccattagctttctacagttgcatccaagaattgatgcccggagagctgatgaaaaccttggaatgcttcttgtagaattttttgaactctatgggagaaattttaattacttgaaaaccggtattagaatcaaagaaggaggtgcctatatcgccaaagaggagatcatgaaagccatgaccagcgggtacagaccgtcgatgctgtgcattgaggaccccctgctgccagggaatgacgttggccggagctcctatggcgccatgcaggtgaagcaggtcttcgattatgcctacatagtgctcagccatgccgtgtcaccgctggccaggtcctatccaaacagagacgccgaaagtactttaggaagaatcatcaaagtaactcaggaggtgattgactaccggaggtggatcaaagagaagtggggcagcaaagcccacccgtcgccaggcatggacagcaggatcaagatcaaagagcgaatagccacatgcaatggggagcagacgcagaaccgagagcccgagtctccctatggccagcgcttgactttgtcgctgtccagcccccagctcctgtcttcaggctcctcggcctcttctgtgtcttcactttctgggagtgacgttgattcagacacaccgccctgcacaacgcccagtgtttaccagttcagtctgcaagcgccagctcctctcatggccggcttacccaccgccttgccaatgcccagtggcaaacctcagcccaccacttccagaacactgatcatgacaaccaacaatcagaccaggtttactatacctccaccgaccctaggggttgctcctgttccttgcagacaagctggtgtagaaggaactgcgtctttgaaagccgtccaccacatgtcttccccggccattccctcagcgtcccccaacccgctctcgagccctcatctgtatcataagcagcacaacggcatgaaactgtccatgaagggctctcacggccacacccaaggcggcggctacagctctgtgggtagcggaggtgtgcggccccctgtgggcaacaggggacaccaccagtataaccgcaccggctggaggaggaaaaaacacacacacacacgggacagtctgcccgtgagcctcagcagataatggctcctggctgcgtcagcctcccccacccctctgcagactgccccgcggcctcggccaccggcaggggaaccgagaccagcaccccgcacgtcagccgggctcgcggcacgcccgccgctgatcactctgcatgtttcttcgtgtggtggtcgcgtccatcttcaagaacagctcgttgtgctcatctgtgaagccttattaaacgtggacgttgttttctgccttcccaggattcttccttcagtgctgaggcaggttgggctcaggaactgcagggacgtgaacatgcgcttgcggtttgaggtagccgtgtctgttccttcgcggtttgctattttcatttcctgttcgtcaaagcagcagaggagatcaaaccccgttcgtgtgtctttcctccatggataagcttgggaggtcattgttttactgccctcacattttgtttgaaatttcagaactgtttttctatgtaaatattgaaaacttatgatttgtgcaataactcagatattttttatttaatttcctattttcacataagttatatttaagggaggagggaattttttttaaacaagcttaggtcctttcccgagctgcattttctaagttgggtcatcgtgtcggctggttgtctgacgagcatcgttacaaacaccatgatgaggggtttggggttttattttgatgtcttttcttttggtcggaagtgagtgaaggagccaggtcgccctgaaggttttccaaagggcttggctccagagccacctggcagactgcccgtggccctgctgtcgggccccaggccgttgtcctgctctgaccacagagttttaatgttttggttttcacttcttttaaactggacaacaaatccagcatttcaagtgccagaagtataactttctaaggagagaagggttgtcacattataaaatctttaggaaaatgtgaactggtattattgcggaccgtggtacccagttttaggaatgtggagaaaggaattctgttgattccgttgaggaatctgtagcgtatgcattcgttctgttaagagcaaatctaggagaagtgcttcagctgcccagtgcgccgtggggagtgttttaacggatcgtgtcgcaggagagcacagcccagcgttggggccgggaccgctggcgcccgacgtcggaagcatacaggtatactatgcaagtgtattctgccacaacaaccactgtctttgttacctttttttgaacaagaatatatccatcctgcctaaccctgagtttttggagcaccacagttgtcctgggagttggttgcatcttgtaggccatctgacttcctgtttttaaaacgggggtctggtcttgctaaacactacaggtaggttggtctttgaagtccactagtggagaatgtcaagacaagatacttattaccatgacatctgatgcatgtgcagcagtggggagttctagattgatctctgaatgtgatcgacgcccagcaaggacaagctttaaaatgtctgcggtctgcccttttgaagcaggactggctcactctgtcattgggagctgtcagctgcgactgcaggttctctaggaggcattccagaatagagtagcacactgtgtctgcagttctcgatgaccgaaagttatcaaaaatatttaaaatatttaaattgtgaacctattgataaagaatatttataaaaactgatctgtaggcctgtactaatctctacgcattagcaatattgactgtaaacccacattaaggaaaccactacgggtctggcagtgcgtgtcccgtggggtgtgcattttaaaactcgattcatagacacaggtaccatgttccatttccgtcatggtgaagcaaatgaattggcctggctaccactgtggtcgcgtgctacaggtttgacaaaaagatatcatgtttcgatttttttgtgtgtggacaacaatatggaagctaaaattgacatatttttatgtaaagtttttctattctttgatttttaataaactttggaaacca

SEQ ID NO: 407625 - DNA, 3440 bp, Homo sapiens
ttgaggataaaccttatgctctgacccaccatggagacgggcgtccgggcagcggagttcatcaagaattacatgaagaaatattcattgctgccttacttgattttagtattgaaacagttccttctgcagagggacctgaatgaagtttttacaggtggaattagctcatacagcctaattttaatggccattagctttctacagttgcatccaagaattgatgcccggagagctgatgaaaaccttggaatgcttcttgtagaattttttgaactctatgggagaaattttaattacttgaaaaccggtattagaatcaaagaaggaggtgcctatatcgccaaagaggagatcatgaaagccatgaccagcgggtacagaccgtcgatgctgtgcattgaggaccccctgctgccagggaatgacgttggccggagctcctatggcgccatgcaggtgaagcaggtcttcgattatgcctacatagtgctcagccatgccgtgtcaccgctggccaggtcctatccaaacagagacgccgaaagtactttaggaagaatcatcaaagtaactcaggaggtgattgactaccggaggtggatcaaagagaagtggggcagcaaagcccacccgtcgccaggcatggacagcaggatcaagatcaaagagcgaatagccacatgcaatggggagcagacgcagaaccgagagcccgagtctccctatggccagcgcttgactttgtcgctgtccagcccccagctcctgtcttcaggctcctcggcctcttctgtgtcttcactttctgggagtgacgttgattcagacacaccgccctgcacaacgcccagtgtttaccagttcagtctgcaagcgccagctcctctcatggccggcttacccaccgccttgccaatgcccagtggcaaacctcagcccaccacttccagaacactgatcatgacaaccaacaatcagaccaggtttactatacctccaccgaccctaggggttgctcctgttccttgcagacaagctggtgtagaaggaactgcgtctttgaaagccgtccaccacatgtcttccccggccattccctcagcgtcccccaacccgctctcgagccctcatctgtatcataagcagcacaacggcatgaaactgtccatgaagggctctcacggccacacccaaggcggcggctacagctctgtgggtagcggaggtgtgcggccccctgtgggcaacaggggacaccaccagtataaccgcaccggctggaggaggaaaaaacacacacacacacgggacagtctgcccgtgagcctcagcagataatggctcctggctgcgtcagcctcccccacccctctgcagactgccccgcggcctcggccaccggcaggggaaccgagaccagcaccccgcacgtcagccgggctcgcggcacgcccgccgctgatcactctgcatgtttcttcgtgtggtggtcgcgtccatcttcaagaacagctcgttgtgctcatctgtgaagccttattaaacgtggacgttgttttctgccttcccaggattcttccttcagtgctgaggcaggttgggctcaggaactgcagggacgtgaacatgcgcttgcggtttgaggtagccgtgtctgttccttcgcggtttgctattttcatttcctgttcgtcaaagcagcagaggagatcaaaccccgttcgtgtgtctttcctccatggataagcttgggaggtcattgttttactgccctcacattttgtttgaaatttcagaactgtttttctatgtaaatattgaaaacttatgatttgtgcaataactcagatattttttatttaatttcctattttcacataagttatatttaagggaggagggaattttttttaaacaagcttaggtcctttcccgagctgcattttctaagttgggtcatcgtgtcggctggttgtctgacgagcatcgttacaaacaccatgatgaggggtttggggttttattttgatgtcttttcttttggtcggaagtgagtgaaggagccaggtcgccctgaaggttttccaaagggcttggctccagagccacctggcagactgcccgtggccctgctgtcgggccccaggccgttgtcctgctctgaccacagagttttaatgttttggttttcacttcttttaaactggacaacaaatccagcatttcaagtgccagaagtataactttctaaggagagaagggttgtcacattataaaatctttaggaaaatgtgaactggaaaacgcttcggtcagttttagtgacatagcctgtgatgatgggtctggtgactattattgcggaccgtggtacccagttttaggaatgtggagaaaggaattctgttgattccgttgaggaatctgtagcgtatgcattcgttctgttaagagcaaatctaggagaagtgcttcagctgcccagtgcgccgtggggagtgttttaacggatcgtgtcgcaggagagcacagcccagcgttggggccgggaccgctggcgcccgacgtcggaagcatacaggtatactatgcaagtgtattctgccacaacaaccactgtctttgttacctttttttgaacaagaatatatccatcctgcctaaccctgagtttttggagcaccacagttgtcctgggagttggttgcatcttgtaggccatctgacttcctgtttttaaaacgggggtctggtcttgctaaacactacaggtaggttggtctttgaagtccactagtggagaatgtcaagacaagatacttattaccatgacatctgatgcatgtgcagcagtggggagttctagattgatctctgaatgtgatcgacgcccagcaaggacaagctttaaaatgtctgcggtctgcccttttgaagcaggactggctcactctgtcattgggagctgtcagctgcgactgcaggttctctaggaggcattccagaatagagtagcacactgtgtctgcagttctcgatgaccgaaagttatcaaaaatatttaaaatatttaaattgtgaacctattgataaagaatatttataaaaactgatctgtaggcctgtactaatctctacgcattagcaatattgactgtaaacccacattaaggaaaccactacgggtctggcagtgcgtgtcccgtggggtgtgcattttaaaactcgattcatagacacaggtaccatgttccatttccgtcatggtgaagcaaatgaattggcctggctaccactgtggtcgcgtgctacaggtttgacaaaaagatatcatgtttcgatttttttgtgtgtggacaacaatatggaagctaaaattgacatatttttatgtaaagtttttctattctttgatttttaataaactttggaaacca

SEQ ID NO: 407626 - DNA, 3439 bp, Homo sapiens
gttagtcacattagcagcgttcccggctcagcagagcccgtgactgatgctgccggggcggctccacgccgcagttctcaggagttattaaccaaggctttttccctccacagacagcaggatcaagatcaaagagcgaatagccacatgcaatggggagcagacgcagaaccgagagcccgagtctccctatggccagcgcttgactttgtcgctgtccagcccccagctcctgtcttcaggctcctcggcctcttctgtgtcttcactttctgggagtgacgttgtaagtgccctcccctcctccgtgtgtctgttggacagtttgtgtctctggtaaatgtccatagccgcgagcttaaaatctcccccttggttttgctcaggttttgtttccttgtatgtgtgtggaggtgggtggggggcagccccgtgatgtgggcaccaggcttcctttcccctgccgtgaaccttcagaacctgtctgtgcgactcatgcagctgtcgagggcagtaatcctctaaatggttgaactacagtggacttccttgagtagtttttaaaaatttatttgaagattaaaaaaaaaattaaatccaagtatctcttctgtatttcctttaacattctttttcagttgtgatgaaattacttgaaggaagcctgggtaggtttgggctgcctgttcagaagttagacttaatttgaataacctttcatagccagcctggatgcaggcgtttcttttcatagctttaaggaagtagtagtgcacctttgtggtacagctgtcctttttgttttttgtaccgggttcaaggattcagacacaccgccctgcacaacgcccagtgtttaccagttcagtctgcaagcgccagctcctctcatggccggcttacccaccgccttgccaatgcccagtggcaaacctcagcccaccacttccagaacactgatcatgacaaccaacaatcagaccaggtttactatacctccaccgaccctaggggttgctcctgttccttgcagacaagctggtgtagaaggaactgcgtctttgaaagccgtccaccacatgtcttccccggccattccctcagcgtcccccaacccgctctcgagccctcatctgtatcataagcagcacaacggcatgaaactgtccatgaagggctctcacggccacacccaaggcggcggctacagctctgtgggtagcggaggtgtgcggccccctgtgggcaacaggggacaccaccagtataaccgcaccggctggaggaggaaaaaacacacacacacacgggacagtctgcccgtgagcctcagcagataatggctcctggctgcgtcagcctcccccacccctctgcagactgccccgcggcctcggccaccggcaggggaaccgagaccagcaccccgcacgtcagccgggctcgcggcacgcccgccgctgatcactctgcatgtttcttcgtgtggtggtcgcgtccatcttcaagaacagctcgttgtgctcatctgtgaagccttattaaacgtggacgttgttttctgccttcccaggattcttccttcagtgctgaggcaggttgggctcaggaactgcagggacgtgaacatgcgcttgcggtttgaggtagccgtgtctgttccttcgcggtttgctattttcatttcctgttcgtcaaagcagcagaggagatcaaaccccgttcgtgtgtctttcctccatggataagcttgggaggtcattgttttactgccctcacattttgtttgaaatttcagaactgtttttctatgtaaatattgaaaacttatgatttgtgcaataactcagatattttttatttaatttcctattttcacataagttatatttaagggaggagggaattttttttaaacaagcttaggtcctttcccgagctgcattttctaagttgggtcatcgtgtcggctggttgtctgacgagcatcgttacaaacaccatgatgaggggtttggggttttattttgatgtcttttcttttggtcggaagtgagtgaaggagccaggtcgccctgaaggttttccaaagggcttggctccagagccacctggcagactgcccgtggccctgctgtcgggccccaggccgttgtcctgctctgaccacagagttttaatgttttggttttcacttcttttaaactggacaacaaatccagcatttcaagtgccagaagtataactttctaaggagagaagggttgtcacattataaaatctttaggaaaatgtgaactggaaaacgcttcggtcagttttagtgacatagcctgtgatgatgggtctggtgactattattgcggaccgtggtacccagttttaggaatgtggagaaaggaattctgttgattccgttgaggaatctgtagcgtatgcattcgttctgttaagagcaaatctaggagaagtgcttcagctgcccagtgcgccgtggggagtgttttaacggatcgtgtcgcaggagagcacagcccagcgttggggccgggaccgctggcgcccgacgtcggaagcatacaggtatactatgcaagtgtattctgccacaacaaccactgtctttgttacctttttttgaacaagaatatatccatcctgcctaaccctgagtttttggagcaccacagttgtcctgggagttggttgcatcttgtaggccatctgacttcctgtttttaaaacgggggtctggtcttgctaaacactacaggtaggttggtctttgaagtccactagtggagaatgtcaagacaagatacttattaccatgacatctgatgcatgtgcagcagtggggagttctagattgatctctgaatgtgatcgacgcccagcaaggacaagctttaaaatgtctgcggtctgcccttttgaagcaggactggctcactctgtcattgggagctgtcagctgcgactgcaggttctctaggaggcattccagaatagagtagcacactgtgtctgcagttctcgatgaccgaaagttatcaaaaatatttaaaatatttaaattgtgaacctattgataaagaatatttataaaaactgatctgtaggcctgtactaatctctacgcattagcaatattgactgtaaacccacattaaggaaaccactacgggtctggcagtgcgtgtcccgtggggtgtgcattttaaaactcgattcatagacacaggtaccatgttccatttccgtcatggtgaagcaaatgaattggcctggctaccactgtggtcgcgtgctacaggtttgacaaaaagatatcatgtttcgatttttttgtgtgtggacaacaatatggaagctaaaattgacatatttttatgtaaagtttttctattctttgatttttaataaactttggaaacca

SEQ ID NO: 407627 - DNA, 807 bp, Homo sapiens
acctcggcctactgtttgagattctcctgcctaaccctgagtttttggagcaccacagttgtcctgggagttggttgcatcttgtaggccatctgacttcctgtttttaaaacgggggtctggtcttgctaaacactacaggtaggttggtctttgaagtccactagtggagaatgtcaagacaagatacttattaccatgacatctgatgcatgtgcagcagtggggagttctagattgatctctgaatgtgatcgacgcccagcaaggacaagctttaaaatgtctgcggtctgcccttttgaagcaggactggctcactctgtcattgggagctgtcagctgcgactgcaggttctctaggaggcattccagaatagagtagcacactgtgtctgcagttctcgatgaccgaaagttatcaaaaatatttaaaatatttaaattgtgaacctattgataaagaatatttataaaaactgatctgtaggcctgtactaatctctacgcattagcaatattgactgtaaacccacattaaggaaaccactacgggtctggcagtgcgtgtcccgtggggtgtgcattttaaaactcgattcatagacacaggtaccatgttccatttccgtcatggtgaagcaaatgaattggcctggctaccactgtggtcgcgtgctacaggtttgacaaaaagatatcatgtttcgatttttttgtgtgtggacaacaatatggaagctaaaattgacatatttttatgtaaagtttttctattctttgatttttaataaactttggaaacca

SEQ ID NO: 407628 - DNA, 1723 bp, Homo sapiens
gtgcggccgctctcagcggagggggcggccccggggcccaggcgccgcggcccggcaccccgtggaagagccgcgcgtacagcccgggcatccagggactacatgaggaaataattgacttttataacttcatgtccccttgtcctgaagaagcagctatgagaagagaggtggtgaaacggatcgaaactgtggtgaaagacctttggccgacggctgatgtacagatatttggcagctttagtacaggtctttatcttccaactagcgacatagacctggtggtcttcgggaaatgggagcgtcctcctttacagctgctggagcaagccctgcggaagcacaacgtggctgagccgtgttccatcaaagtccttgacaaggctacggtaccaataataaagctcacagatcaggagactgaagtgaaagttgacatcagctttaacatggagacgggcgtccgggcagcggagttcatcaagaattacatgaagaaatattcattgctgccttacttgattttagtattgaaacagttccttctgcagagggacctgaatgaagtttttacaggtggaattagctcatacagcctaattttaatggccattagctttctacagttgcatccaagaattgatgcccggagagctgatgaaaaccttggaatgcttcttgtagaattttttgaactctatgggagaaattttaattacttgaaaaccggtattagaatcaaagaaggaggtgcctatatcgccaaagaggagatcatgaaagccatgaccagcgggtacagaccgtcgatgctgtgcattgaggaccccctgctgccagggaatgacgttggccggagctcctatggcgccatgcaggtgaagcaggtcttcgattatgcctacatagtgctcagccatgccgtgtcaccgctggccaggtcctatccaaacagagacgccgaaagtactttaggaagaatcatcaaagtaactcaggaggtgattgactaccggaggtggatcaaagagaagtggggcagcaaagcccacccgtcgccaggcatggacagcaggatcaagatcaaagagcgaatagccacatgcaatggggagcagacgcagaaccgagagcccgagtctccctatggccagcgcttgactttgtcgctgtccagcccccagctcctgtcttcaggctcctcggcctcttctgtgtcttcactttctgggagtgacgttgattcagacacaccgccctgcacaacgcccagtgtttaccagttcagtctgcaagcgccagctcctctcatggccggcttacccaccgccttgccaatgcccagtggcaaacctcagcccaccacttccagaacactgatcatgacaaccaacaatcagaccaggtttactatacctccaccgaccctaggggttgctcctgttccttgcagacaagctggtgtagaaggaactgcgtctttgaaagccgtccaccacatgtcttccccggccattccctcagcgtcccccaacccgctctcgagccctcatctgtatcataaggtatagctctgtcctggtgcattcacctacctgttcaagctgccatgtgagaggcggtgctaaatgttttctcctccagagagaattccagagagatcatttgaaaacggaatttgctttgttgtcattcagccgtcgacgcggccgcgaatttagta

SEQ ID NO: 407629 - DNA, 418 bp, Homo sapiens
aaaccttggaatgcttcttgtagaattttttgaactctatgggagaaattttaattacttgaaaaccggtattagaatcaaagaaggaggtgcctatatcgccaaagaggagatcatgaaagccatgaccagcgggtacagaccgtcgatgctgtgcattgaggaccccctgctgccaggtaagggcgccctgatctccactgctgagagctgggccagcctcggggacgtgctggtgacagggcctgtgttggggctctgagagccccgggcagttcatttgctcttgatgcaggtttctcttatactaaccagttaataatcacactttgagaaatccttatttaatgcttctaattaacttttgtctttctaactgtttacattctataataaagaagaattaaggaaaatcttt

SEQ ID NO: 407630 - DNA, 3859 bp, Homo sapiens
gtgcggccgctctcagcggagggggcggccccggggcccaggcgccgcggcccggcaccccgtggaagagccgcgcgtacagcccgggcatccagggactacatgaggaaataattgacttttataacttcatgtccccttgtcctgaagaagcagctatgagaagagaggtggtgaaacggatcgaaactgtggtgaaagacctttggccgacggctgatgtacagatatttggcagctttagtacaggtctttatcttccaactagcgacatagacctggtggtcttcgggaaatgggagcgtcctcctttacagctgctggagcaagccctgcggaagcacaacgtggctgagccgtgttccatcaaagtccttgacaaggctacggtaccaataataaagctcacagatcaggagactgaagtgaaagttgacatcagctttaacatggagacgggcgtccgggcagcggagttcatcaagaattacatgaagaaatattcattgctgccttacttgattttagtattgaaacagttccttctgcagagggacctgaatgaagtttttacaggtggaattagctcatacagcctaattttaatggccattagctttctacagttgcatccaagaattgatgcccggagagctgatgaaaaccttggaatgcttcttgtagaattttttgaactctatgggagaaattttaattacttgaaaaccggtattagaatcaaagaaggaggtgcctatatcgccaaagaggagatcatgaaagccatgaccagcgggtacagaccgtcgatgctgtgcattgaggaccccctgctgccagggaatgacgttggccggagctcctatggcgccatgcaggtgaagcaggtcttcgattatgcctacatagtgctcagccatgccgtgtcaccgctggccaggtcctatccaaacagagacgccgaaagtactttaggaagaatcatcaaagtaactcaggaggtgattgactaccggaggtggatcaaagagaagtggggcagcaaagcccacccgtcgccaggcatggacagcaggatcaagatcaaagagcgaatagccacatgcaatggggagcagacgcagaaccgagagcccgagtctccctatggccagcgcttgactttgtcgctgtccagcccccagctcctgtcttcaggctcctcggcctcttctgtgtcttcactttctgggagtgacgttgattcagacacaccgccctgcacaacgcccagtgtttaccagttcagtctgcaagcgccagctcctctcatggccggcttacccaccgccttgccaatgcccagtggcaaacctcagcccaccacttccagaacactgatcatgacaaccaacaatcagaccaggtttactatacctccaccgaccctaggggttgctcctgttccttgcagacaagctggtgtagaaggaactgcgtctttgaaagccgtccaccacatgtcttccccggccattccctcagcgtcccccaacccgctctcgagccctcatctgtatcataagcagcacaacggcatgaaactgtccatgaagggctctcacggccacacccaaggcggcggctacagctctgtgggtagcggaggtgtgcggccccctgtgggcaacaggggacaccaccagtataaccgcaccggctggaggaggaaaaaacacacacacacacgggacagtctgcccgtgagcctcagcagataatggctcctggctgcgtcagcctcccccacccctctgcagactgccccgcggcctcggccaccggcaggggaaccgagaccagcaccccgcacgtcagccgggctcgcggcacgcccgccgctgatcactctgcatgtttcttcgtgtggtggtcgcgtccatcttcaagaacagctcgttgtgctcatctgtgaagccttattaaacgtggacgttgttttctgccttcccaggattcttccttcagtgctgaggcaggttgggctcaggaactgcagggacgtgaacatgcgcttgcggtttgaggtagccgtgtctgttccttcgcggtttgctattttcatttcctgttcgtcaaagcagcagaggagatcaaaccccgttcgtgtgtctttcctccatggataagcttgggaggtcattgttttactgccctcacattttgtttgaaatttcagaactgtttttctatgtaaatattgaaaacttatgatttgtgcaataactcagatattttttatttaatttcctattttcacataagttatatttaagggaggagggaattttttttaaacaagcttaggtcctttcccgagctgcattttctaagttgggtcatcgtgtcggctggttgtctgacgagcatcgttacaaacaccatgatgaggggtttggggttttattttgatgtcttttcttttggtcggaagtgagtgaaggagccaggtcgccctgaaggttttccaaagggcttggctccagagccacctggcagactgcccgtggccctgctgtcgggccccaggccgttgtcctgctctgaccacagagttttaatgttttggttttcacttcttttaaactggacaacaaatccagcatttcaagtgccagaagtataactttctaaggagagaagggttgtcacattataaaatctttaggaaaatgtgaactggaaaacgcttcggtcagttttagtgacatagcctgtgatgatgggtctggtgactattattgcggaccgtggtacccagttttaggaatgtggagaaaggaattctgttgattccgttgaggaatctgtagcgtatgcattcgttctgttaagagcaaatctaggagaagtgcttcagctgcccagtgcgccgtggggagtgttttaacggatcgtgtcgcaggagagcacagcccagcgttggggccgggaccgctggcgcccgacgtcggaagcatacaggtatactatgcaagtgtattctgccacaacaaccactgtctttgttacctttttttgaacaagaatatatccatcctgcctaaccctgagtttttggagcaccacagttgtcctgggagttggttgcatcttgtaggccatctgacttcctgtttttaaaacgggggtctggtcttgctaaacactacaggtaggttggtctttgaagtccactagtggagaatgtcaagacaagatacttattaccatgacatctgatgcatgtgcagcagtggggagttctagattgatctctgaatgtgatcgacgcccagcaaggacaagctttaaaatgtctgcggtctgcccttttgaagcaggactggctcactctgtcattgggagctgtcagctgcgactgcaggttctctaggaggcattccagaatagagtagcacactgtgtctgcagttctcgatgaccgaaagttatcaaaaatatttaaaatatttaaattgtgaacctattgataaagaatatttataaaaactgatctgtaggcctgtactaatctctacgcattagcaatattgactgtaaacccacattaaggaaaccactacgggtctggcagtgcgtgtcccgtggggtgtgcattttaaaactcgattcatagacacaggtaccatgttccatttccgtcatggtgaagcaaatgaattggcctggctaccactgtggtcgcgtgctacaggtttgacaaaaagatatcatgtttcgatttttttgtgtgtggacaacaatatggaagctaaaattgacatatttttatgtaaagtttttctattctttgatttttaataaactttggaaacca

SEQ ID NO: 407631 - DNA, 4279 bp, Homo sapiens
gtgcggccgctctcagcggagggggcggccccggggcccaggcgccgcggcccggcaccccgtggaagagccgcgcgtacagcccgggcatccaggggtgagtgcgcggggaggccgcgggggcgggggcggggcccatggtcctggccggcgcccgcggtgcagacacccgtcccaggcgcccgggcttttggaggatggatgttgaaggctaaggccaaggcccgactctgcactgaaagttttttttttaaacatcagactcatttatcgtggagtgacttgcccagatcctacaagtaacagtccaagaaaaggggctgctgggtaggacctgcaggtatttgtcttttttactcttgagattggaacgggaaatcgactctctacccctccaccccgcctccgggcaagtgaggaaccccttgtcaaagtggggcgtagataagtgtggagtttcacgtaagttaagttgcagaataatttagcattgccaggaactcgaatcacgtcgaagactacatgaggaaataattgacttttataacttcatgtccccttgtcctgaagaagcagctatgagaagagaggtggtgaaacggatcgaaactgtggtgaaagacctttggccgacggctgatgtacagatatttggcagctttagtacaggtctttatcttccaactagcgacatagacctggtggtcttcgggaaatgggagcgtcctcctttacagctgctggagcaagccctgcggaagcacaacgtggctgagccgtgttccatcaaagtccttgacaaggctacggtaccaataataaagctcacagatcaggagactgaagtgaaagttgacatcagctttaacatggagacgggcgtccgggcagcggagttcatcaagaattacatgaagaaatattcattgctgccttacttgattttagtattgaaacagttccttctgcagagggacctgaatgaagtttttacaggtggaattagctcatacagcctaattttaatggccattagctttctacagttgcatccaagaattgatgcccggagagctgatgaaaaccttggaatgcttcttgtagaattttttgaactctatgggagaaattttaattacttgaaaaccggtattagaatcaaagaaggaggtgcctatatcgccaaagaggagatcatgaaagccatgaccagcgggtacagaccgtcgatgctgtgcattgaggaccccctgctgccagggaatgacgttggccggagctcctatggcgccatgcaggtgaagcaggtcttcgattatgcctacatagtgctcagccatgccgtgtcaccgctggccaggtcctatccaaacagagacgccgaaagtactttaggaagaatcatcaaagtaactcaggaggtgattgactaccggaggtggatcaaagagaagtggggcagcaaagcccacccgtcgccaggcatggacagcaggatcaagatcaaagagcgaatagccacatgcaatggggagcagacgcagaaccgagagcccgagtctccctatggccagcgcttgactttgtcgctgtccagcccccagctcctgtcttcaggctcctcggcctcttctgtgtcttcactttctgggagtgacgttgattcagacacaccgccctgcacaacgcccagtgtttaccagttcagtctgcaagcgccagctcctctcatggccggcttacccaccgccttgccaatgcccagtggcaaacctcagcccaccacttccagaacactgatcatgacaaccaacaatcagaccaggtttactatacctccaccgaccctaggggttgctcctgttccttgcagacaagctggtgtagaaggaactgcgtctttgaaagccgtccaccacatgtcttccccggccattccctcagcgtcccccaacccgctctcgagccctcatctgtatcataagcagcacaacggcatgaaactgtccatgaagggctctcacggccacacccaaggcggcggctacagctctgtgggtagcggaggtgtgcggccccctgtgggcaacaggggacaccaccagtataaccgcaccggctggaggaggaaaaaacacacacacacacgggacagtctgcccgtgagcctcagcagataatggctcctggctgcgtcagcctcccccacccctctgcagactgccccgcggcctcggccaccggcaggggaaccgagaccagcaccccgcacgtcagccgggctcgcggcacgcccgccgctgatcactctgcatgtttcttcgtgtggtggtcgcgtccatcttcaagaacagctcgttgtgctcatctgtgaagccttattaaacgtggacgttgttttctgccttcccaggattcttccttcagtgctgaggcaggttgggctcaggaactgcagggacgtgaacatgcgcttgcggtttgaggtagccgtgtctgttccttcgcggtttgctattttcatttcctgttcgtcaaagcagcagaggagatcaaaccccgttcgtgtgtctttcctccatggataagcttgggaggtcattgttttactgccctcacattttgtttgaaatttcagaactgtttttctatgtaaatattgaaaacttatgatttgtgcaataactcagatattttttatttaatttcctattttcacataagttatatttaagggaggagggaattttttttaaacaagcttaggtcctttcccgagctgcattttctaagttgggtcatcgtgtcggctggttgtctgacgagcatcgttacaaacaccatgatgaggggtttggggttttattttgatgtcttttcttttggtcggaagtgagtgaaggagccaggtcgccctgaaggttttccaaagggcttggctccagagccacctggcagactgcccgtggccctgctgtcgggccccaggccgttgtcctgctctgaccacagagttttaatgttttggttttcacttcttttaaactggacaacaaatccagcatttcaagtgccagaagtataactttctaaggagagaagggttgtcacattataaaatctttaggaaaatgtgaactggaaaacgcttcggtcagttttagtgacatagcctgtgatgatgggtctggtgactattattgcggaccgtggtacccagttttaggaatgtggagaaaggaattctgttgattccgttgaggaatctgtagcgtatgcattcgttctgttaagagcaaatctaggagaagtgcttcagctgcccagtgcgccgtggggagtgttttaacggatcgtgtcgcaggagagcacagcccagcgttggggccgggaccgctggcgcccgacgtcggaagcatacaggtatactatgcaagtgtattctgccacaacaaccactgtctttgttacctttttttgaacaagaatatatccatcctgcctaaccctgagtttttggagcaccacagttgtcctgggagttggttgcatcttgtaggccatctgacttcctgtttttaaaacgggggtctggtcttgctaaacactacaggtaggttggtctttgaagtccactagtggagaatgtcaagacaagatacttattaccatgacatctgatgcatgtgcagcagtggggagttctagattgatctctgaatgtgatcgacgcccagcaaggacaagctttaaaatgtctgcggtctgcccttttgaagcaggactggctcactctgtcattgggagctgtcagctgcgactgcaggttctctaggaggcattccagaatagagtagcacactgtgtctgcagttctcgatgaccgaaagttatcaaaaatatttaaaatatttaaattgtgaacctattgataaagaatatttataaaaactgatctgtaggcctgtactaatctctacgcattagcaatattgactgtaaacccacattaaggaaaccactacgggtctggcagtgcgtgtcccgtggggtgtgcattttaaaactcgattcatagacacaggtaccatgttccatttccgtcatggtgaagcaaatgaattggcctggctaccactgtggtcgcgtgctacaggtttgacaaaaagatatcatgtttcgatttttttgtgtgtggacaacaatatggaagctaaaattgacatatttttatgtaaagtttttctattctttgatttttaataaactttggaaacca

SEQ ID NO: 407632 - DNA, 3368 bp, Homo sapiens
tgttctgtggtggatgatggaataaacaggtttcgaggcctggctcagcagccgctgcaggtgctggtggtgctggagctctgtgtgttcctgagccgctgtctgctcggtgttttcaggcggagctctgggccccatgtagggcactcgtctcggtaccgtctccattctcgtccgtgcagtgggaagtgaaatgtcagcactgtatgatcatcgtgggtgggaaggccccgctcccctacttggagctgcatttcacagtggtcttctgtaggtagatgtactgcgatcccagggtatgcttgagctgaatcattaaaagtcagagatatttgtcaacgtattttagctcctttcctactgtccttcacctagcgagatgatctgttaggggtataaggtagctgttcgagaggggttctcagctccctgacacctgttgtactctgttgatctccaacaatgtccctttgcagtactttaggaagaatcatcaaagtaactcaggaggtgattgactaccggaggtggatcaaagagaagtggggcagcaaagcccacccgtcgccaggcatggacagcaggatcaagatcaaagagcgaatagccacatgcaatggggagcagacgcagaaccgagagcccgagtctccctatggccagcgcttgactttgtcgctgtccagcccccagctcctgtcttcaggctcctcggcctcttctgtgtcttcactttctgggagtgacgttgattcagacacaccgccctgcacaacgcccagtgtttaccagttcagtctgcaagcgccagctcctctcatggccggcttacccaccgccttgccaatgcccagtggcaaacctcagcccaccacttccagaacactgatcatgacaaccaacaatcagaccaggtttactatacctccaccgaccctaggggttgctcctgttccttgcagacaagctggtgtagaaggaactgcgtctttgaaagccgtccaccacatgtcttccccggccattccctcagcgtcccccaacccgctctcgagccctcatctgtatcataagcagcacaacggcatgaaactgtccatgaagggctctcacggccacacccaaggcggcggctacagctctgtgggtagcggaggtgtgcggccccctgtgggcaacaggggacaccaccagtataaccgcaccggctggaggaggaaaaaacacacacacacacgggacagtctgcccgtgagcctcagcagataatggctcctggctgcgtcagcctcccccacccctctgcagactgccccgcggcctcggccaccggcaggggaaccgagaccagcaccccgcacgtcagccgggctcgcggcacgcccgccgctgatcactctgcatgtttcttcgtgtggtggtcgcgtccatcttcaagaacagctcgttgtgctcatctgtgaagccttattaaacgtggacgttgttttctgccttcccaggattcttccttcagtgctgaggcaggttgggctcaggaactgcagggacgtgaacatgcgcttgcggtttgaggtagccgtgtctgttccttcgcggtttgctattttcatttcctgttcgtcaaagcagcagaggagatcaaaccccgttcgtgtgtctttcctccatggataagcttgggaggtcattgttttactgccctcacattttgtttgaaatttcagaactgtttttctatgtaaatattgaaaacttatgatttgtgcaataactcagatattttttatttaatttcctattttcacataagttatatttaagggaggagggaattttttttaaacaagcttaggtcctttcccgagctgcattttctaagttgggtcatcgtgtcggctggttgtctgacgagcatcgttacaaacaccatgatgaggggtttggggttttattttgatgtcttttcttttggtcggaagtgagtgaaggagccaggtcgccctgaaggttttccaaagggcttggctccagagccacctggcagactgcccgtggccctgctgtcgggccccaggccgttgtcctgctctgaccacagagttttaatgttttggttttcacttcttttaaactggacaacaaatccagcatttcaagtgccagaagtataactttctaaggagagaagggttgtcacattataaaatctttaggaaaatgtgaactggaaaacgcttcggtcagttttagtgacatagcctgtgatgatgggtctggtgactattattgcggaccgtggtacccagttttaggaatgtggagaaaggaattctgttgattccgttgaggaatctgtagcgtatgcattcgttctgttaagagcaaatctaggagaagtgcttcagctgcccagtgcgccgtggggagtgttttaacggatcgtgtcgcaggagagcacagcccagcgttggggccgggaccgctggcgcccgacgtcggaagcatacaggtatactatgcaagtgtattctgccacaacaaccactgtctttgttacctttttttgaacaagaatatatccatcctgcctaaccctgagtttttggagcaccacagttgtcctgggagttggttgcatcttgtaggccatctgacttcctgtttttaaaacgggggtctggtcttgctaaacactacaggtaggttggtctttgaagtccactagtggagaatgtcaagacaagatacttattaccatgacatctgatgcatgtgcagcagtggggagttctagattgatctctgaatgtgatcgacgcccagcaaggacaagctttaaaatgtctgcggtctgcccttttgaagcaggactggctcactctgtcattgggagctgtcagctgcgactgcaggttctctaggaggcattccagaatagagtagcacactgtgtctgcagttctcgatgaccgaaagttatcaaaaatatttaaaatatttaaattgtgaacctattgataaagaatatttataaaaactgatctgtaggcctgtactaatctctacgcattagcaatattgactgtaaacccacattaaggaaaccactacgggtctggcagtgcgtgtcccgtggggtgtgcattttaaaactcgattcatagacacaggtaccatgttccatttccgtcatggtgaagcaaatgaattggcctggctaccactgtggtcgcgtgctacaggtttgacaaaaagatatcatgtttcgatttttttgtgtgtggacaacaatatggaagctaaaattgacatatttttatgtaaagtttttctattctttgatttttaataaactttggaaacca

SEQ ID NO: 407633 - DNA, 2487 bp, Homo sapiens
gtgcggccgctctcagcggagggggcggccccggggcccaggcgccgcggcccggcaccccgtggaagagccgcgcgtacagcccgggcatccagggactacatgaggaaataattgacttttataacttcatgtccccttgtcctgaagaagcagctatgagaagagaggtggtgaaacggatcgaaactgtggtgaaagacctttggccgacggctgatgtacagatatttggcagctttagtacaggtctttatcttccaactagcgacatagacctggtggtcttcgggaaatgggagcgtcctcctttacagctgctggagcaagccctgcggaagcacaacgtggctgagccgtgttccatcaaagtccttgacaaggctacggtaccaataataaagctcacagatcaggagactgaagtgaaagttgacatcagctttaacatggagacgggcgtccgggcagcggagttcatcaagaattacatgaagaaatattcattgctgccttacttgattttagtattgaaacagttccttctgcagagggacctgaatgaagtttttacaggtggaattagctcatacagcctaattttaatggccattagctttctacagttgcatccaagaattgatgcccggagagctgatgaaaaccttggaatgcttcttgtagaattttttgaactctatgggagaaattttaattacttgaaaaccggtattagaatcaaagaaggaggtgcctatatcgccaaagaggagatcatgaaagccatgaccagcgggtacagaccgtcgatgctgtgcattgaggaccccctgctgccagggaatgacgttggccggagctcctatggcgccatgcaggtgaagcaggtcttcgattatgcctacatagtgctcagccatgccgtgtcaccgctggccaggtcctatccaaacagagacgccgaaagtactttaggaagaatcatcaaagtaactcaggaggtgattgactaccggaggtggatcaaagagaagtggggcagcaaagcccacccgtcgccaggcatggacagcaggatcaagatcaaagagcgaatagccacatgcaatggggagcagacgcagaaccgagagcccgagtctccctatggccagcgcttgactttgtcgctgtccagcccccagctcctgtcttcaggctcctcggcctcttctgtgtcttcactttctgggagtgacgttgattcagacacaccgccctgcacaacgcccagtgtttaccagttcagtctgcaagcgccagctcctctcatggccggcttacccaccgccttgccaatgcccagtggcaaacctcagcccaccacttccagaacactgatcatgacaaccaacaatcagaccaggtttactatacctccaccgaccctaggggttgctcctgttccttgcagacaagctggtgtagaaggaactgcgtctttgaaagccgtccaccacatgtcttccccggccattccctcagcgtcccccaacccgctctcgagccctcatctgtatcataagcagcacaacggcatgaaactgtccatgaagggctctcacggccacacccaaggcggcggctacagctctgtgggtagcggaggtgtgcggccccctgtgggcaacaggggacaccaccagtataaccgcaccggctggaggaggaaaaaacacacacacacacgggacagtctgcccgtgagcctcagcagataatggctcctggctgcgtcagcctcccccacccctctgcagactgccccgcggcctcggccaccggcaggggaaccgagaccagcaccccgcacgtcagccgggctcgcggcacgcccgccgctgatcactctgcatgtttcttcgtgtggtggtcgcgtccatcttcaagaacagctcgttgtgctcatctgtgaagccttattaaacgtggacgttgttttctgccttcccaggattcttccttcagtgctgaggcaggttgggctcaggaactgcagggacgtgaacatgcgcttgcggtttgaggtagccgtgtctgttccttcgcggtttgctattttcatttcctgttcgtcaaagcagcagaggagatcaaaccccgttcgtgtgtctttcctccatggataagcttgggaggtcattgttttactgccctcacattttgtttgaaatttcagaactgtttttctatgtaaatattgcacataagttatatttaagggaggagggaattttttttaaacaagcttaggtcctttcccgagctgcattttctaagttgggtcatcgtgtcggctggttgtctgacgagcatcgttacaaacaccatgatgaggggtttggggttttattttgatgtcttttcttttggtcggaagtgagtgaacgcttcgttcacctgtaggctttccctaggggctagactccgtcccctgtgatgctgccg

SEQ ID NO: 407634 - DNA, 2237 bp, Homo sapiens
gtgcggccgctctcagcggagggggcggccccggggcccaggcgccgcggcccggcaccccgtggaagagccgcgcgtacagcccgggcatccagggactacatgaggaaataattgacttttataacttcatgtccccttgtcctgaagaagcagctatgagaagagaggtggtgaaacggatcgaaactgtggtgaaagacctttggccgacggctgatgtacagatatttggcagctttagtacaggtctttatcttccaactagcgacatagacctggtggtcttcgggaaatgggagcgtcctcctttacagctgctggagcaagccctgcggaagcacaacgtggctgagccgtgttccatcaaagtccttgacaaggctacggtaccaataataaagctcacagatcaggagactgaagtgaaagttgacatcagctttaacatggagacgggcgtccgggcagcggagttcatcaagaattacatgaagaaatattcattgctgccttacttgattttagtattgaaacagttccttctgcagagggacctgaatgaagtttttacaggtggaattagctcatacagcctaattttaatggccattagctttctacagttgcatccaagaattgatgcccggagagctgatgaaaaccttggaatgcttcttgtagaattttttgaactctatgggagaaattttaattacttgaaaaccggtattagaatcaaagaaggaggtgcctatatcgccaaagaggagatcatgaaagccatgaccagcgggtacagaccgtcgatgctgtgcattgaggaccccctgctgccagggaatgacgttggccggagctcctatggcgccatgcaggtgaagcaggtcttcgattatgcctacatagtgctcagccatgccgtgtcaccgctggccaggtcctatccaaacagagacgccgaaagtactttaggaagaatcatcaaagtaactcaggaggtgattgactaccggaggtggatcaaagagaagtggggcagcaaagcccacccgtcgccaggcatggacagcaggatcaagatcaaagagcgaatagccacatgcaatggggagcagacgcagaaccgagagcccgagtctccctatggccagcgcttgactttgtcgctgtccagcccccagctcctgtcttcaggctcctcggcctcttctgtgtcttcactttctgggagtgacgttgtaagtgccctcccctcctccgtgtgtctgttggacagtttgtgtctctggtaaatgtccatagccgcgagcttaaaatctcccccttggttttgctcaggttttgtttccttgtatgtgtgtggaggtgggtggggggcagccccgtgatgtgggcaccaggcttcctttcccctgccgtgaaccttcagaacctgtctgtgcgactcatgcagctgtcgagggcagtaatcctctaaatggttgaactacagtggacttccttgagtagtttttaaaaatttatttgaagattaaaaaaaaaattaaatccaagtatctcttctgtatttcctttaacattctttttcagttgtgatgaaattacttgaaggaagcctgggtaggtttgggctgcctgttcagaagttagacttaatttgaataacctttcatagccagcctggatgcaggcgtttcttttcatagctttaaggaagtagtagtgcacctttgtggtacagctgtcctttttgttttttgtaccgggttcaaggattcagacacaccgccctgcacaacgcccagtgtttaccagttcagtctgcaagcgccagctcctctcatggccggcttacccaccgccttgccaatgcccagtggcaaacctcagcccaccacttccagaacactgatcatgacaaccaacaatcaggtacgtggccctctggcacccttcccgctggtggcccctgggaacagcatccgagctgtgatatgcactagaggagattgatggtcctttgaattagaagagtaactttttgagtctttggccattggtgtgttgttctaggaaatcctctcttttttgtggtgttgaggtcccccatgtatagtttcagcagcgaggacactgtggttcttgagtgctgccgtggcttttcacgggggccaggttgactgccttcctgcaagtttcctcactgccccagcatgagactgctgtcgagggtc

SEQ ID NO: 407635 - DNA, 1036 bp, Homo sapiens
catctgtacaaaaaataaaaataaattaacagggcgtgttggtgcacacctgtggtctcaccactttaggaggatgaggcggaggattgcttgagcctgggaggtggaggctgtagtgagccatcattgcacaactgcactccagcctgagtgacagagcaagaccgtgtctcattaaaaaaaaaattaaggtaaatttgcatactgtaaaaattactctttttcatgtaacccaggttaaaaagtttcaagagttttggcaaactcatacagctgtataaccactaccacaatcaagatagagagtatttccatcacccccaaaatattatctgtggtggtaccattttgactcccaccagcaatgtatgatacttctagttgatgtgcatccttgtcagcacttgatattgtcagtttttaaattttagccattatagtgggtatttagtggtatctcatcatagtttcattttgtgttccctaaatctctgatgatgctgaacttctttttatgtgtttatttgctgtccaaataacttccttggtgaagtgttcaaactgctgccattttttaaaaactgaattgtttgagtgcttattattgtgggtttttaatgtaattctgtttacaagtactttgttgaatatgtgttttgcaaatgtttttcccagtctatggtttatatttttatcgtcttagtaatgtcttttttttttcagaaattcttattatgataaaatacatataacattaaatttagcagtggctcacacctgtaatcccagcactttgggaggctgaggcgggtggatcacgaggtcaggagttcaagaccagcctgactaacatggtgaaaccccgtctctactaaaaatacaaaaattagccaggtgtggtggtgcacgcctgtaatcccagctactcaggaggttgaggaaggagaatcgcttgaacccaggaggcaaaggttgcagtgaaccgagattgcgcctctgcactccatcctgggtgacacagtgagactctgtctca

SEQ ID NO: 407636 - DNA, 2844 bp, Homo sapiens
  misc_feature (1424)..(1424): n is a, c, g, or t
  misc_feature (1449)..(1449): n is a, c, g, or t
  misc_feature (1539)..(1539): n is a, c, g, or t
actcactatagggctcgagcggccgcccgggcaggtggggctccgcgggcctggagcacggccgggtctaatatgcccggagccgaggcgcgatgaaggagaagtccaagaatgcggccaagaccaggagggagaaggaaaatggcgagttttacgagcttgccaagctgctcccgctgccgtcggccatcacttcgcagctggacaaagcgtccatcatccgcctcaccacgagctacctgaagatgcgcgccgtcttccccgaaggtttaggagacgcgtggggacagccgagccgcgccgggcccctggacggcgtcgccaaggagctgggatcgcacttgctgcagactttggatggatttgtttttgtggtagcatctgatggcaaaatcatgtatatatccgagaccgcttctgtccatttaggcttatcccaggtggagctcacgggcaacagtatttatgaatacatccatccttctgaccacgatgagatgaccgctgtcctcacggcccaccagccgctgcaccaccacctgctccaagagtatgagatagagaggtcgttctttcttcgaatgaaatgtgtcttggcgaaaaggaacgcgggcctgacctgcagcggatacaaggtcatccactgcagtggctacttgaagatcaggcagtatatgctggacatgtccctgtacgactcctgctaccagattgtggggctggtggccgtgggccagtcgctgccacccagtgccatcaccgagatcaagctgtacagtaacatgttcatgttcagggccagccttgacctgaagctgatattcctggattccagggtgaccgaggtgacgggttacgagccgcaggacctgatcgagaagaccctataccatcacgtgcacggctgcgacgtgttccacctccgctacgcacaccacctcctgttggtgaagggccaggtcaccaccaagtactaccggctgctgtccaagcggggcggctgggtgtgggtgcagagctacgccaccgtggtgcacaacagccgctcgtcccggccccactgcatcgtgagtgtcaattatgtactcacggagattgaatacaaggaacttcagctgtccctggagcaggtgtccactgccaagtcccaggactcctggaggaccgccttgtctacctcacaagaaactaggaaattagtgaaacccaaaaataccaagatgaagacaaagctgagaacaaacccttaccccccacagcaatacagctcattccaaatggacaaactggaatgcggccagctcggaaactggagagccagtccccctgcaagcgctgctgctcctccagaactgcagccccactcagaaagcagtgaccttctgtacacgccatcctacagcctgcccttctcctaccattanggacacttccctctggactctcacntcttcagcagcaaaaagccaatgttgccggccaagttcgggcagccccaaggatccccttgtgaggtggcacgctttttcctgagcacantgccagccagcggtgaatgccagtggcattatgccaaccccctagtgcctagcagctcgtctccagctaaaaatcctccagagccaccggcgaacactgctaggcacagcctggtgccaagctacgaaggtgggtcaggtctgctcgtggggaaggtgggaggactgcgcacggccgggagccgaagcagccatggcggtgggtggcagatggagacagaaccctcacgctttgggcaaacttgccctctttctgcttctaagtagggcttgctgtgctttcttgctctcaatgcaggtgctcctcgagagtgagaaatggcagtctgcctgcctcggggacactagtgacagtataaagggcaaaggaaaaccgagtatctggccttcacgtaaatcctggccacattcaccaaccaaagggggacagtgattttcaaaaccagctcccatgtgctgagaacaccccagctgcatttcttttgcaagattcctttccactccaaccagaagtgaatatttgagacaaacggcctattggctattttcccatgccagttttggaagtggggaaaactatggtggaaatttgtgggcttggggacagaaatgccactcaccaacccagggcaaagaacacaaaccctccaggcctcagtttcttcacctgtaaaatggggtgaagctgtgatgtgcctactcccaaggacacgacacacagtagggacctgccctgtacatgctagttcaacagaaaggaatggcctttcaccttctcctggtggcaggcaagcagatgtcctctgcggagataccgccagctccccaggacgcagactgactcctgtttgctcgctggaccaaccccaggcagaaggtggaaggtgggaacagaggtttagctgcaggacatgtattcccattgcaccgagacctaactgccgctcagagtgtagaccgagatggtgcagatgcctgcagtgccattaaaatgtgggtgaaggtgacatcaggattatgtgccccaggccgggctcagtggctcacacctgtaatcccagcactttgggaggccaaggtgggcggatcacctgaggtcaggagtttgcgacaagcctgccaacaagctgaaaccccatctccactaaaaatacaaaaattagttgggcatggtggtgagcacctgtaatcccagctactctggaggctgagataggaggatcacttgaacccgggaggtggaggttgcagtgagctaagatcacatcactgcactccagcctgggtaacagagtgagactgtctc

SEQ ID NO: 407637 - DNA, 4382 bp, Homo sapiens
  misc_feature (1581)..(1581): n is a, c, g, or t
  misc_feature (1606)..(1606): n is a, c, g, or t
  misc_feature (1696)..(1696): n is a, c, g, or t
ggtccagcccggaggaggctgcgctccgggcagcggcgggcggcgccgccgggttgctcggagctcaggcccggcggctgcggggaggcgtctcggaaccccgggaggccccccgcacctgcccgcggcccactccgcggactcacctggctcccggctcccccttccccatccccgccgccgcagcccgagtggggctccgcgggcctggagcacggccgggtctaatatgcccggagccgaggcgcgatgaaggagaagtccaagaatgcggccaagaccaggagggagaaggaaaatggcgagttttacgagcttgccaagctgctcccgctgccgtcggccatcacttcgcagctggacaaagcgtccatcatccgcctcaccacgagctacctgaagatgcgcgccgtcttccccgaaggtttaggagacgcgtggggacagccgagccgcgccgggcccctggacggcgtcgccaaggagctgggatcgcacttgctgcagactttggatggatttgtttttgtggtagcatctgatggcaaaatcatgtatatatccgagaccgcttctgtccatttaggcttatcccaggtggagctcacgggcaacagtatttatgaatacatccatccttctgaccacgatgagatgaccgctgtcctcacggcccaccagccgctgcaccaccacctgctccaagagtatgagatagagaggtcgttctttcttcgaatgaaatgtgtcttggcgaaaaggaacgcgggcctgacctgcagcggatacaaggtcatccactgcagtggctacttgaagatcaggcagtatatgctggacatgtccctgtacgactcctgctaccagattgtggggctggtggccgtgggccagtcgctgccacccagtgccatcaccgagatcaagctgtacagtaacatgttcatgttcagggccagccttgacctgaagctgatattcctggattccagggtgaccgaggtgacgggttacgagccgcaggacctgatcgagaagaccctataccatcacgtgcacggctgcgacgtgttccacctccgctacgcacaccacctcctgttggtgaagggccaggtcaccaccaagtactaccggctgctgtccaagcggggcggctgggtgtgggtgcagagctacgccaccgtggtgcacaacagccgctcgtcccggccccactgcatcgtgagtgtcaattatgtactcacggagattgaatacaaggaacttcagctgtccctggagcaggtgtccactgccaagtcccaggactcctggaggaccgccttgtctacctcacaagaaactaggaaattagtgaaacccaaaaataccaagatgaagacaaagctgagaacaaacccttaccccccacagcaatacagctcattccaaatggacaaactggaatgcggccagctcggaaactggagagccagtccccctgcaagcgctgctgctcctccagaactgcagccccactcagaaagcagtgaccttctgtacacgccatcctacagcctgcccttctcctaccattanggacacttccctctggactctcacntcttcagcagcaaaaagccaatgttgccggccaagttcgggcagccccaaggatccccttgtgaggtggcacgctttttcctgagcacantgccagccagcggtgaatgccagtggcattatgccaaccccctagtgcctagcagctcgtctccagctaaaaatcctccagagccaccggcgaacactgctaggcacagcctggtgccaagctacgaagcgcccgccgccgccgtgcgcaggttcggcgaggacaccgcgcccccgagcttcccgagctgcggccactaccgcgaggagcccgcgctgggcccggccaaagccgcccgccaggccgcccgggacggggcgcggctggcgctggcccgcgcggcacccgagtgctgcgcgcccccgacccccgaggccccgggcgcgccggcgcagctgcccttcgtgctgctcaactaccaccgcgtgctggcccggcgcggaccgctggggggcgccgcacccgccgcctccggcctggcctgcgctcccggcggccccgaggcggcgaccggcgcgctgcggctccggcacccgagccccgccgccacctccccgcccggcgcgcccctgccgcactacctgggcgcctcggtcatcatcaccaacgggaggtgacccgctggccgcccgcgccaggagcctggacccggcctcccggggctgcggcgccaccgagcccggcaaatgcgcacgacctacattaatttatgcagagacagctgtttgaattggaccccgccgccgacttgcggatttccaccgcggaggccccgcgcgccggtgccgagggccgaggagcgcccgggtccgggcaggtgaccgcccgcctctgtcctgcgagggccggtgcgacccagttgctgggggcttggtttcctcaccttgaaatcgggcttcacgcgtcttgccttgtccccaacgttccacaacagtcccgctgggggattgaagcggtttcactccgcaaatatcctccactttcaggagggaaaacccaccctaccacagtccgctcttccaagtggacggcagacctgggaggggacgcctgtgtcacgagcccttttagatgcttaggtgaaggcagaagtgatgattgtaagtcccatgaatacacaactccactgtctttaaaagtcattcaagagtctcattatttttgtttttatttaaccctttcttcaatacaaaaagccaacaaaccaagactaagggggtgaccatgcaattccattttgtgtctgtgaacataggtgtgcttcccaaatacattaacaagctcttacttccccctaacccctatgaactcttgataacaccaagagtagcaccttcagaatatattgaataggcattaaatgcaaaaatatatatgtagccagacagtttatgagaatgaccctgtcaagcttcattattacgtggcaaaatccctctggcccacacagatctgtaattcactaggctcgtgtttgctacaaatagtgctaataaagttaaattgcacgtgcaatacggaacactgtcaatggactgcaccttgtgaaggaaaaacatgcttaagggggtgtaatgaaaatgatgtagacattttaagcattttctacacagcgagaaaacttcgtaagaacatgttacgtgtgcaacaggtaaacagaaatcctttcataaagcaccagcagtgtttaaaaaatgagcttccattaatttttactttttatgggttttgcttaaagatctcaacatggaaaaatcctgtcatggctctgaactgcacaatgcattgaaccgccgtccttcaattttcttcacactatcaacactgcagcattttgctgctttatcaaaatggtttattttaggaaactttttccacctttctgaatggaaagaggttttcacaaatgttttaaactcatcgttctaaaatcaagtgcacctacaccaactgctctcaaaatgtgaactgacttttttttttttttttttgccaaccctgtgtcacttagtgaggacctgacacaatccctacagggtgtctgtcagtgggcctcatggtaagagtcacaatttgcaaatttaggaccgtgggtcatgcagcgaaggggctggatggtaggaagggatgtgcccgcctctccacgcactcagctatacctcattcacagctccttgtgagtgtgtgcacaggaaataagccgagggtattatttttttatgttcatgagtcttgtaattaaaccgtgattcttgaaaggtgtaggtttgattactaggagataccaccgacatttttcaataaagtactgcaaaatgcttttgtgtctaccttgttattaacttttggggctgtatttagtaaaaataaatcaaggctatcggagcagttcaataacaaaggttactgttgagaaaaaagaccctatcatagatttacaagtgacaacgtggacaggcgtaacagagtgtgtatgtacttgaaaatgtgtactagtgaaaacgtccttgtctaaacaaacttcgttttcataacctagaacatgaaggaagattcttacacgagctggcttcaggacggccagggctgagtgtgaagtcagcagagctgttactgtggcaacctaatattgtgacctccatcttgaagagtctgcacatttaagctggggatagcgtttcttgacttctgtgaggctccggcaggggaagaggaagcattttaatacatatgcctctcttttaca

SEQ ID NO: 407638 - DNA, 1530 bp, Homo sapiens
ggtccagcccggaggaggctgcgctccgggcagcggcgggcggcgccgccgggttgctcggagctcaggcccggcggctgcggggaggcgtctcggaaccccgggaggccccccgcacctgcccgcggcccactccgcggactcacctggctcccggctcccccttccccatccccgccgccgcagcccgagtggggctccgcgggcctggagcacggccgggtctaatatgcccggagccgaggcgcgatgaaggagaagtccaagaatgcggccaagaccaggagggagaaggaaaatggcgagttttacgagcttgccaagctgctcccgctgccgtcggccatcacttcgcagctggacaaagcgtccatcatccgcctcaccacgagctacctgaagatgcgcgccgtcttccccgaaggtttaggagacgcgtggggacagccgagccgcgccgggcccctggacggcgtcgccaaggagctgggatcgcacttgctgcagactttggatggatttgtttttgtggtagcatctgatggcaaaatcatgtatatatccgagaccgcttctgtccatttaggcttatcccaggtggagctcacgggcaacagtatttatgaatacatccatccttctgaccacgatgagatgaccgctgtcctcacggcccaccagccgctgcaccaccacctgctccaagagtatgagatagagaggtcgttctttcttcgaatgaaatgtgtcttggcgaaaaggaacgcgggcctgacctgcagcggatacaaggtcatccactgcagtggctacttgaagatcaggcagtatatgctggacatgtccctgtacgactcctgctaccagattgtggggctggtggccgtgggccagtcgctgccacccagtgccatcaccgagatcaagctgtacagtaacatgttcatgttcagggccagccttgacctgaagctgatattcctggattccagggtgaccgaggtgacgggttacgagccgcaggacctgatcgagaagaccctataccatcacgtgcacggctgcgacgtgttccacctccgctacgcacaccacctcctgttggtgaagggccaggtcaccaccaagtactaccggctgctgtccaagcggggcggctgggtgtgggtgcagagctacgccaccgtggtgcacaacagccgctcgtcccggccccactgcatcgtgagtgtcaattatgtactcacggagattgaatacaaggaacttcagctgtccctggagcaggtgtccactgccaagtcccaggactcctggaggaccgccttgtctacctcacaagaaactaggaaattagtgaaacccaaaaataccaagatgaagacaaagctgagaacaaacccttaccccccacagcaatacagctcattccaaatggacaaactggaatgcggccagctcggaaactggagagccagtccccctgcaagggaagaggaagcattttaatacatatgcctctcttttaca

SEQ ID NO: 407639 - DNA, 382 bp, Homo sapiens
aaggcctctgggtgctgcatctggccctgggaacacattggtgcggttggaataaggatgggggaagcacggagggacagctgccaacctcatcttgctcctgcttgcagagtatgagatagagaggtcgttctttcttcgaatgaaatgtgtcttggcgaaaaggaacgcgggcctgacctgcagcggatacaaggtacggggagtcatgggtgcggggaggagctggctaagggtcttcaatgtgtgttttcaagagcgtctgcagaaaggaaggcacgggagcacaaactcgtcatccccactaatgtagagctctccagcaacgtggtgcacagtctcttggaggctcatgtgagagctggtgttttaggaggatgtt

SEQ ID NO: 407640 - DNA, 4225 bp, Homo sapiens
  misc_feature (1424)..(1424): n is a, c, g, or t
  misc_feature (1449)..(1449): n is a, c, g, or t
  misc_feature (1539)..(1539): n is a, c, g, or t
actcactatagggctcgagcggccgcccgggcaggtggggctccgcgggcctggagcacggccgggtctaatatgcccggagccgaggcgcgatgaaggagaagtccaagaatgcggccaagaccaggagggagaaggaaaatggcgagttttacgagcttgccaagctgctcccgctgccgtcggccatcacttcgcagctggacaaagcgtccatcatccgcctcaccacgagctacctgaagatgcgcgccgtcttccccgaaggtttaggagacgcgtggggacagccgagccgcgccgggcccctggacggcgtcgccaaggagctgggatcgcacttgctgcagactttggatggatttgtttttgtggtagcatctgatggcaaaatcatgtatatatccgagaccgcttctgtccatttaggcttatcccaggtggagctcacgggcaacagtatttatgaatacatccatccttctgaccacgatgagatgaccgctgtcctcacggcccaccagccgctgcaccaccacctgctccaagagtatgagatagagaggtcgttctttcttcgaatgaaatgtgtcttggcgaaaaggaacgcgggcctgacctgcagcggatacaaggtcatccactgcagtggctacttgaagatcaggcagtatatgctggacatgtccctgtacgactcctgctaccagattgtggggctggtggccgtgggccagtcgctgccacccagtgccatcaccgagatcaagctgtacagtaacatgttcatgttcagggccagccttgacctgaagctgatattcctggattccagggtgaccgaggtgacgggttacgagccgcaggacctgatcgagaagaccctataccatcacgtgcacggctgcgacgtgttccacctccgctacgcacaccacctcctgttggtgaagggccaggtcaccaccaagtactaccggctgctgtccaagcggggcggctgggtgtgggtgcagagctacgccaccgtggtgcacaacagccgctcgtcccggccccactgcatcgtgagtgtcaattatgtactcacggagattgaatacaaggaacttcagctgtccctggagcaggtgtccactgccaagtcccaggactcctggaggaccgccttgtctacctcacaagaaactaggaaattagtgaaacccaaaaataccaagatgaagacaaagctgagaacaaacccttaccccccacagcaatacagctcattccaaatggacaaactggaatgcggccagctcggaaactggagagccagtccccctgcaagcgctgctgctcctccagaactgcagccccactcagaaagcagtgaccttctgtacacgccatcctacagcctgcccttctcctaccattanggacacttccctctggactctcacntcttcagcagcaaaaagccaatgttgccggccaagttcgggcagccccaaggatccccttgtgaggtggcacgctttttcctgagcacantgccagccagcggtgaatgccagtggcattatgccaaccccctagtgcctagcagctcgtctccagctaaaaatcctccagagccaccggcgaacactgctaggcacagcctggtgccaagctacgaagcgcccgccgccgccgtgcgcaggttcggcgaggacaccgcgcccccgagcttcccgagctgcggccactaccgcgaggagcccgcgctgggcccggccaaagccgcccgccaggccgcccgggacggggcgcggctggcgctggcccgcgcggcacccgagtgctgcgcgcccccgacccccgaggccccgggcgcgccggcgcagctgcccttcgtgctgctcaactaccaccgcgtgctggcccggcgcggaccgctggggggcgccgcacccgccgcctccggcctggcctgcgctcccggcggccccgaggcggcgaccggcgcgctgcggctccggcacccgagccccgccgccacctccccgcccggcgcgcccctgccgcactacctgggcgcctcggtcatcatcaccaacgggaggtgacccgctggccgcccgcgccaggagcctggacccggcctcccggggctgcggcgccaccgagcccggcaaatgcgcacgacctacattaatttatgcagagacagctgtttgaattggaccccgccgccgacttgcggatttccaccgcggaggccccgcgcgccggtgccgagggccgaggagcgcccgggtccgggcaggtgaccgcccgcctctgtcctgcgagggccggtgcgacccagttgctgggggcttggtttcctcaccttgaaatcgggcttcacgcgtcttgccttgtccccaacgttccacaacagtcccgctgggggattgaagcggtttcactccgcaaatatcctccactttcaggagggaaaacccaccctaccacagtccgctcttccaagtggacggcagacctgggaggggacgcctgtgtcacgagcccttttagatgcttaggtgaaggcagaagtgatgattgtaagtcccatgaatacacaactccactgtctttaaaagtcattcaagagtctcattatttttgtttttatttaaccctttcttcaatacaaaaagccaacaaaccaagactaagggggtgaccatgcaattccattttgtgtctgtgaacataggtgtgcttcccaaatacattaacaagctcttacttccccctaacccctatgaactcttgataacaccaagagtagcaccttcagaatatattgaataggcattaaatgcaaaaatatatatgtagccagacagtttatgagaatgaccctgtcaagcttcattattacgtggcaaaatccctctggcccacacagatctgtaattcactaggctcgtgtttgctacaaatagtgctaataaagttaaattgcacgtgcaatacggaacactgtcaatggactgcaccttgtgaaggaaaaacatgcttaagggggtgtaatgaaaatgatgtagacattttaagcattttctacacagcgagaaaacttcgtaagaacatgttacgtgtgcaacaggtaaacagaaatcctttcataaagcaccagcagtgtttaaaaaatgagcttccattaatttttactttttatgggttttgcttaaagatctcaacatggaaaaatcctgtcatggctctgaactgcacaatgcattgaaccgccgtccttcaattttcttcacactatcaacactgcagcattttgctgctttatcaaaatggtttattttaggaaactttttccacctttctgaatggaaagaggttttcacaaatgttttaaactcatcgttctaaaatcaagtgcacctacaccaactgctctcaaaatgtgaactgacttttttttttttttttttgccaaccctgtgtcacttagtgaggacctgacacaatccctacagggtgtctgtcagtgggcctcatggtaagagtcacaatttgcaaatttaggaccgtgggtcatgcagcgaaggggctggatggtaggaagggatgtgcccgcctctccacgcactcagctatacctcattcacagctccttgtgagtgtgtgcacaggaaataagccgagggtattatttttttatgttcatgagtcttgtaattaaaccgtgattcttgaaaggtgtaggtttgattactaggagataccaccgacatttttcaataaagtactgcaaaatgcttttgtgtctaccttgttattaacttttggggctgtatttagtaaaaataaatcaaggctatcggagcagttcaataacaaaggttactgttgagaaaaaagaccctatcatagatttacaagtgacaacgtggacaggcgtaacagagtgtgtatgtacttgaaaatgtgtactagtgaaaacgtccttgtctaaacaaacttcgttttcataacctagaacatgaaggaagattcttacacgagctggcttcaggacggccagggctgagtgtgaagtcagcagagctgttactgtggcaacctaatattgtgacctccatcttgaagagtctgcacatttaagctggggatagcgtttcttgacttctgtgaggctccggcaggggaagaggaagcattttaatacatatgcctctcttttaca

SEQ ID NO: 407641 - DNA, 2343 bp, Homo sapiens
  misc_feature (1581)..(1581): n is a, c, g, or t
  misc_feature (1606)..(1606): n is a, c, g, or t
  misc_feature (1696)..(1696): n is a, c, g, or t
ggtccagcccggaggaggctgcgctccgggcagcggcgggcggcgccgccgggttgctcggagctcaggcccggcggctgcggggaggcgtctcggaaccccgggaggccccccgcacctgcccgcggcccactccgcggactcacctggctcccggctcccccttccccatccccgccgccgcagcccgagtggggctccgcgggcctggagcacggccgggtctaatatgcccggagccgaggcgcgatgaaggagaagtccaagaatgcggccaagaccaggagggagaaggaaaatggcgagttttacgagcttgccaagctgctcccgctgccgtcggccatcacttcgcagctggacaaagcgtccatcatccgcctcaccacgagctacctgaagatgcgcgccgtcttccccgaaggtttaggagacgcgtggggacagccgagccgcgccgggcccctggacggcgtcgccaaggagctgggatcgcacttgctgcagactttggatggatttgtttttgtggtagcatctgatggcaaaatcatgtatatatccgagaccgcttctgtccatttaggcttatcccaggtggagctcacgggcaacagtatttatgaatacatccatccttctgaccacgatgagatgaccgctgtcctcacggcccaccagccgctgcaccaccacctgctccaagagtatgagatagagaggtcgttctttcttcgaatgaaatgtgtcttggcgaaaaggaacgcgggcctgacctgcagcggatacaaggtcatccactgcagtggctacttgaagatcaggcagtatatgctggacatgtccctgtacgactcctgctaccagattgtggggctggtggccgtgggccagtcgctgccacccagtgccatcaccgagatcaagctgtacagtaacatgttcatgttcagggccagccttgacctgaagctgatattcctggattccagggtgaccgaggtgacgggttacgagccgcaggacctgatcgagaagaccctataccatcacgtgcacggctgcgacgtgttccacctccgctacgcacaccacctcctgttggtgaagggccaggtcaccaccaagtactaccggctgctgtccaagcggggcggctgggtgtgggtgcagagctacgccaccgtggtgcacaacagccgctcgtcccggccccactgcatcgtgagtgtcaattatgtactcacggagattgaatacaaggaacttcagctgtccctggagcaggtgtccactgccaagtcccaggactcctggaggaccgccttgtctacctcacaagaaactaggaaattagtgaaacccaaaaataccaagatgaagacaaagctgagaacaaacccttaccccccacagcaatacagctcattccaaatggacaaactggaatgcggccagctcggaaactggagagccagtccccctgcaagcgctgctgctcctccagaactgcagccccactcagaaagcagtgaccttctgtacacgccatcctacagcctgcccttctcctaccattanggacacttccctctggactctcacntcttcagcagcaaaaagccaatgttgccggccaagttcgggcagccccaaggatccccttgtgaggtggcacgctttttcctgagcacantgccagccagcggtgaatgccagtggcattatgccaaccccctagtgcctagcagctcgtctccagctaaaaatcctccagagccaccggcgaacactgctaggcacagcctggtgccaagctacgaaggcaagcagatgtcctctgcggagataccgccagctccccaggacgcagactgactcctgtttgctcgctggaccaaccccaggcagaaggtggaaggtgggaacagaggtttagctgcaggacatgtattcccattgcaccgagacctaactgccgctcagagtgtagaccgagatggtgcagatgcctgcagtgccattaaaatgtgggtgaaggtgacatcaggattatgtgccccaggccgggctcagtggctcacacctgtaatcccagcactttgggaggccaaggtgggcggatcacctgaggtcaggagtttgcgacaagcctgccaacaagctgaaaccccatctccactaaaaatacaaaaattagttgggcatggtggtgagcacctgtaatcccagctactctggaggctgagataggaggatcacttgaacccgggaggtggaggttgcagtgagctaagatcacatcactgcactccagcctgggtaacagagtgagactgtctc

SEQ ID NO: 407642 - DNA, 606 bp, Homo sapiens
actcactatagggctcgagcggccgcccgggcaggtggggctccgcgggcctggagcacggccgggtctaatatgcccggagccgaggcgcgatgaaggagaagtccaagaatgcggccaagaccaggagggagaaggaaaatggcgagttttacgagcttgccaagctgctcccgctgccgtcggccatcacttcgcagctggacaaagcgtccatcatccgcctcaccacgagctacctgaagatgcgcgccgtcttccccgaaggtttaggagacgcgtggggacagccgagccgcgccgggcccctggacggcgtcgccaaggagctgggatcgcacttgctgcagactttggatggatttgtttttgtggtagcatctgatggcaaaatcatgtatatatccgagaccgcttctgtccatttaggcttatcccagtcttcaccccgtcagccttgttccgagattctgccaaaacccggactatctgcttatgtagtaatgctagatgccctgaaaagagctccacaaagggacatgtttcagtccacacttgctggtctgcacgttacggtattatgagttgctataaagcaagaggtaa

SEQ ID NO: 407643 - DNA, 390 bp, Homo sapiens
tactctgctcgttcaaactctggataaaaagaataaatagggatagttgttaactatttgtgttgttacagggatcaagatcacgggttagagtttgtatgaaaagcaaggtgttggtagaattaaggcaagttttttttttttttttctgccaaaagtggtccgctctttataacttagctgtgggagaacttttgaagaatgtggttcaagagaaggactagctaacagagaagattttaaaatatataccttaaaaataattttatgatagtaaattccaaaggtatatgaaaatagaaaaatagtagaatgaattcttaggtactcaccacctggcttcaataatggccaactcatgcccagtagggcaaatattaaatattaaaa

SEQ ID NO: 407644 - DNA, 422 bp, Homo sapiens
aatgcacaaaagtcaaatcagaatggaaaagactcaaaaccatcatcaacaccaagatcaaaaggacaagaatccttcaaaaaacaggaaaaaactcctaaaacacctaaaaggacctagttctgtagaagacattaaagcaaaaatgcaagcaagtatagaaaaatgtggttctcttcccaaagtggaagccaagttcatcagttatgtgaagaattgcttctggatgactgagcaggaggctattcaagatttctggcagtggaggaagtctctttaagaaaacagtttaaacaatttgttaaaaaatttccatcttatttcatttctgtaacagttgatatctggctgtcctttttataatgcagagtgagaactttccctaccatgtttgataaatgttgtccaggttccattgccaa

SEQ ID NO: 407645 - DNA, 357 bp, Homo sapiens
gatgaatagggcttaattttctcatgataaacctaagtagaagctatgaaaattcttaccacacttcagtgaattatcttgtatacctctagagtgagcacattccactttggagatcagtagtctcagcaacaagacctgtggccataaagtgggaataaacaatccaatttttagcaatgcttggcccagattcacttatgagtgacatgagaaaggtacaacatgatattccaggaaatcagaagagctaagtatatctgaacctttgagagtatggcctgtccatacaaaggcagaatctacatttgtcaagtgccttcaagaaacattctaccaagatatgcacctccacaa

SEQ ID NO: 407646 - DNA, 1458 bp, Homo sapiens
cagagtgagaggagcaaaggggactcggccgccatgttaggagtactgggacgattccgcggagccgggcagaggttttaggggaatgattaacaaaggcgtccgaagaaatcgttgttggaaggtgaccaaggtggaaagagacgttgctttggccctgcaagtaagaagagagagggaatagcctgaaggagtaacactaaatttaaaatgacacttttttaccaaccagcgaaagcagatgttcaaaggggatattggccagagtctgtcacactaagatgagaaatgtcctttcttcctgaaggtgtctgatgtgtaaaaatatgatatactttgtgctgtttcctcccttcccttttgcatattattctgaaacaacattaactagttactttgcgtcattgaaggtatgcacttcccctctatgttaggagtgaataaaattaaaaatagatccttataacaaagaaaggcagatagaatgattaaaaatgaccaaaacatgttagaaacagtctctcaggtgtatgcagatggtaattacaaaaatactttttcaaaaaatgatcttctgtgtcatgtttctgggaacaagtcaagatgaatgagtttgatttttaagcagaagtagtatgtgttggtgtcatccatgaatacaacaatgaaaaaggctcaaagttgttgttattcagaaacttctctaagtaatggtggtaagtacaggaaaaggagcaatgtctaccattttctttctaaccttcgatttaactattgtaatgttgtaagcttaacagagacttacacttaggcttaatttcaagctcttcaatcatttttcccggttggtgattcaggtgtattctcatgtcttatgtaaacttatcatgagtgttgttgatttataatatatttctttatgtaagccatagccttgtcagtttgagttatatggaagacaaattgtagggaaaaagagcaacagattactcagaaaccttctgtgtgagctgggcatagtagtgcatgccagtaggcttagctacttgggaggctgaggcaggaggatcacttgatcccattagtttgaggctgcagtgagctatgattgtgtcactgtactccaatctggacaacagtgagactatgtctgtttttaaaaaagaaagaaagcttgtgtttgagaagtgatacctctagaatacagtgatttctataatttgtcatgtgtttgggtagtttgaagtttttctatccttgtatctaatggacatctgaccataaagatgaaaaaatcctgcactcattataaattttatttataaaattgatatttgaggagttggggaggccagcttctgaaaaaataacagtgtcccatagaaacaccacaacttaggaaaatattgttaaagtggaattaggaatatctagaggaggtaaagcttttcatctctc

SEQ ID NO: 407647 - DNA, 774 bp, Homo sapiens
cagagtgagaggagcaaaggggactcggccgccatgttaggagtactgggacgattccgcggagccgggcagaggttttaggggaatgattaacaaaggcgtccgaagaaatcgttgttggaaggtgaccaaggtggaaagagacgttgctttggccctgcaagtaagaagagagagggaatagcctgaaggagtaacactaaatttaaaatgacacttttttaccaaccagcgaaagcagatgttcaaaggggatattggccagagtctgtcacactaagatgagaaatgtcctttcttcctgaaggtgtctgatgtgtaaaaatatgatatactttgtgctgtttcctcccttcccttttgcatattattctgaaacaacattaactagttactttgcgtcattgaaggtatgcacttcccctctatgttaggagtgaataaaattaaaaatagatccttataacaaagaaaggcagatagaatgattaaaaatgaccaaaacatgttagaaacagtctctcaggtgtatgcagatggtaattacaaaaatactttttcaaaaaaaaaaaaaaaaaaaaaaaaaaacaattttgggcgggtcggcaccggaaaaagtttttaacccttcggtggggcggcggcccaggtatggaccggccatcgcgggcaaggaacccggcacgcacagggggcttcccaaaaaaagcgggggaccgggtcgaacatccgggtcggctccggcttacagggccggctaccccgccggggggt

SEQ ID NO: 407648 - DNA, 881 bp, Homo sapiens
ggtctcagctcctgaaggggttgcatggggccctacgcttccttctccattttttagctaagagattgagagagtcggtttacttttgggcttggagtatcatttagatctgttaacagtacagttgagagagttggtgtcttttgttgaggtgcgaggacccgaggcggcgaccctcgcctttattcggagaagcccacttccacccacagagttggggtagtcctccgaaatgcatttttgttttgccgtttgttttccaaccccctttcactctccccaaagcttcagattcactgatttttcatacaggaatgattaacaaaggcgtccgaagaaatcgttgttggaaggtgaccaaggtggaaagagacgttgctttggccctgcaagtaagaagagagagggaatagcctgaaggagtaacactaaatttaaaatgacacttttttaccaaccagcgaaagcagatgttcaaaggggatattggccaggtgcggtcgctcacgcctttaatcccagcactttgggggcagacgcggggagatagcgtgattctaggagttcaaccccagcctgggcaacatgcggagaccccgtaccgtctctacaaaaacattaaacaaaaaaattagctgggcatggtggtgtacccctgtagttgcagctacactagaggctgaggtgggaggatcgcttgagcccgggatgttgaggctgcagtgagcctcgatcctaccactgtgctccagcctgggcgacagcaagcccgtgtctcagaaaaggcgggaggggtgggatattattgatgataggccttctgacgtctggcaatagattccagagtaacatcggtcatggataaattttttttttaacta

SEQ ID NO: 407649 - DNA, 649 bp, Homo sapiens
ggtctcagctcctgaaggggttgcatggggccctacgcttccttctccattttttagctaagagattgagagagtcggtttacttttgggcttggagtatcatttagatctgttaacagtacagttgagagagttggtgtcttttgttgaggtgcgaggacccgaggcggcgaccctcgcctttattcggagaagcccacttccacccacagagttggggtagtcctccgaaatgcatttttgttttgccgtttgttttccaaccccctttcactctccccaaagcttcagattcactgatttttcatacaggaatgattaacaaaggcgtccgaagaaatcgttgttggaaggtgaccaaggtggaaagagacgttgctttggccctgccacacttcagtgaattatcttgtatacctctagagtgagcacattccactttggagatcagtagtctcagcaacaagacctccagccctggcccataaaactttcctttccattcttcgtgctctcattcttccttcatctgccggaggattcagcagaaccattaggtgcacagagctcttctctcctcccactacttccaacgtgcattgaactgtgatgtgagccagaaataaactcttattgtgttaaatcatta

SEQ ID NO: 407650 - DNA, 389 bp, Homo sapiens
cagagtgagaggagcaaaggggactcggccgccatgttaggagtactgggacgattccgcggagccgggcagaggttttagggacggggttttcccatgttagccaggatggtcttgatctcctgacctcgtgatctgcccacctcggcctcccaaggtgctgggattacaggtgtgagccaccacgcccagcctaccttgctatagaatctttaggcctaatatagtctagccagaacagctatttggatgcttgcctaatcttcaatactggtttcccttttatacatgactgcaaaactgactctcacctaggtttgtgatgttagaaactccagttgtttactattattattaaagtgggaaacggagttcgttgatcaaatgga

SEQ ID NO: 407651 - DNA, 409 bp, Homo sapiens
cagagtgagaggagcaaaggggactcggccgccatgttaggagtactgggacgattccgcggagccgggcagaggttttaggggaatgattaacaaaggcgtccgaagaaatcgttgttggaaggtgaccaaggtggaaagagacgttgctttggccctgcaactcactttgaggccaagctgggattacaggtgtgagccaccacgcccagcctaccttgctatagaatctttaggcctaatatagtctagccagaacagctatttggatgcttgcctaatcttcaatactggtttcccttttatacatgactgcaaaactgactctcacctaggtttgtgatgttagaaactccagttgtttactattattattaaagtgggaaacggagttcgttgatcaaatgga

SEQ ID NO: 407652 - DNA, 318 bp, Homo sapiens
ggctaagcagtttaccaaagcattttcctttccctccttagcacacaggactatatttcctggcctcctttgcagttaggtgcagccacattactgtgttctagccattgaaatatggaaagaaatgatcaatactacctccagccctggcccataaaactttcctttccattcttcgtgctctcattcttccttcatctgccggaggattcagcagaaccattaggtgcacagagctcttctctcctcccactacttccaacgtgcattgaactgtgatgtgagccagaaataaactcttattgtgttaaatcatta

SEQ ID NO: 407653 - DNA, 285 bp, Homo sapiens
cagagtgagaggagcaaaggggactcggccgccatgttaggagtactgggacgattccgcggagccgggcagaggttttaggggaatgattaacaaaggcgtccgaagaaatcgttgttggaaggtgaccaaggtggaaagagacgttgctttggccctgcaactcactttgaggccaagcgtggttgctcaggcctgtaatcccagcactttgggaggccgaggcaggtggatcacctgaggtcaggagttggagaccagcctggccaacacgacaaaccccgt

SEQ ID NO: 407654 - DNA, 1495 bp, Homo sapiens
cagagtgagaggagcaaaggggactcggccgccatgttaggagtactgggacgattccgcggagccgggcagaggttttaggggggtgcgcaggagtcaagtggtggttcagtggggacggaatgattaacaaaggcgtccgaagaaatcgttgttggaaggtgaccaaggtggaaagagacgttgctttggccctgcaagtaagaagagagagggaatagcctgaaggagtaacactaaatttaaaatgacacttttttaccaaccagcgaaagcagatgttcaaaggggatattggccagagtctgtcacactaagatgagaaatgtcctttcttcctgaaggtgtctgatgtgtaaaaatatgatatactttgtgctgtttcctcccttcccttttgcatattattctgaaacaacattaactagttactttgcgtcattgaaggtatgcacttcccctctatgttaggagtgaataaaattaaaaatagatccttataacaaagaaaggcagatagaatgattaaaaatgaccaaaacatgttagaaacagtctctcaggtgtatgcagatggtaattacaaaaatactttttcaaaaaatgatcttctgtgtcatgtttctgggaacaagtcaagatgaatgagtttgatttttaagcagaagtagtatgtgttggtgtcatccatgaatacaacaatgaaaaaggctcaaagttgttgttattcagaaacttctctaagtaatggtggtaagtacaggaaaaggagcaatgtctaccattttctttctaaccttcgatttaactattgtaatgttgtaagcttaacagagacttacacttaggcttaatttcaagctcttcaatcatttttcccggttggtgattcaggtgtattctcatgtcttatgtaaacttatcatgagtgttgttgatttataatatatttctttatgtaagccatagccttgtcagtttgagttatatggaagacaaattgtagggaaaaagagcaacagattactcagaaaccttctgtgtgagctgggcatagtagtgcatgccagtaggcttagctacttgggaggctgaggcaggaggatcacttgatcccattagtttgaggctgcagtgagctatgattgtgtcactgtactccaatctggacaacagtgagactatgtctgtttttaaaaaagaaagaaagcttgtgtttgagaagtgatacctctagaatacagtgatttctataatttgtcatgtgtttgggtagtttgaagtttttctatccttgtatctaatggacatctgaccataaagatgaaaaaatcctgcactcattataaattttatttataaaattgatatttgaggagttggggaggccagcttctgaaaaaataacagtgtcccatagaaacaccacaacttaggaaaatattgttaaagtggaattaggaatatctagaggaggtaaagcttttcatctctc

SEQ ID NO: 407655 - DNA, 1583 bp, Homo sapiens
ggtctcagctcctgaaggggttgcatggggccctacgcttccttctccattttttagctaagagattgagagagtcggtttacttttgggcttggagtatcatttagatctgttaacagtacagttgagagagttggtgtcttttgttgaggtgcgaggacccgaggcggcgaccctcgcctttattcggagaagcccacttccacccacagagttggggtagtcctccgaaatgcatttttgttttgccgtttgttttccaaccccctttcactctccccaaagcttcagattcactgatttttcatacaggaatgattaacaaaggcgtccgaagaaatcgttgttggaaggtgaccaaggtggaaagagacgttgctttggccctgcagtctgtcacactaagatgagaaatgtcctttcttcctgaaggtgtctgatgtgtaaaaatatgatatactttgtgctgtttcctcccttcccttttgcatattattctgaaacaacattaactagttactttgcgtcattgaaggtatgcacttcccctctatgttaggagtgaataaaattaaaaatagatccttataacaaagaaaggcagatagaatgattaaaaatgaccaaaacatgttagaaacagtctctcaggtgtatgcagatggtaattacaaaaatactttttcaaaaaatgatcttctgtgtcatgtttctgggaacaagtcaagatgaatgagtttgatttttaagcagaagtagtatgtgttggtgtcatccatgaatacaacaatgaaaaaggctcaaagttgttgttattcagaaacttctctaagtaatggtggtaagtacaggaaaaggagcaatgtctaccattttctttctaaccttcgatttaactattgtaatgttgtaagcttaacagagacttacacttaggcttaatttcaagctcttcaatcatttttcccggttggtgattcaggtgtattctcatgtcttatgtaaacttatcatgagtgttgttgatttataatatatttctttatgtaagccatagccttgtcagtttgagttatatggaagacaaattgtagggaaaaagagcaacagattactcagaaaccttctgtgtgagctgggcatagtagtgcatgccagtaggcttagctacttgggaggctgaggcaggaggatcacttgatcccattagtttgaggctgcagtgagctatgattgtgtcactgtactccaatctggacaacagtgagactatgtctgtttttaaaaaagaaagaaagcttgtgtttgagaagtgatacctctagaatacagtgatttctataatttgtcatgtgtttgggtagtttgaagtttttctatccttgtatctaatggacatctgaccataaagatgaaaaaatcctgcactcattataaattttatttataaaattgatatttgaggagttggggaggccagcttctgaaaaaataacagtgtcccatagaaacaccacaacttaggaaaatattgttaaagtggaattaggaatatctagaggaggtaaagcttttcatctctc

SEQ ID NO: 407656 - DNA, 1061 bp, Homo sapiens
cagagtgagaggagcaaaggggactcggccgccatgttaggagtactgggacgattccgcggagccgggcagaggttttaggggaatgattaacaaaggcgtccgaagaaatcgttgttggaaggtgaccaaggtggaaagagacgttgctttggccctgcaagtaagaagagagagggaatagcctgaaggagtaacactaaatttaaaatgacacttttttaccaaccagcgaaagcagatgttcaaaggggatattggccagagtctgtcacactaagatgagaaatgtcctttcttcctgaaggtgtctgatgtgtaaaaatatgatatactttgtgctgtttcctcccttcccttttgcatattattctgaaacaacattaactagttactttgcgtcattgaaggtatgcacttcccctctatgttaggagtgaataaaattaaaaatagatccttataacaaagaaaggcagatagaatgattaaaaatgaccaaaacatgttagaaacagtctctcaggtgtatgcagatggtaattacaaaaatactttttcaaaaaaaaaaaaaaaaaaaaaaaaaaaaaaaaaaaaaaaaaaaaaaaaaaaaaaaaaaaaaaaaaaaaacaaaacaaaaaaaaaaaaaacaaaaaacaaaaaacaccaacaaaaagcgacagccacaccacacacaaaaacgcagacccgcgagacaacgacacacgcgaagacacaacaactcacgaccacaaggcacacccccagaacagcgcccacagcacccccgacagccgccgcccaaccgcgacataagccccccacagccccaacgtaccacccacccatgaccacccacaccaccgcacgccccccacaccggcgcccgccacagcaccagagcacacccgccaccgcgcaacacacgcaaccccctcccgcccaccaactatacacaaagacgacactcagcacaccgacacaccgacacacaacccccgccgcaagcgcaccccagcccacctccactccacctccccagacccacccgaacacccggc

SEQ ID NO: 407657 - DNA, 696 bp, Homo sapiens
cagagtgagaggagcaaaggggactcggccgccatgttaggagtactgggacgattccgcggagccgggcagaggttttaggggggtgcgcaggagtcaagtggtggttcagtggggacggaatgattaacaaaggcgtccgaagaaatcgttgttggaaggtgaccaaggtggaaagagacgttgctttggccctgcaagtaagaagagagagggaatagcctgaaggagtaacactaaatttaaaatgacacttttttaccaaccagcgaaagcagatgttcaaaggggatattggccagagtctgtcacactaagatgagaaatgtcctttcttcctgaaggtgtctgatgtgtaaaaatatgatatactttgtgctgtttcctcccttcccttttgcatattattctgaaacaacattaactagttactttgcgtcattgaaggtactcggcctcccaaggtgctgggattacaggtgtgagccaccacgcccagcctaccttgctatagaatctttaggcctaatatagtctagccagaacagctatttggatgcttgcctaatcttcaatactggtttcccttttatacatgactgcaaaactgactctcacctaggtttgtgatgttagaaactccagttgtttactattattattaaagtgggaaacggagttcgttgatcaaatgga

SEQ ID NO: 407658 - DNA, 993 bp, Homo sapiens
cagagtgagaggagcaaaggggactcggccgccatgttaggagtactgggacgattccgcggagccgggcagaggttttaggggggtgcgcaggagtcaagtggtggttcagtggggacggaatgattaacaaaggcgtccgaagaaatcgttgttggaaggtgaccaaggtggaaagagacgttgctttggccctgcaagtaagaagagagagggaatagcctgaaggagtaacactaaatttaaaatgacacttttttaccaaccagcgaaagcagatgttcaaaggggatattggccagagtctgtcacactaagatgagaaatgtcctttcttcctgaaggtgtctgatgtgtaaaaatatgatatactttgtgctgtttcctcccttcccttttgcatattattctgaaacaacattaactagttactttgcgtcattgaaggtagtttggataattaagggagcactagaaaacttttttttttttttttgagatggagtctgttgcccaggctggagtacagtggtacggtctcgactcactgagccgggacctccggggctcaagtgatcttcctggcctcaaagcctcccaaagtgctcagattatagggtgtgagccaccacgcttgggccaccatctatttactttcggaaatcttcaaaagacttgcttactcaaggtcagctgatggtgggtaaaaataatgggccttagtggttaagtgagacatcataggggtatgaggtatacattatgggatgcgattgtcggtccgaactatgggagttattacatcctatcctggagttgaatactcaggtccccacgagaaagaaaggtcgtttcaggcccggctcttggctcactgcgagcaattcttcctccttaatttcgaaataaaaacctattggggtgaagaccccgttaatagggtcataagggggcatccagggggtggtataacatgggggcccttggagttcc

SEQ ID NO: 407659 - DNA, 524 bp, Homo sapiens
tttctgactctgctgagcgcagttttgtcatctgtgatacgggtgcataccaaccctgtggagctctctgaagctactcggaatgggtaatgtgccccaggcagggctcagctgggcaagtaggggagcaagagcagcctggggtggcccagggactggtggcccctgctggctggcacttggacccttggcaaggcagtccctaagctctcagttcctcctgccctggggcaggaggggaggcccctgggcagcagccagcagcatccccaaccacagattggggggctgcagtccaggagggtgggtgctgggcctgggccctgcagcagctcacaggactcagtgggggccccaaggaggtgaggaggctgcactcccactcccagaaagcagcagcccaccaagagggtgtgtgtgtgtgtcctagccttgttcccaaagatgtcagaggtgatctgcattcagacatcttataaattggtaaacacctgtaatcccgacagagcaagactccgtctcag

SEQ ID NO: 407660 - DNA, 819 bp, Homo sapiens
aggagagcctggcccgctcttgtagacccgtcagaagtgattgggcctattttagcccacagagccctcaggtgttcttcatgaaaccttcagggagggagtggccttgtaaaaatggtcgtaacctgaggcttgaaatgcttggaaggcttagaagtaacgggctgagcaggtaccgagaagctgaaaggatatcctctccttgcattgattttgatttccgtttgtgtgacttcctaactccacgttcagaatccagcacagggtgatgtagaacaagtcattgaggttttccaagtcccagatagctatgagaatcctgtcgttgcttctgttctctagactggctgactgtgcctccttcctttcccgcccttctatttcctgcctttggctgtttgtggttggaaggagaggaaagagagaaaaggagccggaacacacagccatggtgaggtttgggcttatctgggacttatgtgtgttctgttctcctcccttccttctggagtttggatcaatgaagcttgatggcccccagcagttcacagaaacgggcatttctctgtgaaattattacagtgtcagaatagaaaaataatttataagtaaagtacatcaaaggttttccgtggcgttttgcttacgtttctgtgtctattgggattgccaaacaaaaagaaagtcacggccgggcgtggtggctcacgcctgtaatcccagcactttgggaggccgaggcgggcggatcacgaggtcaggagatcgagaccatcctggttaacacggtgaaaccccgtctctactagaaatacagaa

SEQ ID NO: 407661 - DNA, 1570 bp, Homo sapiens
cgaatcgccgaagggcactgcttcgccgatttaaaaaacaaagcaaaaagccccgcatctgcatcaggaaggcgcctctgcctactctgggagagagaagggcacccctcccccttgctacgtagtcgtctgcggaggcacaaccgtggaaacgggagccgccaccaccaccaccgctcaaacctctcggcactggctggggtacagggagcggctgcgagcgaatgggataagcgagcctccagttccccgtcttccagagcaagtggcttcagtgatatccaagcgcccttccagcacccattccctgcctcgccagcaggcaccggggccccacttggcgtttgcggatttcagctgaatgggaggcgacacaatgagacaagagcaaaccgtttctcagcgttcttgcccagggccttcccgtctcgcggcccggcctccctcacccggaagtgctggtcccggtactggctcagctccacgtaggagtcgctgcgcagcgccttcaggaggccacccgacatagtgcagagaagcggaccacaatgcggcgactcccggcacgaggctgcgtccgcgatggcggaagcggaaacgcgcggaggcgagcatctcattggacccaatccgagggcggcgtgtcgtcatcaagctgcgcgggggcatagacgtccgggtcgggcgccgcggggcggaagacgagggcggcgaggtcgggttccgggcgcttggagaagatggtgctgcggcggctgctggccgccctgctgcacagcccgcagctggtggaacgtctgtcagagtcgcggcctatccgacgtgcggcgcagctcacggccttcgcactgctgcaggcccagctgcggggccaggacgcggccgccgcctgcaggacctcgcggctgggcccgtgggctccctgtgccgccgcgctgagcgatttagagacgccttcacccaggagctacgccgcggcctccgaggccgctcggggccaccaccaggtagccagaggggccctggcgcaaacatttaatcctgggctgtgcggggccgaggccgcttgcttttccttccgggctctacagtggcatcaatgtggaggggtcattccgggcactgcgcgcggcttcgaatcccgactgggattgttggcctgcagacatcccacgcataagagcctaggccagaccgcccgctccgttgaagtcttgtgattggacaagacacagtgtggagacagccctaagcctaacagagatgaaggtaggctgggtccagacacggcacctacggagagccacggaccgaagccagagagcctttcctctgcaagtgggactgaaactcttgacagatgctgctcaatctgactggtatagcaggacagttaattccagggacgatatggatgaaaagacaaccctacagctgccaaattcctttgattaaatgtgtgagctggttgataggcatgagtgtgatacttctcaggcaagatgtgttaagaataccggggactgtaggcctatggtaataataaacacgtattttatgaaatgaatct

SEQ ID NO: 407662 - DNA, 325 bp, Homo sapiens
ctaaagagccaagtctgggtgctgtcgtgagaaggaaacatgggtatggaagaggcacaacttgccgtctcaaggccctggtccaaaagtggcccatatcactcctgctcccagcccttagcagggacataggcacatggccatactccactgccagctgcaaagcaggctgggaacaaaatccttacaggcatttatgtgaccagcaatagctctgtgctatggagaaaagagaaaaggaattttgctgggacagctttcggtctctgctaaatttattgattgattttcaaattttttttagatatgaggtcttgctttgttg

SEQ ID NO: 407663 - DNA, 435 bp, Homo sapiens
gattttgatttttaaaactcactgagtagtgtagccaagctcataaatccaagtatttgttttgcagtaactgtgatctggaattttatgttaagttgtggggttgttttctgttggtttattcagatggatgtaatgctactctctgggtgttcaaggtctgcctaggtgtggcaggggggcaaggccaagtggcaacttctgattccacatcctcgaagccagggaagaggcagtgctgtgcttcacggagcccacgtgggtatcagcaaccctgggacactggcaggcctgaagtgttaagaaatgtgaggagcggccgggcatggtggctgaagcctgtaatcccagcactttgggaggctgaggcaggcggatcacgaggtcaggagatcgagaccatcctggataacatggtgaaaccccgtctctact

SEQ ID NO: 407664 - DNA, 652 bp, Homo sapiens
taattgtggccttcacagagaagatgtttcattcatgaactcaggagctgaaggggtcttccctaaattcaggacaacattgagaacaaggccatgggggactgagccttggagtagaacagtgacatctgcacataagggatattgttaaggcccatgtggagaaaataaagctggcttcaagtgtctcaaggtacaagacatattttaatagagaaatgggcagtgcacattttgtaatgtttagtatctcctgtgttccttcctgtccctttattgagaataaggaatttttccattcagttttgcagtttataggctctcactcagggataatatgaaagcatacactcttgccagaaatttttaggtgtggacttggagactctgggtctgaaccaggtgacagcagtttacatcagacttggacaaagaacacctggcatttgttctgtcacagatatattacatgcatatatgctggagttccacactgaggccatctgaaagtttcaacgatgatggtggttcctaactgctaaatcatgaaaatctttgacataggacattctaccttgaatttatctgggtctctttccatataaactcattacttcaaagacgtctatctgctgaccagttggcagaagtt

SEQ ID NO: 407665 - DNA, 363 bp, Homo sapiens
gtgcatgacatggcattgggattggaacatgtggtttcgagcactgaaagctgcaaaccagtgaagaggaaaagaaccttgtgattaaatataaaaccaaaagtcaaatggtgctttgtgttttagccttcagtcaccatgactggtctctcccccagatgtatatataccatagcatttgtctacctgctgtcttttcttcaggacagatgttcaggaattatattgattgaatttagactctgtgcatgttcttatggattcagtaaccaggaggtgattgagatggtgagaaacggcagctcttaccatgctctgagactgcccacccagatgtacagcctaatgacaggtctggatagt

SEQ ID NO: 407666 - DNA, 296 bp, Homo sapiens
gtgcatgacatggcattgggattggaacatgtggtttcgagcactgaaagctgcaaaccagtgaagaggaaaagaaccttgtgattaaatataaaaccaaaagtcaaatggtgctttgtgttttagccttcagtcaccatgactggtctctcccccagatgtatatataccatagcatttgtctacctgctgtcttttcttcaggacagatgttcaggaattatattgattgaatttagactctgtgcatgttcttatggaaatgatgttcagaatccatgaagaaacttcaggcc

SEQ ID NO: 407667 - DNA, 359 bp, Homo sapiens
gatggagtctcgctctgtcgcccaggctgtagtacaatggtgcaatctccactcactgcaacccctcctcccaggttcaagcgattctgctgcctcagcctcccgagtagctgggattacaggcatgcaccaatgcgccaccatgcccggctaatttttgtatttttagtagagacagggtttcatcatgttggccagcctggtctcgaacacctgacctcaggtgatctgcctgcctcggcctcccaaagtgctgggattacaggcatgagccacgcgcccagcctgtcaaacttatttgaccacaacccatagcaagaaacattttaccttgtgctcaaatacacatatctgtaggc

SEQ ID NO: 407668 - DNA, 475 bp, Homo sapiens
gcctgtctaggtgatgctgttgttggattttgcccttgctattctccactgtactccaaagtttacttacagaaaagcatgggctgcgttaacaaagcatctcacgatcctacagcaaacactgtgggccaatttttaacttgttgcatgttatgctgtagtatccataggtagtttgttttcaaacaaagtacaggtgtgcatttctttaaaaaagcagttatgagtaatgtttaaactatccatagagctaggataggggtttactatttaatagctggcctgttgccagtgctcctttgaatatagagtactgctgcttaaagcaggaataacaaaagatgctgttttacataaggctactcaataccctgataaattactggtctactaaggtgaatctgtatctgaattttattttcaaagaggatgaaaagattgttttaatacatactgttttgacatttctaccaat

SEQ ID NO: 407669 - DNA, 449 bp, Homo sapiens
cccctacccactcacaggtcccagtgtgtgtttccctccctgtgtcctgtgttctcgttgttcagctcccacttataagtgagaacatgcggtgtttggttttctgttcctgtgttagtttgatgaggataacgccttccagctccatccatgtccctgcaaaggacatgatctcgttcctttctatgtcgagttacaaccatttttaaaagtggaactgcacaggattacctcagcctgctaagtccttccagctaggccgtccctgtgggtttaaacgcaatgtaaagaaagtggatgttaagtgttcttaccacaaaaatgataactatattagttaatgcatttgttagttagctagatttaaccatcccacagtgtattttatgtatttgtatttatatttcaaaacatcatattgtacataataaacacatcgatgttaaaaa

SEQ ID NO: 407670 - DNA, 1271 bp, Homo sapiens
tggagccaagccacctgtcttggtttctttctactaagagccataaagtatagaaatacttctagttgttaagtgcttatatttgtacctagatttagtcacacgcttttgagaaaacatctagtatgttatgatcagctattcctgagagcttggttgttaatctatatttctatttcttagtggtagtcatctttgatgaataagactaaagattctcacaggtttaaaattttatgtctactttaagggtaaaattatgaggttatggttctgggtgggttttctctagctaattcatatctcaaagagtctcaaaatgttgaatttcagtgcaagctgaatgagagatgagccatgtacacccaccgtaagacctcattccatgtttgtccagtgcctttcagtgcattatcaaagggaatccttcatggtgttgcctttattttccggggagtagatcgtgggatatagtctatctcatttttaatagtttaccgcccctggtatacaaagataatgacaataaatcactgccatataaccttgctttttccagaaacatggctgttttgtattgctgtaaccactaaataggttgcctataccattcctcctgtgaacagtgcagatttacaggttgcatggtctggcttaaggagagccatacttgagacatgtgagtaaactgaactcatattagctgtgctgcatttcagacttaaaatccatttttgtggggcagggtgtggtgtgtaaaggggggtgtttgtaatacaagttgaaggcaaaataaaatgtcctgtctcccagatgatatacatcttattatttttaaagtttattgctaattgtaggaaggtgagttgcaggtatctttgactatggtcatctggggaaggaaaattttacattttactattaatgctccttaagtgtctatggaggttaaagaataaaatggtaaatgtttctgtgcctggtttgatggtaactggttaatagttactcaccattttatgcagagtcacattagttcacaccctttctgagagccttttgggagaagcagttttattctctgagtggaacagagttctttttgttgataatttctagtttgctcccttcgttattgccaactttactggcattttatttaatgatagcagattgggaaaatggcaaatttaggttacggaggtaaatgagtatatgaaagcaattacctctaaagccagttaacaattattttgtaggtggggtacact

SEQ ID NO: 407671 - DNA, 286 bp, Homo sapiens
ataagcgcacagaagtgttcccagcagcactattcacagcagccaaaaggcggaggagccacaggcttgtcagctgatgacagataaagaaagcatggcctgtcatcccagcactttgggaggccgaggtgggtggatcacctgaggttgggagttcaagaccagcctggccaacatggtgaaacccagtctctactaaaaatataaaaattagctgggtgtgatgatgagcgcctgtagtcccagctacttggaaggctgaggaacaagaatcgcttgaacccgg

SEQ ID NO: 407672 - DNA, 4920 bp, Homo sapiens
  misc_feature (1051)..(1051): n is a, c, g, or t
  misc_feature (1961)..(1961): n is a, c, g, or t
  misc_feature (2265)..(2265): n is a, c, g, or t
  misc_feature (2274)..(2274): n is a, c, g, or t
  misc_feature (2415)..(2415): n is a, c, g, or t
  misc_feature (3081)..(3081): n is a, c, g, or t
  misc_feature (3138)..(3138): n is a, c, g, or t
  misc_feature (3358)..(3358): n is a, c, g, or t
  misc_feature (4001)..(4001): n is a, c, g, or t
  misc_feature (4317)..(4317): n is a, c, g, or t
aaataaaagtaaaaagatttcaaaataattcagacataaaaggagtgacattctgatacatggatggagctggagaatattatgcttagtgaaataagccagatacaaccttttgtacaaaaatacaaaattgtatgatctcatttatatgaggtagttagaagaggcaactctatggagacagaaagtagaatagaggttaccagggctgtgaggggagaggtgaatggggagtttaatgaatacagagtttctgtttggaatggtgaaaaaattctggagatggataatagtgatggttgaacaatattttgaatatatttaatgccacagaattgtacacttaaaaatggttaaaatggtaaattttacacgatatgtatctgtatctatatatatctctctctatatctatatatcttaccagaatacaaaatttaataacacactccgaaaacctttacagatgaggaaactgaagaaaactgtctacaggggaggagttaagaatttgcccaggattattcagctgggaatttgcattcgggatccaaacttagttctgtttcactacatattatctactccatattatctgttctgtgttatctgctggctttctgggtgattaaagatatgtcagctccgagaagaatgagtttatttgaatcattcagaaagttacatttaaaagtaggtaattgtagtttgatggaaggtacagtgtgaaaccctagacagactaaaggttaactttgaggatttctttctcagccagagtggtaatagtatgcatttgagaggggaggagagtagagttctaaggatgtggtctttggagacagtttcttgggttccagtccctgagctaccaatttgtgtctggggtgttatcctcttgatgtcttagcatccctatctgtaaattggtgaggataatgataacatctgataaggtggttgtgaggattaaaggaattgatacatgtgaaatccttagaactgtacctggcaaaaagtgtttgataaatgattttcagttattgtgccnatattattttagagttgatgtactttctcattaatggaaccaaacacttctcaagttaaaattacgtgcttaggactggtaagttacaaaaatggtaccacacgttttatctatttcaatttagaaatgtctgttgattaaatgtgttcgctttaaactactgaaacaatgtagacatttataaaatgaaagcgtattgatccctgttatctcattcgctacctttaacggtttggtgtatattcttccccaaattttcaaatatattcatatatgaatatgtatttttacatacattttataaaaatgggaccaagttatttggttctaacatggcttttttttaaggtcaatacaaagatctgttttattaaaaaataattgatattcctttagggctcactatatgcttggtactcttctaagtcattattttatatagatactataatatcgagagatggagagattaagtaacaactagttagtggtagaggaaggattttaatttgggtacgttagcttcaaagtcctgatctcccagccagggatcatttttggtaaggcctgtgagctggaaacgttaacacttttaaaagagttgtaaaacaataccaccccacttccctgaagaacatataagggagactagataccgcctgccaagcctaaaatacttaccatgtggccctttacagagaaagtttgctgccccttgctctaagccatccagctgtacctctttggtgtaaggggggtgcatagtattccagtttatgaatgtgcattacgcagcaaaccaatctgttgtgattgacattgttttctctcctgaaaagaagtgaacatccttatgtatctttgaacatttgtgtgacaattttctatagagttggctctttcaagattntgaacatttctagttttaataggtgttgtcaagttatattaatttttagttaaaacaacaactgtattgaagtataatttacatacaataaaaagcacacatttgaagggtatgatttgaggagttttgacaaatgtatgcacctgcaccgctgcctggatcaagatctataatggttgccatcatctcagagtcctttcatcctcttttacagtcattctctcaacttttttttttttccctccaagatggagtcttgctctgtcacccaggctggagtgcaatggcatgatctcggctcacngcaacctcngcctcctgggttcaagcaattctcctgcctcagtctcccgagtagctgggattacaggcgtctgccaccacacccagctaatttttgtagttttaggcgagatctcagctcactgcaaccttgacctcctgggctcaatcnaacctctcacctcagcctcccaagtagctaggaccacaggcatgtaccaccatgcccagctaacatttattattaatatttttttgtagagatggggttttcctgtgtcgcccaggatggtttccaactcctgggctcaaatgattctgccttggcctcccaaagtgttgggattacaggcatgagccgcggcacctgacttgtagtaaactctctgaattaatattccattgtaggcatgtgctacagtttttaaattcatttacccatggatggacacataggactgttgtcagctgttgataaagctgctatcaccatttgtatgtctttcctggacatgttttagtggtaaatattgattttactttgtaagaaaccgttaaactcttttccaaaatagttgtaccattttaaattgaaagttacagttgtaactgtgcaggagttacagtttcttcacattttcattgacacttcgtgttgccagtcttttaaattttggccatcaaatgagtattaagtatctcattgtgggtttgtgtttctcagatgatcaatgatgttggaacatcttttcatatgcttattggccatttgtgtactttttttggttcaagccttttgtccctttaaaaaattggattgtttgtctggttgagtggnaagaggtctttatatgttctgggtacatagtcacattatctgtcagattgtgttgcnaatattttattgttcatttttgtttgattttgtgtatttttaatactataaagatcaagttaaaactttaatatgggaagcataatcagataaattatgtgaaacaaattgtccttaattcacgagtcatttaattagtgtaacaaaatgttatgcatttgcagaaacttgtaaactaaaaggatattattcatatgctgttaggtgtatggatgataantttttttaattaaactagttttgaaaattattgtatttagtaattctcttcattttgcataattcaaaccttttcatttattagtgagttaagccttaaattttttcttcaaaggataaatgagaatattaaaagtaaaaagtgaccttgatcttagaatggggtatgtagaaatgatgattgccaaacttagtttccctactttgacaatcaagtaaaattttttttttttttttttgagacggagtcttgctctgtcccccaggctggagtgcggtggcgcgatctcggctcactgcaagctctgcctcctgggttcacgctgttctcctgcctaagcctcccgtaaatttttttattatagaaatggatggcttttcagattatatatacttggtttctatacactattttatttttgtaaagtagcagttcttttgctcaacacctgaattgcccccacaataaatttttagtttttcttcaatattcaagtaatacataacttttccttttcctgtttaacaaagaaaaaaatatataaagcaagctgttggacctccattgggtgttgtttaccaccactgtaggtgatcgtggcattgtccacctcagtcttctcatggctgtggattcaagttangaaattcctgaaggtagcattccaggtagtctgtagaacagcccaaactctctgaattagtattatctctgataggtgttttttttttctttgcttttttatttgagacggggttttgctctgtcacccagcctggatttcagtggcacaatcttggcttactgcaacctccacctcctgggctgaaacaatcctcccacatcagtctcctgagtagctgggaccacaggcacatgccaccatgcccagctaattttttatatttttgttagagacagagtttcactatgttgcccaggttggtctcaagattccngagctcaagcgatgttcccatcttggcctcccaaagtgctgggattacaggcatgagccgctgtgcctggccctggtagttttcttcttatatctttctcctgttgatctcacttgattttcttactagtctacaggaaatttcacgtggagattctgtgcctgtcctctttctggaatatcttccttattttagcatctcaacatgctgttcagcttctggcttgaaaccacccctctcccatcccaaccaagttaagcagcttctttcctgcttagaagtaccataacatgtgtattaatcttttgtctttttctctctccttcccttcattttaagctcctttttattaatctgtagggcagagcttagaaaaaggtttttgtatattgtaagtactaataaaatatttgtgaagttgatttgggacttgggagacctctcttctgtaagcaactcaataaataattatttaagtaccatcctcacccagtgtactgttagctgctgttatgatattgattactgtaaaattttaaagtatatccttggtagactgttgatcaaagtcagaaagcttgagaaactctgaggcaaaaaaaa

SEQ ID NO: 407673 - DNA, 1675 bp, Homo sapiens
  misc_feature (1051)..(1051): n is a, c, g, or t
aaataaaagtaaaaagatttcaaaataattcagacataaaaggagtgacattctgatacatggatggagctggagaatattatgcttagtgaaataagccagatacaaccttttgtacaaaaatacaaaattgtatgatctcatttatatgaggtagttagaagaggcaactctatggagacagaaagtagaatagaggttaccagggctgtgaggggagaggtgaatggggagtttaatgaatacagagtttctgtttggaatggtgaaaaaattctggagatggataatagtgatggttgaacaatattttgaatatatttaatgccacagaattgtacacttaaaaatggttaaaatggtaaattttacacgatatgtatctgtatctatatatatctctctctatatctatatatcttaccagaatacaaaatttaataacacactccgaaaacctttacagatgaggaaactgaagaaaactgtctacaggggaggagttaagaatttgcccaggattattcagctgggaatttgcattcgggatccaaacttagttctgtttcactacatattatctactccatattatctgttctgtgttatctgctggctttctgggtgattaaagatatgtcagctccgagaagaatgagtttatttgaatcattcagaaagttacatttaaaagtaggtaattgtagtttgatggaaggtacagtgtgaaaccctagacagactaaaggttaactttgaggatttctttctcagccagagtggtaatagtatgcatttgagaggggaggagagtagagttctaaggatgtggtctttggagacagtttcttgggttccagtccctgagctaccaatttgtgtctggggtgttatcctcttgatgtcttagcatccctatctgtaaattggtgaggataatgataacatctgataaggtggttgtgaggattaaaggaattgatacatgtgaaatccttagaactgtacctggcaaaaagtgtttgataaatgattttcagttattgtgccnatattattttagagttgatgtactttctcattaatggaaccaaacacttctcaagttaaaattacgtgcttaggactggtaagttacaaaaatggtaccacacgttttatctatttcaatttagaaatgtctgttgattaaatgtgttcgctttaaactactgaaacaatgtagacatttataaaatgaaagcgtattgatccctgttatctcattcgctacctttaacggtttggtgtatattcttccccaaattttcaaatatattcatatatgaatatgtatttttacatacattttataaaaatgggaccaagttatttggttctaacatggcttttttttaaggtcaatacaaagatctgttttattaaaaaataattgatattcctttagggctcactatatgcttggtactcttctaagtcattattttatatagatactataatatcgagagatggagagattaagtaacaactagttagtggtagaggaaggattttaatttgggtggtcaccaactgccaaaatctgttcctggcattaagctccttcttcctttgcattcggtctttcttcagtggtcccatgaatgctttcttctcctccatggtctgtacg

SEQ ID NO: 407674 - DNA, 168 bp, Homo sapiens
cacacagagttaaatttatattttttaaaacaaagtctgaaattattcagtattccctatccttttttaacaaacaggaacttagcacactttagcttccctatgcatatcattactttattaaaaaatgggaaacaggtctgtactccctatctgtggcaatcaaga

SEQ ID NO: 407675 - DNA, 504 bp, Homo sapiens
ataaatggaaacagacctggcaagtaagacatctctgatttggaggatatattttttagtctacaaagaatccttgaatacatcaagatagagcatatcttacaaacatatgggcaaccatatgacatcatcctgtgtcactactagttttggtcatgtgaatccaaagggccctttggtgatgttactcaccaatacacttcccagtcatataaaattagataccttcccatccttaaccacttttagtagaaagaatgcccttcagtccacactgtgttactaggcccaaagcagtgttactagtagtctatttcttacagcatacaaaactgctctgtatcagtttgccagggctgtcataacaaagtaccacagactgtggcttaaacaacagaaataacaaagtagcacagactgtggcttaaacaacagaaatttattttccacaattctggaggccgaaagtctgagatcaaggaggcagcaaaggtggtttcttct

SEQ ID NO: 407676 - DNA, 504 bp, Homo sapiens
tcctgagctctgtctggctttttttgcggggaagagatggagattaatgaattgtctttgggcatgtttagtttcaggtacttggaaatacaggcttgcagtttagaaaacaacttacagctgtagataaacatttacgaattatcaacatttgaggtagtggcaagtaaatgatgtttttatagaattatcatgtagttaagaagaaaacagttttaaatattggaccatgggccagcatttaagagaaagttaaggaaaaaaaaaagatttaagaaaaagacacacagaaagtcatgccactgagattttactatgagtcccaggcaaaggttttaagatgagtgtatcaatgtcccctaggcataaaaaggattaaaaagagaagagttcagatgacaatttggaaggcactggtaaactttgagcagtttaattagattggtggagagttggagacgagacagagtccttgaactgataaacaaaaaaaatctgagagta

SEQ ID NO: 407677 - DNA, 607 bp, Homo sapiens
tcagcatggaaatggatataactttctgtgctcctctgcactcctaaaatagtctaatatgttccagatgagtttgcagctgagaactccctgcatcattccactgatggatgcacagggcatgattatgtaataatgtggacagctactgcaacatctagatcattgagggcagtgtagatgtggctgtgtgctaggacccttggtagctatccagaggactcagtctggtgtctttctgagtctctgtgagaggcctctaagccctgcttctccttgaaaatgattccctagacaccgaatgccttgtttgtatgagtgaataaatgctctgggctgctagagaaagcaataggaggagctgggaggaagagaatattcaggggcgcactttgctaccaaacaatttccatgtcagctgctaacattactgcctttttagcctatgaagtgtagggcaaggactttgacctgccaggtggggctggaaaggagcacatcagctccaggctaagaaatgggatagaaaagcaagaagagaggcctggctggctttggcgggggtgagtctcagctcctgagggtttgaacatgctctgtgcttgcc

SEQ ID NO: 407678 - DNA, 469 bp, Homo sapiens
gtgcgctctcattgtcaggggaccgctgtggggaaaggggtcggacagctctgcactgggcagttccctgctccctggaaggctttcccatgtttatatttttcttcccttctctgtgtaaacagccctgcttcctccaattgatcctgagtatttgataccatttccagacaccattctagtgaaggtgctctggtttccattgtccccgggaaatgtggcatccagagctgagcagagttacccagatgtcatgtgcctggtgcccgaacagaaggagtgttgtacctgtggcttagagttgaaatgcaaagtgagtgacttaagaattcactagatggaaaccccactgaagtggtgcgtgtctgtttcactgttttatcctcgttgacttatgggctcagtaactatttttaaaatgatggaatgattagatgaaagaggagatggaaaaaaacagagaaagcaa

SEQ ID NO: 407679 - DNA, 360 bp, Homo sapiens
aactttcaggaaatgaaactgtcagaaaactgccctaggtctattatcaatcagagcccctgtgagtggaagtcctcagattctggaatccatccagtgtctttcttttccttccattcatcctgacatgaataagcataacataactgtaagaaggagtgtagtgtcccagccctgacaacgagtaccgccagggacctaccatctaacaccatctgggaacactattttttctcagtccttccagttgacacaaggaaaccctttataaaataggacaaaattaggagattagtcccaagccaagaccaaaggtgaagataattgtgttagtgattaacgcctggtcttattttaacg

SEQ ID NO: 407680 - DNA, 334 bp, Homo sapiens
ctaatagggtaaaggagaagattgcctctaggatgagttcattcatgtgaaaagatcttgtaaagttaaaccataaaatgttccactgatgcattatcaatgatggctacagtaaatattaagacaagcttttacagctgtttcccaatcaataagatgtaagatgtaataaaacatagacctgacctgcattcccattaaattcatgaaagacattctgtgctactgatctggcagtgcctgcagcaggcccgccaaacagaaatatgtgcgtacttcaggaactgagcagcctgtgggtgatgtccaactagagcctctcactctgaattcc

SEQ ID NO: 407681 - DNA, 347 bp, Homo sapiens
tccaatcagaaccaggttgttgaaaggagcgtccacactacagctcgctcagaggttttggaattttctcgctgacattatgaaccgcaaaggtctttgcctaactctgtagaacctgttttcttgatttggctgttgggcgacaccagacgccttggactttccctaggaggcgtggggagtccctgggtctcctggttagggtcagtgacagggatgctcagagcacattcatggctcaccacagacaatgtgacccccaacactgctgcagaaagggtgccgcaagcgccccaggactgacctctcacatccatctcccaagcatgttgacagactatctggag

SEQ ID NO: 407682 - DNA, 264 bp, Homo sapiens
ccttatgaccctcccttacaaaatcagtaagaagaggatattgcggtagttggatgcacagagttttcatctatgttccaggattcagggggtctgtgatctaccagaaaaatgttttacaaacatttgtagatttagttttttgtgtagcgggcccattgcttacattagattctcaaagttgtctatgaccctaaaatattaagaccctttgtctaatggtttttttttttttctttttctttttcttttgagacggagctt

SEQ ID NO: 407683 - DNA, 452 bp, Homo sapiens
ttcccagctccttgtccgcaagactggatctggcatggagaaaactgttacctattttcctcgggctcatttaactgggaaaagagccaagagaagtgcttgtctttggatgccaagttgctgaaaattaatagcacagctgatctggacttcatccagcaagcaatttcctattccagttttccattctggatggggctgtctcggaggaaccccagctacccatggctctgggaggacggttctcctttgatgccccacttatttagagtccgaggcgctgtctcccagacatacccttcaggtacctgtgcatatatacaacgaggagctgtttatgcggaaaactgcattttagctgccttcagtatatgtcagaagaaggcaaacctaagagcacagtgaatttgaaggctctggaagaaaagaaaaaagtctttgagttttattct

SEQ ID NO: 407684 - DNA, 367 bp, Homo sapiens
ggatatgatacgctttctctcttctctttagggtaatgttcaattacactgcatatattttgctattatgtaggttttttttttttttccacatatactggctttacaaatgccatataattagtatggtaccaaattgttattacatttgaaatacgttaaaaagaatccaggagtcagggtgggtggggagacaactccagggacacaatacattgtgtcttgtattaaaaactagtgtgtgttggggtggggaacaggcaggaaactaatatgtttctgtttgatatatgaaaatatgcacaagctatcatgtttcatctcatatcaacaaaatgattataataaatcatactctagaaaactc

SEQ ID NO: 407685 - DNA, 2544 bp, Homo sapiens
agcggggctccctcccggtccccacctcggccccgggctccgaagcggctcgggggcgccctttcggtcaacatcgtagtccaccccctccccatccccagcccccggggattcaggctcgccagcgcccagccagggagccggccgggaagcgcgatgggggccccagccgcctcgctcctgctcctgctcctgctgttcgcctgctgctgggcgcccggcggggccaacctctcccaggacggctactggcaggagcaggatttggagctgggaactctggctccactcgacgaggccatcagctccacagtctggagcagccctgacatgctggccagtcaagacagccagccctggacatctgatgaaacagtggtggctggtggcaccgtggtgctcaagtgccaagtgaaagatcacgaggactcatccctgcaatggtctaaccctgctcagcagactctctactttggggagaagagagcccttcgagataatcgaattcagctggttacctctacgccccacgagctcagcatcagcatcagcaatgtggccctggcagacgagggcgagtacacctgctcaatcttcactatgcctgtgcgaactgccaagtccctcgtcactgtgctaggaattccacagaagcccatcatcactggttataaatcttcattacgggaaaaagacacagccaccctaaactgtcagtcttctgggagcaagcctgcagcccggctcacctggagaaagggtgaccaagaactccacggagaaccaacccgcatacaggaagatcccaatggtaaaaccttcactgtcagcagctcggtgacattccaggttacccgggaggatgatggggcgagcatcgtgtgctctgtgaaccatgaatctctaaagggagctgacagatccacctctcaacgcattgaagttttatacacaccaactgcgatgattaggccagaccctccccatcctcgtgagggccagaagctgttgctacactgtgagggtcgcggcaatccagtcccccagcagtacctatgggagaaggagggcagtgtgccacccctgaagatgacccaggagagtgccctgatcttccctttcctcaacaagagtgacagtggcacctacggctgcacagccaccagcaacatgggcagctacaaggcctactacaccctcaatgttaatgaccccagtccggtgccctcctcctccagcacctaccacgccatcatcggtgggatcgtggctttcattgtcttcctgctgctcatcatgctcatcttcctcggccactacttgatccggcacaaaggaacctacctgacacatgaggcaaaaggctccgacgatgctccagacgcggacacggccatcatcaatgcagaaggcgggcagtcaggaggggacgacaagaaggaatatttcatctagaggcgcctgcccacttcctgcgccccccaggggccctgtggggactgctggggccgtcaccaacccggacttgtacagagcaaccgcagggccgcccctcccgcttgctccccagcccacccacccccctgtacagaatgtctgctttgggtgcggttttgtactcggtttggaatggggagggaggagggcggggggaggggagggttgccctcagccctttccgtggcttctctgcatttgggttattattatttttgtaacaatcccaaatcaaatctgtctccaggctggagaggcaggagccctggggtgagaaaagcaaaaaacaaacaaaaaacaaaaccctggagtgttaggaggagagtgaaggtagaggggtgaggaagggtaaggggcagggctggtttcagctgggggctctcaccagccctcctttcagcctctacaacagagcagcttcccagacttctccaggaacccagaaacgggatggttgtcggcaaaggttgggagtggcttttcctctggtagccacacacctgagcactacggacagggaggcaggtgccaccttgacacctctcttccatagcaatgggaaagtgatgagtgcgggagtcctgaggagatgtggcctgcagacaacatgcagccatgcagggacccaggactgtaacctggggaggacgcgggtccctgcaaggaagagtagatttggagaggaaggatggaggtggactctcaccccattccccccggaaatgaacaaagccgggccctttccataggaactgcccttggagatagcagagtgtggctgcccctccttgctccagcagcagtgggagaggcactgctctggggcctgaactgcctctgcttccccccctgaggggcccctcactcttacccaagactctggattgttgcacggcaaccactcctcccatggcattgctcagcaactacttctcccttcccggccaccctgtgcccccttcctggtcccaacgccagcccttcatccttcctccctcagcagccaggcagacataacaacaaaactactaaaaggagcttcactgc

SEQ ID NO: 407686 - DNA, 5361 bp, Homo sapiens
agcggggctccctcccggtccccacctcggccccgggctccgaagcggctcgggggcgccctttcggtcaacatcgtagtccaccccctccccatccccagcccccggggattcaggctcgccagcgcccagccagggagccggccgggaagcgcgatgggggccccagccgcctcgctcctgctcctgctcctgctgttcgcctgctgctgggcgcccggcggggccaacctctcccaggacgacagccagccctggacatctgatgaaacagtggtggctggtggcaccgtggtgctcaagtgccaagtgaaagatcacgaggactcatccctgcaatggtctaaccctgctcagcagactctctactttggggagaagagagcccttcgagataatcgaattcagctggttacctctacgccccacgagctcagcatcagcatcagcaatgtggccctggcagacgagggcgagtacacctgctcaatcttcactatgcctgtgcgaactgccaagtccctcgtcactgtgctaggaattccacagaagcccatcatcactggttataaatcttcattacgggaaaaagacacagccaccctaaactgtcagtcttctgggagcaagcctgcagcccggctcacctggagaaagggtgaccaagaactccacggagaaccaacccgcatacaggaagatcccaatggtaaaaccttcactgtcagcagctcggtgacattccaggttacccgggaggatgatggggcgagcatcgtgtgctctgtgaaccatgaatctctaaagggagctgacagatccacctctcaacgcattgaagttttatacacaccaactgcgatgattaggccagaccctccccatcctcgtgagggccagaagctgttgctacactgtgagggtcgcggcaatccagtcccccagcagtacctatgggagaaggagggcagtgtgccacccctgaagatgacccaggagagtgccctgatcttccctttcctcaacaagagtgacagtggcacctacggctgcacagccaccagcaacatgggcagctacaaggcctactacaccctcaatgttaatgaccccagtccggtgccctcctcctccagcacctaccacgccatcatcggtgggatcgtggctttcattgtcttcctgctgctcatcatgctcatcttcctcggccactacttgatccggcacaaaggaacctacctgacacatgaggcaaaaggctccgacgatgctccagacgcggacacggccatcatcaatgcagaaggcgggcagtcaggaggggacgacaagaaggaatatttcatctagaggcgcctgcccacttcctgcgccccccaggggccctgtggggactgctggggccgtcaccaacccggacttgtacagagcaaccgcagggccgcccctcccgcttgctccccagcccacccacccccctgtacagaatgtctgctttgggtgcggttttgtactcggtttggaatggggagggaggagggcggggggaggggagggttgccctcagccctttccgtggcttctctgcatttgggttattattatttttgtaacaatcccaaatcaaatctgtctccaggctggagaggcaggagccctggggtgagaaaagcaaaaaacaaacaaaaaacaaaaccctggagtgttaggaggagagtgaaggtagaggggtgaggaagggtaaggggcagggctggtttcagctgggggctctcaccagccctcctttcagcctctacaacagagcagcttcccagacttctccaggaacccagaaacgggatggttgtcggcaaaggttgggagtggcttttcctctggtagccacacacctgagcactacggacagggaggcaggtgccaccttgacacctctcttccatagcaatgggaaagtgatgagtgcgggagtcctgaggagatgtggcctgcagacaacatgcagccatgcagggacccaggactgtaacctggggaggacgcgggtccctgcaaggaagagtagatttggagaggaaggatggaggtggactctcaccccattccccccggaaatgaacaaagccgggccctttccataggaactgcccttggagatagcagagtgtggctgcccctccttgctccagcagcagtgggagaggcactgctctggggcctgaactgcctctgcttccccccctgaggggcccctcactcttacccaagactctggattgttgcacggcaaccactcctcccatggcattgctcagcaactacttctcccttcccggccaccctgtgcccccttcctggtcccaacgccagcccttcatccttcctccctcagcagccaggcagacataacaacaaaactactaaaaggagcttcactgcagtgagctgtttcctgcccaaactaagggaataatgtgaactgtgtgcatgtgtgtggtgtgtatgcatgtgtgcatgtgtgtgtgtgtgtgtgcatgtgtgtgagtgagtgagaggcagagcgaggaactgaggaggagggctaagagccaggggtcctgggcaagtggacagggctgtgggacatgttggggaggctttgggaatggggtattcctagtcagggttcacacctcacctgggatgttgttccatgctggtatttcctctgccacccccaatgcccatcggtcttggagaaaggagtccccgggtgtgtgtttgcccagctgtccattctatctctcccttaaacacagagcattcagcccttccctggatttccctcctctgagccatggagtcagtgccacagcctttgctatgcacctctcaggcctctccttggcgttgaccctggaaagacctaccaccacctattttttcccatagtctgtacccagtgagttgaaggctgggtccccacccttccttttgatttcctgtcttccttctcgtggccccagctggttgctgtggagatgaggttcctggtcctccctgtcctggctggactgccccgcctcagatccaggatgcccttggcatcgctcccaccctcccccagcttttcctccctggtctgacaatgggcatgcaaaaaggggcagctgcaatctagcaggcctgcccacccccttcagttcaggtaatacagttgtgaatcttccagccgctggttagggccttgggcaccacaggcagcccctcacctaagccggggcctactcctcttacaacagcaagagagccctggggccccaggcctgttgagcttcttgtctcccagcacccgcttttgggaaaatgacttttcctcttcaagctgaaccactctgtccatattacacagaagccatatttgtacgggggggtgggagggagaggggctgttgtgctgtgtgtgtctgtccaggggtgggggggtgggggaagggagcagggaggggaccgtgtatctttataatctttctaactctcctgtgctaatctcagaggggtcaccctcaatatatctggattatccgtgtcattcagctgcctcctttctggtcctcttgctgctgctgggatgtgtgtatgtgagggtcttcttcccataccccttgcacctggtgcctggtgcctcaaaaggtggtgtgtcccttgccaggccactctcaagaatatctatgtacagcaacaatataactctacaagggagagaagtgtgttcacttccttttgctaagcccttcctttccagagagtgtcttggggggcatctgactgcttccccccaccctctgccaggcattgctggagaatgttaagacggcgatggagatgccatcaaccccaccctgcagagcatcaccagacaccaccagaccaaattcactttccagccccttcatgttgaacctgaaacttgagctagtgtcttgggagaaaagggggaaatctctacgaggtacccatccttctgcaccttaggtctgaggtgcttggccccctaggaagccctacatgaatgggacagaaggtccttaacaacactggagatgaagcagccgatgctgttttggacaaatgaaacagcgtcccctaaccagccctttctatctcattgttctgacttggacacgccatggctcaccgctcccaaagtccccactatgtctccctagctgaggaaataaaagcagagaggggtgatgaaacagtgacgatcctggggaaacagctgaggaggggagggagggggaagaagccactaaaaaagtgaaatgtgcttgggagaatcggcctgcctgcagggtagatgccctttctctctgctggccagctctgcccctcagtgagaaactttacatattgctaagatgcctggccaatgaaacagttccagagactttatgtcccccagtagaaatatgaatagaaatcaccctgtgggcaatggtcccattttaaaatatgctgtcccattgtcccctagagcctactttaacttgtcagaccatgtattccacttcatatgcaagaggcatgcactgagcccataggtggctaggcaaacacccaatagctccctgaaatggcttcattatgcagcctcgacagccaccccaaccctcccactctcacactgaaacacccagacctagagatagctagacacacccagacacccgccaagcccctcacatacagatatgtgcacaatgatacacagcaaacgtacacagagttcagtacacacaaagagctcacgcccacgtgcacacacccctcagttgggacagagttgaccaccaccacctttctcccaaacacatggcttttgaactgcctttccttggatccagttcaaggggatggaggagcagtgagagtcagccgcccttccactccaatttcccagcacctcccttatctctgcctcacaagtcacccagcccccctctcttccttccttgtgcttgaagaatctctccttgctggaaagccccctgttttctcaatctccctttccacttcggtaaaatctctacttgctggaaagccccctgttttctcaatctccctttccacttcggtaaaatgcccactttctggtccccacctttttcctgagtgtagtcccaaccagccaaatccaacctcaaaacaggaagacccaaggccagtgacccccataggcctgaggcttgtgcaggcagtgggcgtggggtaaggcttcctgatgccccctgtccctgcccagaacctgatggccctcattagtccttggctcttatcttggaagcacaggcgctgacagccgtcccagccctt

SEQ ID NO: 407687 - DNA, 2828 bp, Homo sapiens
  misc_feature (2808)..(2808): n is a, c, g, or t
agcggggctccctcccggtccccacctcggccccgggctccgaagcggctcgggggcgccctttcggtcaacatcgtagtccaccccctccccatccccagcccccggggattcaggctcgccagcgcccagccagggagccggccgggaagcgcgatgggggccccagccgcctcgctcctgctcctgctcctgctgttcgcctgctgctgggcgcccggcggggccaacctctcccaggacgacagccagccctggacatctgatgaaacagtggtggctggtggcaccgtggtgctcaagtgccaagtgaaagatcacgaggactcatccctgcaatggtctaaccctgctcagcagactctctactttggggagaagagagcccttcgagataatcgaattcagctggttacctctacgccccacgagctcagcatcagcatcagcaatgtggccctggcagacgagggcgagtacacctgctcaatcttcactatgcctgtgcgaactgccaagtccctcgtcactgtgctaggaattccacagaagcccatcatcactggttataaatcttcattacgggaaaaagacacagccaccctaaactgtcagtcttctgggagcaagcctgcagcccggctcacctggagaaagggtgaccaagaactccacggagaaccaacccgcatacaggaagatcccaatggtaaaaccttcactgtcagcagctcggtgacattccaggttacccgggaggatgatggggcgagcatcgtgtgctctgtgaaccatgaatctctaaagggagctgacagatccacctctcaacgcattgaagttttatacacaccaactgcgatgattaggccagaccctccccatcctcgtgagggccagaagctgttgctacactgtgagggtcgcggcaatccagtcccccagcagtacctatgggagaaggagggcagtgtgccacccctgaagatgacccaggagagtgccctgatcttccctttcctcaacaagagtgacagtggcacctacggctgcacagccaccagcaacatgggcagctacaaggcctactacaccctcaatgttaatgaccccagtccggtgccctcctcctccagcacctaccacgccatcatcggtgggatcgtggctttcattgtcttcctgctgctcatcatgctcatcttcctcggccactacttgatccggcacaaaggaacctacctgacacatgaggcaaaaggctccgacgatgctccagacgcggacacggccatcatcaatgcagaaggcgggcagtcaggaggggacgacaagaaggaatatttcatctagaggcgcctgcccacttcctgcgccccccaggggccctgtggggactgctggggccgtcaccaacccggacttgtacagagcaaccgcagggccgcccctcccgcttgctccccagcccacccacccccctgtacagaatgtctgctttgggtgcggttttgtactcggtttggaatggggagggaggagggcggggggaggggagggttgccctcagccctttccgtggcttctctgcatttgggttattattatttttgtaacaatcccaaatcaaatctgtctccaggctggagaggcaggagccctggggtgagaaaagcaaaaaacaaacaaaaaacaaaaccctggagtgttaggaggagagtgaaggtagaggggtgaggaagggtaaggggcagggctggtttcagctgggggctctcaccagccctcctttcagcctctacaacagagcagcttcccagacttctccaggaacccagaaacgggatggttgtcggcaaaggttgggagtggcttttcctctggtagccacacacctgagcactacggacagggaggcaggtgccaccttgacacctctcttccatagcaatgggaaagtgatgagtgcgggagtcctgaggagatgtggcctgcagacaacatgcagccatgcagggacccaggactgtaacctggggaggacgcgggtccctgcaaggaagagtagatttggagaggaaggatggaggtggactctcaccccattccccccggaaatgaacaaagccgggccctttccataggaactgcccttggagatagcagagtgtggctgcccctccttgctccagcagcagtgggagaggcactgctctggggcctgaactgcctctgcttccccccctgaggggcccctcactcttacccaagactctggattgttgcacggcaaccactcctcccatggcattgctcagcaactacttctcccttcccggccaccctgtgcccccttcctggtcccaacgccagcccttcatccttcctccctcagcagccaggcagacataacaacaaaactactaaaaggagcttcactgcagtgagctgtttcctgcccaaactaagggaataatgtgaactgtgtgcatgtgtgtggtgtgtatgcatgtgtgcatgtgtgtgtgtgtgtgtgcatgtgtgtgagtgagtgagaggcagagcgaggaactgaggaggagggctaagagccaggggtcctgggcaagtggacagggctgtgggacatgttggggaggctttgggaatggggtattcctagtcagggttcacacctcacctgggatgttgttccatgctggtatttcctctgccacccccaatgcccatcggtcttggagaaaggagtccccgggtgtgtgtttgcccagctgtccattctatctctcccttaaacacagagccagnctaagttcagagccagggta

SEQ ID NO: 407688 - DNA, 5327 bp, Homo sapiens
gtgagctcaatatgtgacaagttcaactttatttgttctgtaaaaaatatgtattaggtctttcctatgtgctaggaggtttgctaggcacaggtaaaccactcatttcccttctcagctttctgttaagacatctcttagggcccaccaaggacagaccttccagaatcctatcacacaaggttgcaagagaagttgctcacatattcaatagcaataatggtccttgttcatgagaagtaggagaaggaaggtctttgttgcacttcttgagctgcggaaacatttagaggtagaagctgtagtgtgcaactaagtgagggaatctcctaagccgtgtggggaggtattcattgataccatttccttctccacagacacaccaactgcgatgattaggccagaccctccccatcctcgtgagggccagaagctgttgctacactgtgagggtcgcggcaatccagtgtaagaagatccatttcctggtctcctccttactctccacattctcagattgccttcttcacataacagctccttcctatctcctctgtattgtctgacctgagcctctcatttccctgactgtccaataatgtccgcctgcaattagttcttctgcaaagcagcacaaatgggaaggggccactccctaactcagtccctgagtttcccacaaaggccaagttaaagtaagatacaagtctggagatctacagcttccccagaacgaaccccaagaggccacctggcgtatagcagctccagtgtctctggccccgataatttctccagcctcatcaaacagtccttgacatccctgctcccagttatttttttttttcttttagctccctggcctatgctctcctgagctcttctgatttgtctgcctcgacagcccccagcagtacctatgggagaaggagggcagtgtgccacccctgaagatgacccaggagagtgccctgatcttccctttcctcaacaagagtgacagtggcacctacggctgcacagccaccagcaacatgggcagctacaaggcctactacaccctcaatgttaatgaccccagtccggtgccctcctcctccagcacctaccacgccatcatcggtgggatcgtggctttcattgtcttcctgctgctcatcatgctcatcttcctcggccactacttgatccggcacaaaggaacctacctgacacatgaggcaaaaggctccgacgatgctccagacgcggacacggccatcatcaatgcagaaggcgggcagtcaggaggggacgacaagaaggaatatttcatctagaggcgcctgcccacttcctgcgccccccaggggccctgtggggactgctggggccgtcaccaacccggacttgtacagagcaaccgcagggccgcccctcccgcttgctccccagcccacccacccccctgtacagaatgtctgctttgggtgcggttttgtactcggtttggaatggggagggaggagggcggggggaggggagggttgccctcagccctttccgtggcttctctgcatttgggttattattatttttgtaacaatcccaaatcaaatctgtctccaggctggagaggcaggagccctggggtgagaaaagcaaaaaacaaacaaaaaacaaaaccctggagtgttaggaggagagtgaaggtagaggggtgaggaagggtaaggggcagggctggtttcagctgggggctctcaccagccctcctttcagcctctacaacagagcagcttcccagacttctccaggaacccagaaacgggatggttgtcggcaaaggttgggagtggcttttcctctggtagccacacacctgagcactacggacagggaggcaggtgccaccttgacacctctcttccatagcaatgggaaagtgatgagtgcgggagtcctgaggagatgtggcctgcagacaacatgcagccatgcagggacccaggactgtaacctggggaggacgcgggtccctgcaaggaagagtagatttggagaggaaggatggaggtggactctcaccccattccccccggaaatgaacaaagccgggccctttccataggaactgcccttggagatagcagagtgtggctgcccctccttgctccagcagcagtgggagaggcactgctctggggcctgaactgcctctgcttccccccctgaggggcccctcactcttacccaagactctggattgttgcacggcaaccactcctcccatggcattgctcagcaactacttctcccttcccggccaccctgtgcccccttcctggtcccaacgccagcccttcatccttcctccctcagcagccaggcagacataacaacaaaactactaaaaggagcttcactgcagtgagctgtttcctgcccaaactaagggaataatgtgaactgtgtgcatgtgtgtggtgtgtatgcatgtgtgcatgtgtgtgtgtgtgtgtgcatgtgtgtgagtgagtgagaggcagagcgaggaactgaggaggagggctaagagccaggggtcctgggcaagtggacagggctgtgggacatgttggggaggctttgggaatggggtattcctagtcagggttcacacctcacctgggatgttgttccatgctggtatttcctctgccacccccaatgcccatcggtcttggagaaaggagtccccgggtgtgtgtttgcccagctgtccattctatctctcccttaaacacagagcattcagcccttccctggatttccctcctctgagccatggagtcagtgccacagcctttgctatgcacctctcaggcctctccttggcgttgaccctggaaagacctaccaccacctattttttcccatagtctgtacccagtgagttgaaggctgggtccccacccttccttttgatttcctgtcttccttctcgtggccccagctggttgctgtggagatgaggttcctggtcctccctgtcctggctggactgccccgcctcagatccaggatgcccttggcatcgctcccaccctcccccagcttttcctccctggtctgacaatgggcatgcaaaaaggggcagctgcaatctagcaggcctgcccacccccttcagttcaggtaatacagttgtgaatcttccagccgctggttagggccttgggcaccacaggcagcccctcacctaagccggggcctactcctcttacaacagcaagagagccctggggccccaggcctgttgagcttcttgtctcccagcacccgcttttgggaaaatgacttttcctcttcaagctgaaccactctgtccatattacacagaagccatatttgtacgggggggtgggagggagaggggctgttgtgctgtgtgtgtctgtccaggggtgggggggtgggggaagggagcagggaggggaccgtgtatctttataatctttctaactctcctgtgctaatctcagaggggtcaccctcaatatatctggattatccgtgtcattcagctgcctcctttctggtcctcttgctgctgctgggatgtgtgtatgtgagggtcttcttcccataccccttgcacctggtgcctggtgcctcaaaaggtggtgtgtcccttgccaggccactctcaagaatatctatgtacagcaacaatataactctacaagggagagaagtgtgttcacttccttttgctaagcccttcctttccagagagtgtcttggggggcatctgactgcttccccccaccctctgccaggcattgctggagaatgttaagacggcgatggagatgccatcaaccccaccctgcagagcatcaccagacaccaccagaccaaattcactttccagccccttcatgttgaacctgaaacttgagctagtgtcttgggagaaaagggggaaatctctacgaggtacccatccttctgcaccttaggtctgaggtgcttggccccctaggaagccctacatgaatgggacagaaggtccttaacaacactggagatgaagcagccgatgctgttttggacaaatgaaacagcgtcccctaaccagccctttctatctcattgttctgacttggacacgccatggctcaccgctcccaaagtccccactatgtctccctagctgaggaaataaaagcagagaggggtgatgaaacagtgacgatcctggggaaacagctgaggaggggagggagggggaagaagccactaaaaaagtgaaatgtgcttgggagaatcggcctgcctgcagggtagatgccctttctctctgctggccagctctgcccctcagtgagaaactttacatattgctaagatgcctggccaatgaaacagttccagagactttatgtcccccagtagaaatatgaatagaaatcaccctgtgggcaatggtcccattttaaaatatgctgtcccattgtcccctagagcctactttaacttgtcagaccatgtattccacttcatatgcaagaggcatgcactgagcccataggtggctaggcaaacacccaatagctccctgaaatggcttcattatgcagcctcgacagccaccccaaccctcccactctcacactgaaacacccagacctagagatagctagacacacccagacacccgccaagcccctcacatacagatatgtgcacaatgatacacagcaaacgtacacagagttcagtacacacaaagagctcacgcccacgtgcacacacccctcagttgggacagagttgaccaccaccacctttctcccaaacacatggcttttgaactgcctttccttggatccagttcaaggggatggaggagcagtgagagtcagccgcccttccactccaatttcccagcacctcccttatctctgcctcacaagtcacccagcccccctctcttccttccttgtgcttgaagaatctctccttgctggaaagccccctgttttctcaatctccctttccacttcggtaaaatctctacttgctggaaagccccctgttttctcaatctccctttccacttcggtaaaatgcccactttctggtccccacctttttcctgagtgtagtcccaaccagccaaatccaacctcaaaacaggaagacccaaggccagtgacccccataggcctgaggcttgtgcaggcagtgggcgtggggtaaggcttcctgatgccccctgtccctgcccagaacctgatggccctcattagtccttggctcttatcttggaagcacaggcgctgacagccgtcccagccctt

SEQ ID NO: 407689 - DNA, 4755 bp, Homo sapiens
catcatcgtggttataaatcttatagaatcgtcagtctacagagagcaagcgagcggaatgacaaaccacgagaaccaacccgcatacaggaagatcccaatggtaaaaccttcactgtcagcagctcggtgacattccaggttacccgggaggatgatggggcgagcatcgtgtgctctgtgaaccatgaatctctaaagggagctgacagatccacctctcaacgcattgaagttttatacacaccaactgcgatgattaggccagaccctccccatcctcgtgagggccagaagctgttgctacactgtgagggtcgcggcaatccagtcccccagcagtacctatgggagaaggagggcagtgtgccacccctgaagatgacccaggagagtgccctgatcttccctttcctcaacaagagtgacagtggcacctacggctgcacagccaccagcaacatgggcagctacaaggcctactacaccctcaatgttaatgaccccagtccggtgccctcctcctccagcacctaccacgccatcatcggtgggatcgtggctttcattgtcttcctgctgctcatcatgctcatcttcctcggccactacttgatccggcacaaaggaacctacctgacacatgaggcaaaaggctccgacgatgctccagacgcggacacggccatcatcaatgcagaaggcgggcagtcaggaggggacgacaagaaggaatatttcatctagaggcgcctgcccacttcctgcgccccccaggggccctgtggggactgctggggccgtcaccaacccggacttgtacagagcaaccgcagggccgcccctcccgcttgctccccagcccacccacccccctgtacagaatgtctgctttgggtgcggttttgtactcggtttggaatggggagggaggagggcggggggaggggagggttgccctcagccctttccgtggcttctctgcatttgggttattattatttttgtaacaatcccaaatcaaatctgtctccaggctggagaggcaggagccctggggtgagaaaagcaaaaaacaaacaaaaaacaaaaccctggagtgttaggaggagagtgaaggtagaggggtgaggaagggtaaggggcagggctggtttcagctgggggctctcaccagccctcctttcagcctctacaacagagcagcttcccagacttctccaggaacccagaaacgggatggttgtcggcaaaggttgggagtggcttttcctctggtagccacacacctgagcactacggacagggaggcaggtgccaccttgacacctctcttccatagcaatgggaaagtgatgagtgcgggagtcctgaggagatgtggcctgcagacaacatgcagccatgcagggacccaggactgtaacctggggaggacgcgggtccctgcaaggaagagtagatttggagaggaaggatggaggtggactctcaccccattccccccggaaatgaacaaagccgggccctttccataggaactgcccttggagatagcagagtgtggctgcccctccttgctccagcagcagtgggagaggcactgctctggggcctgaactgcctctgcttccccccctgaggggcccctcactcttacccaagactctggattgttgcacggcaaccactcctcccatggcattgctcagcaactacttctcccttcccggccaccctgtgcccccttcctggtcccaacgccagcccttcatccttcctccctcagcagccaggcagacataacaacaaaactactaaaaggagcttcactgcagtgagctgtttcctgcccaaactaagggaataatgtgaactgtgtgcatgtgtgtggtgtgtatgcatgtgtgcatgtgtgtgtgtgtgtgtgcatgtgtgtgagtgagtgagaggcagagcgaggaactgaggaggagggctaagagccaggggtcctgggcaagtggacagggctgtgggacatgttggggaggctttgggaatggggtattcctagtcagggttcacacctcacctgggatgttgttccatgctggtatttcctctgccacccccaatgcccatcggtcttggagaaaggagtccccgggtgtgtgtttgcccagctgtccattctatctctcccttaaacacagagcattcagcccttccctggatttccctcctctgagccatggagtcagtgccacagcctttgctatgcacctctcaggcctctccttggcgttgaccctggaaagacctaccaccacctattttttcccatagtctgtacccagtgagttgaaggctgggtccccacccttccttttgatttcctgtcttccttctcgtggccccagctggttgctgtggagatgaggttcctggtcctccctgtcctggctggactgccccgcctcagatccaggatgcccttggcatcgctcccaccctcccccagcttttcctccctggtctgacaatgggcatgcaaaaaggggcagctgcaatctagcaggcctgcccacccccttcagttcaggtaatacagttgtgaatcttccagccgctggttagggccttgggcaccacaggcagcccctcacctaagccggggcctactcctcttacaacagcaagagagccctggggccccaggcctgttgagcttcttgtctcccagcacccgcttttgggaaaatgacttttcctcttcaagctgaaccactctgtccatattacacagaagccatatttgtacgggggggtgggagggagaggggctgttgtgctgtgtgtgtctgtccaggggtgggggggtgggggaagggagcagggaggggaccgtgtatctttataatctttctaactctcctgtgctaatctcagaggggtcaccctcaatatatctggattatccgtgtcattcagctgcctcctttctggtcctcttgctgctgctgggatgtgtgtatgtgagggtcttcttcccataccccttgcacctggtgcctggtgcctcaaaaggtggtgtgtcccttgccaggccactctcaagaatatctatgtacagcaacaatataactctacaagggagagaagtgtgttcacttccttttgctaagcccttcctttccagagagtgtcttggggggcatctgactgcttccccccaccctctgccaggcattgctggagaatgttaagacggcgatggagatgccatcaaccccaccctgcagagcatcaccagacaccaccagaccaaattcactttccagccccttcatgttgaacctgaaacttgagctagtgtcttgggagaaaagggggaaatctctacgaggtacccatccttctgcaccttaggtctgaggtgcttggccccctaggaagccctacatgaatgggacagaaggtccttaacaacactggagatgaagcagccgatgctgttttggacaaatgaaacagcgtcccctaaccagccctttctatctcattgttctgacttggacacgccatggctcaccgctcccaaagtccccactatgtctccctagctgaggaaataaaagcagagaggggtgatgaaacagtgacgatcctggggaaacagctgaggaggggagggagggggaagaagccactaaaaaagtgaaatgtgcttgggagaatcggcctgcctgcagggtagatgccctttctctctgctggccagctctgcccctcagtgagaaactttacatattgctaagatgcctggccaatgaaacagttccagagactttatgtcccccagtagaaatatgaatagaaatcaccctgtgggcaatggtcccattttaaaatatgctgtcccattgtcccctagagcctactttaacttgtcagaccatgtattccacttcatatgcaagaggcatgcactgagcccataggtggctaggcaaacacccaatagctccctgaaatggcttcattatgcagcctcgacagccaccccaaccctcccactctcacactgaaacacccagacctagagatagctagacacacccagacacccgccaagcccctcacatacagatatgtgcacaatgatacacagcaaacgtacacagagttcagtacacacaaagagctcacgcccacgtgcacacacccctcagttgggacagagttgaccaccaccacctttctcccaaacacatggcttttgaactgcctttccttggatccagttcaaggggatggaggagcagtgagagtcagccgcccttccactccaatttcccagcacctcccttatctctgcctcacaagtcacccagcccccctctcttccttccttgtgcttgaagaatctctccttgctggaaagccccctgttttctcaatctccctttccacttcggtaaaatctctacttgctggaaagccccctgttttctcaatctccctttccacttcggtaaaatgcccactttctggtccccacctttttcctgagtgtagtcccaaccagccaaatccaacctcaaaacaggaagacccaaggccagtgacccccataggcctgaggcttgtgcaggcagtgggcgtggggtaaggcttcctgatgccccctgtccctgcccagaacctgatggccctcattagtccttggctcttatcttggaagcacaggcgctgacagccgtcccagccctt

SEQ ID NO: 407690 - DNA, 4042 bp, Homo sapiens
acacacacacgcatgcgtgcaagcgcacacacacacacacacacacacacacacttctctttcttgctttgtattatagatgagattctacttaggggtaggattcattattcatgaagggtgtggtcaggtgaggcatgttggaagcaaaatgcgaattaggtaaggtggagtagaagagagctattggcaagagaaaaattacttgagcagtgtgtgagtgggtgggtgagaaagtgggcagggtggactcagaggttgggaagctgctcctgagaggagaagcctctgtctctacacaggaacctacctgacacatgaggcaaaaggctccgacgatgctccagacgcggacacggccatcatcaatgcagaaggcgggcagtcaggaggggacgacaagaaggtagaggggtgaggaagggtaaggggcagggctggtttcagctgggggctctcaccagccctcctttcagcctctacaacagagcagcttcccagacttctccaggaacccagaaacgggatggttgtcggcaaaggttgggagtggcttttcctctggtagccacacacctgagcactacggacagggaggcaggtgccaccttgacacctctcttccatagcaatgggaaagtgatgagtgcgggagtcctgaggagatgtggcctgcagacaacatgcagccatgcagggacccaggactgtaacctggggaggacgcgggtccctgcaaggaagagtagatttggagaggaaggatggaggtggactctcaccccattccccccggaaatgaacaaagccgggccctttccataggaactgcccttggagatagcagagtgtggctgcccctccttgctccagcagcagtgggagaggcactgctctggggcctgaactgcctctgcttccccccctgaggggcccctcactcttacccaagactctggattgttgcacggcaaccactcctcccatggcattgctcagcaactacttctcccttcccggccaccctgtgcccccttcctggtcccaacgccagcccttcatccttcctccctcagcagccaggcagacataacaacaaaactactaaaaggagcttcactgcagtgagctgtttcctgcccaaactaagggaataatgtgaactgtgtgcatgtgtgtggtgtgtatgcatgtgtgcatgtgtgtgtgtgtgtgtgcatgtgtgtgagtgagtgagaggcagagcgaggaactgaggaggagggctaagagccaggggtcctgggcaagtggacagggctgtgggacatgttggggaggctttgggaatggggtattcctagtcagggttcacacctcacctgggatgttgttccatgctggtatttcctctgccacccccaatgcccatcggtcttggagaaaggagtccccgggtgtgtgtttgcccagctgtccattctatctctcccttaaacacagagcattcagcccttccctggatttccctcctctgagccatggagtcagtgccacagcctttgctatgcacctctcaggcctctccttggcgttgaccctggaaagacctaccaccacctattttttcccatagtctgtacccagtgagttgaaggctgggtccccacccttccttttgatttcctgtcttccttctcgtggccccagctggttgctgtggagatgaggttcctggtcctccctgtcctggctggactgccccgcctcagatccaggatgcccttggcatcgctcccaccctcccccagcttttcctccctggtctgacaatgggcatgcaaaaaggggcagctgcaatctagcaggcctgcccacccccttcagttcaggtaatacagttgtgaatcttccagccgctggttagggccttgggcaccacaggcagcccctcacctaagccggggcctactcctcttacaacagcaagagagccctggggccccaggcctgttgagcttcttgtctcccagcacccgcttttgggaaaatgacttttcctcttcaagctgaaccactctgtccatattacacagaagccatatttgtacgggggggtgggagggagaggggctgttgtgctgtgtgtgtctgtccaggggtgggggggtgggggaagggagcagggaggggaccgtgtatctttataatctttctaactctcctgtgctaatctcagaggggtcaccctcaatatatctggattatccgtgtcattcagctgcctcctttctggtcctcttgctgctgctgggatgtgtgtatgtgagggtcttcttcccataccccttgcacctggtgcctggtgcctcaaaaggtggtgtgtcccttgccaggccactctcaagaatatctatgtacagcaacaatataactctacaagggagagaagtgtgttcacttccttttgctaagcccttcctttccagagagtgtcttggggggcatctgactgcttccccccaccctctgccaggcattgctggagaatgttaagacggcgatggagatgccatcaaccccaccctgcagagcatcaccagacaccaccagaccaaattcactttccagccccttcatgttgaacctgaaacttgagctagtgtcttgggagaaaagggggaaatctctacgaggtacccatccttctgcaccttaggtctgaggtgcttggccccctaggaagccctacatgaatgggacagaaggtccttaacaacactggagatgaagcagccgatgctgttttggacaaatgaaacagcgtcccctaaccagccctttctatctcattgttctgacttggacacgccatggctcaccgctcccaaagtccccactatgtctccctagctgaggaaataaaagcagagaggggtgatgaaacagtgacgatcctggggaaacagctgaggaggggagggagggggaagaagccactaaaaaagtgaaatgtgcttgggagaatcggcctgcctgcagggtagatgccctttctctctgctggccagctctgcccctcagtgagaaactttacatattgctaagatgcctggccaatgaaacagttccagagactttatgtcccccagtagaaatatgaatagaaatcaccctgtgggcaatggtcccattttaaaatatgctgtcccattgtcccctagagcctactttaacttgtcagaccatgtattccacttcatatgcaagaggcatgcactgagcccataggtggctaggcaaacacccaatagctccctgaaatggcttcattatgcagcctcgacagccaccccaaccctcccactctcacactgaaacacccagacctagagatagctagacacacccagacacccgccaagcccctcacatacagatatgtgcacaatgatacacagcaaacgtacacagagttcagtacacacaaagagctcacgcccacgtgcacacacccctcagttgggacagagttgaccaccaccacctttctcccaaacacatggcttttgaactgcctttccttggatccagttcaaggggatggaggagcagtgagagtcagccgcccttccactccaatttcccagcacctcccttatctctgcctcacaagtcacccagcccccctctcttccttccttgtgcttgaagaatctctccttgctggaaagccccctgttttctcaatctccctttccacttcggtaaaatctctacttgctggaaagccccctgttttctcaatctccctttccacttcggtaaaatgcccactttctggtccccacctttttcctgagtgtagtcccaaccagccaaatccaacctcaaaacaggaagacccaaggccagtgacccccataggcctgaggcttgtgcaggcagtgggcgtggggtaaggcttcctgatgccccctgtccctgcccagaacctgatggccctcattagtccttggctcttatcttggaagcacaggcgctgacagccgtcccagccctt

SEQ ID NO: 407691 - DNA, 4880 bp, Homo sapiens
agcggggctccctcccggtccccacctcggccccgggctccgaagcggctcgggggcgccctttcggtcaacatcgtagtccaccccctccccatccccagcccccggggattcaggctcgccagcgcccagccagggagccggccgggaagcgcgatgggggccccagccgcctcgctcctgctcctgctcctgctgttcgcctgctgctgggcgcccggcggggccaacctctcccaggacgacagccagccctggacatctgatgaaacagtggtggctggtggcaccgtggtgctcaagtgccaagtgaaagatcacgaggactcatccctgcaatggtctaaccctgctcagcagactctctactttggggagaagagagcccttcgagataatcgaattcagctggttacctctacgccccacgagctcagcatcagcatcagcaatgtggccctggcagacgagggcgagtacacctgctcaatcttcactatgcctgtgcgaactgccaagtccctcgtcactgtgctaggaattccacagaagcccatcatcactggttataaatcttcattacgggaaaaagacacagccaccctaaactgtcagtcttctgggagcaagcctgcagcccggctcacctggagaaagggtgaccaagaactccacggagaaccaacccgcatacaggaagatcccaatggtaaaaccttcactgtcagcagctcggtgacattccaggttacccgggaggatgatggggcgagcatcgtgtgctctgtgaaccatgaatctctaaagggagctgacagatccacctctcaacgcattgaagttttatacacaccaactgcgatgattaggccagaccctccccatcctcgtgagggccagaagctgttgctacactgtgagggtcgcggcaatccagtcccccagcagtacctatgggagaaggagggcagtgtgccacccctgaagatgacccaggagagtgccctgatcttccctttcctcaacaagagtgacagtggcacctacggctgcacagccaccagcaacatgggcagctacaaggcctactacaccctcaatgttaatgaccccagtccggtgccctcctcctccagcacctaccacgccatcatcggtgggatcgtggctttcattgtcttcctgctgctcatcatgctcatcttcctcggccactacttgatccggcacaaaggaacctacctgacacatgaggcaaaaggctccgacgatgctccagacgcggacacggccatcatcaatgcagaaggcgggcagtcaggaggggacgacaagaaggaatatttcatctagaggcgcctgcccacttcctgcgccccccaggggccctgtggggactgctggggccgtcaccaacccggacttggacagggaggcaggtgccaccttgacacctctcttccatagcaatgggaaagtgatgagtgcgggagtcctgaggagatgtggcctgcagacaacatgcagccatgcagggacccaggactgtaacctggggaggacgcgggtccctgcaaggaagagtagatttggagaggaaggatggaggtggactctcaccccattccccccggaaatgaacaaagccgggccctttccataggaactgcccttggagatagcagagtgtggctgcccctccttgctccagcagcagtgggagaggcactgctctggggcctgaactgcctctgcttccccccctgaggggcccctcactcttacccaagactctggattgttgcacggcaaccactcctcccatggcattgctcagcaactacttctcccttcccggccaccctgtgcccccttcctggtcccaacgccagcccttcatccttcctccctcagcagccaggcagacataacaacaaaactactaaaaggagcttcactgcagtgagctgtttcctgcccaaactaagggaataatgtgaactgtgtgcatgtgtgtggtgtgtatgcatgtgtgcatgtgtgtgtgtgtgtgtgcatgtgtgtgagtgagtgagaggcagagcgaggaactgaggaggagggctaagagccaggggtcctgggcaagtggacagggctgtgggacatgttggggaggctttgggaatggggtattcctagtcagggttcacacctcacctgggatgttgttccatgctggtatttcctctgccacccccaatgcccatcggtcttggagaaaggagtccccgggtgtgtgtttgcccagctgtccattctatctctcccttaaacacagagcattcagcccttccctggatttccctcctctgagccatggagtcagtgccacagcctttgctatgcacctctcaggcctctccttggcgttgaccctggaaagacctaccaccacctattttttcccatagtctgtacccagtgagttgaaggctgggtccccacccttccttttgatttcctgtcttccttctcgtggccccagctggttgctgtggagatgaggttcctggtcctccctgtcctggctggactgccccgcctcagatccaggatgcccttggcatcgctcccaccctcccccagcttttcctccctggtctgacaatgggcatgcaaaaaggggcagctgcaatctagcaggcctgcccacccccttcagttcaggtaatacagttgtgaatcttccagccgctggttagggccttgggcaccacaggcagcccctcacctaagccggggcctactcctcttacaacagcaagagagccctggggccccaggcctgttgagcttcttgtctcccagcacccgcttttgggaaaatgacttttcctcttcaagctgaaccactctgtccatattacacagaagccatatttgtacgggggggtgggagggagaggggctgttgtgctgtgtgtgtctgtccaggggtgggggggtgggggaagggagcagggaggggaccgtgtatctttataatctttctaactctcctgtgctaatctcagaggggtcaccctcaatatatctggattatccgtgtcattcagctgcctcctttctggtcctcttgctgctgctgggatgtgtgtatgtgagggtcttcttcccataccccttgcacctggtgcctggtgcctcaaaaggtggtgtgtcccttgccaggccactctcaagaatatctatgtacagcaacaatataactctacaagggagagaagtgtgttcacttccttttgctaagcccttcctttccagagagtgtcttggggggcatctgactgcttccccccaccctctgccaggcattgctggagaatgttaagacggcgatggagatgccatcaaccccaccctgcagagcatcaccagacaccaccagaccaaattcactttccagccccttcatgttgaacctgaaacttgagctagtgtcttgggagaaaagggggaaatctctacgaggtacccatccttctgcaccttaggtctgaggtgcttggccccctaggaagccctacatgaatgggacagaaggtccttaacaacactggagatgaagcagccgatgctgttttggacaaatgaaacagcgtcccctaaccagccctttctatctcattgttctgacttggacacgccatggctcaccgctcccaaagtccccactatgtctccctagctgaggaaataaaagcagagaggggtgatgaaacagtgacgatcctggggaaacagctgaggaggggagggagggggaagaagccactaaaaaagtgaaatgtgcttgggagaatcggcctgcctgcagggtagatgccctttctctctgctggccagctctgcccctcagtgagaaactttacatattgctaagatgcctggccaatgaaacagttccagagactttatgtcccccagtagaaatatgaatagaaatcaccctgtgggcaatggtcccattttaaaatatgctgtcccattgtcccctagagcctactttaacttgtcagaccatgtattccacttcatatgcaagaggcatgcactgagcccataggtggctaggcaaacacccaatagctccctgaaatggcttcattatgcagcctcgacagccaccccaaccctcccactctcacactgaaacacccagacctagagatagctagacacacccagacacccgccaagcccctcacatacagatatgtgcacaatgatacacagcaaacgtacacagagttcagtacacacaaagagctcacgcccacgtgcacacacccctcagttgggacagagttgaccaccaccacctttctcccaaacacatggcttttgaactgcctttccttggatccagttcaaggggatggaggagcagtgagagtcagccgcccttccactccaatttcccagcacctcccttatctctgcctcacaagtcacccagcccccctctcttccttccttgtgcttgaagaatctctccttgctggaaagccccctgttttctcaatctccctttccacttcggtaaaatctctacttgctggaaagccccctgttttctcaatctccctttccacttcggtaaaatgcccactttctggtccccacctttttcctgagtgtagtcccaaccagccaaatccaacctcaaaacaggaagacccaaggccagtgacccccataggcctgaggcttgtgcaggcagtgggcgtggggtaaggcttcctgatgccccctgtccctgcccagaacctgatggccctcattagtccttggctcttatcttggaagcacaggcgctgacagccgtcccagccctt

SEQ ID NO: 407692 - DNA, 5797 bp, Homo sapiens
agcggggctccctcccggtccccacctcggccccgggctccgaagcggctcgggggcgccctttcggtcaacatcgtagtccaccccctccccatccccagcccccggggattcaggctcgccagcgcccagccagggagccggccgggaagcgcgatgggggccccagccgcctcgctcctgctcctgctcctgctgttcgcctgctgctgggcgcccggcggggccaacctctcccaggacgacagccagccctggacatctgatgaaacagtggtggctggtggcaccgtggtgctcaagtgccaagtgaaagatcacgaggactcatccctgcaatggtctaaccctgctcagcagactctctactttggggagaagagagcccttcgagataatcgaattcagctggttacctctacgccccacgagctcagcatcagcatcagcaatgtggccctggcagacgagggcgagtacacctgctcaatcttcactatgcctgtgcgaactgccaagtccctcgtcactgtgctaggaattccacagaagcccatcatcactggttataaatcttcattacgggaaaaagacacagccaccctaaactgtcagtcttctgggagcaagcctgcagcccggctcacctggagaaagggtgaccaagaactccacggagaaccaacccgcatacaggaagatcccaatggtaaaaccttcactgtcagcagctcggtgacattccaggttacccgggaggatgatggggcgagcatcgtgtgctctgtgaaccatgaatctctaaagggagctgacagatccacctctcaacgcattgaagttttatacacaccaactgcgatgattaggccagaccctccccatcctcgtgagggccagaagctgttgctacactgtgagggtcgcggcaatccagtgtaagaagatccatttcctggtctcctccttactctccacattctcagattgccttcttcacataacagctccttcctatctcctctgtattgtctgacctgagcctctcatttccctgactgtccaataatgtccgcctgcaattagttcttctgcaaagcagcacaaatgggaaggggccactccctaactcagtccctgagtttcccacaaaggccaagttaaagtaagatacaagtctggagatctacagcttccccagaacgaaccccaagaggccacctggcgtatagcagctccagtgtctctggccccgataatttctccagcctcatcaaacagtccttgacatccctgctcccagttatttttttttttcttttagctccctggcctatgctctcctgagctcttctgatttgtctgcctcgacagcccccagcagtacctatgggagaaggagggcagtgtgccacccctgaagatgacccaggagagtgccctgatcttccctttcctcaacaagagtgacagtggcacctacggctgcacagccaccagcaacatgggcagctacaaggcctactacaccctcaatgttaatgaccccagtccggtgccctcctcctccagcacctaccacgccatcatcggtgggatcgtggctttcattgtcttcctgctgctcatcatgctcatcttcctcggccactacttgatccggcacaaaggaacctacctgacacatgaggcaaaaggctccgacgatgctccagacgcggacacggccatcatcaatgcagaaggcgggcagtcaggaggggacgacaagaaggaatatttcatctagaggcgcctgcccacttcctgcgccccccaggggccctgtggggactgctggggccgtcaccaacccggacttgtacagagcaaccgcagggccgcccctcccgcttgctccccagcccacccacccccctgtacagaatgtctgctttgggtgcggttttgtactcggtttggaatggggagggaggagggcggggggaggggagggttgccctcagccctttccgtggcttctctgcatttgggttattattatttttgtaacaatcccaaatcaaatctgtctccaggctggagaggcaggagccctggggtgagaaaagcaaaaaacaaacaaaaaacaaaaccctggagtgttaggaggagagtgaaggtagaggggtgaggaagggtaaggggcagggctggtttcagctgggggctctcaccagccctcctttcagcctctacaacagagcagcttcccagacttctccaggaacccagaaacgggatggttgtcggcaaaggttgggagtggcttttcctctggtagccacacacctgagcactacggacagggaggcaggtgccaccttgacacctctcttccatagcaatgggaaagtgatgagtgcgggagtcctgaggagatgtggcctgcagacaacatgcagccatgcagggacccaggactgtaacctggggaggacgcgggtccctgcaaggaagagtagatttggagaggaaggatggaggtggactctcaccccattccccccggaaatgaacaaagccgggccctttccataggaactgcccttggagatagcagagtgtggctgcccctccttgctccagcagcagtgggagaggcactgctctggggcctgaactgcctctgcttccccccctgaggggcccctcactcttacccaagactctggattgttgcacggcaaccactcctcccatggcattgctcagcaactacttctcccttcccggccaccctgtgcccccttcctggtcccaacgccagcccttcatccttcctccctcagcagccaggcagacataacaacaaaactactaaaaggagcttcactgcagtgagctgtttcctgcccaaactaagggaataatgtgaactgtgtgcatgtgtgtggtgtgtatgcatgtgtgcatgtgtgtgtgtgtgtgtgcatgtgtgtgagtgagtgagaggcagagcgaggaactgaggaggagggctaagagccaggggtcctgggcaagtggacagggctgtgggacatgttggggaggctttgggaatggggtattcctagtcagggttcacacctcacctgggatgttgttccatgctggtatttcctctgccacccccaatgcccatcggtcttggagaaaggagtccccgggtgtgtgtttgcccagctgtccattctatctctcccttaaacacagagcattcagcccttccctggatttccctcctctgagccatggagtcagtgccacagcctttgctatgcacctctcaggcctctccttggcgttgaccctggaaagacctaccaccacctattttttcccatagtctgtacccagtgagttgaaggctgggtccccacccttccttttgatttcctgtcttccttctcgtggccccagctggttgctgtggagatgaggttcctggtcctccctgtcctggctggactgccccgcctcagatccaggatgcccttggcatcgctcccaccctcccccagcttttcctccctggtctgacaatgggcatgcaaaaaggggcagctgcaatctagcaggcctgcccacccccttcagttcaggtaatacagttgtgaatcttccagccgctggttagggccttgggcaccacaggcagcccctcacctaagccggggcctactcctcttacaacagcaagagagccctggggccccaggcctgttgagcttcttgtctcccagcacccgcttttgggaaaatgacttttcctcttcaagctgaaccactctgtccatattacacagaagccatatttgtacgggggggtgggagggagaggggctgttgtgctgtgtgtgtctgtccaggggtgggggggtgggggaagggagcagggaggggaccgtgtatctttataatctttctaactctcctgtgctaatctcagaggggtcaccctcaatatatctggattatccgtgtcattcagctgcctcctttctggtcctcttgctgctgctgggatgtgtgtatgtgagggtcttcttcccataccccttgcacctggtgcctggtgcctcaaaaggtggtgtgtcccttgccaggccactctcaagaatatctatgtacagcaacaatataactctacaagggagagaagtgtgttcacttccttttgctaagcccttcctttccagagagtgtcttggggggcatctgactgcttccccccaccctctgccaggcattgctggagaatgttaagacggcgatggagatgccatcaaccccaccctgcagagcatcaccagacaccaccagaccaaattcactttccagccccttcatgttgaacctgaaacttgagctagtgtcttgggagaaaagggggaaatctctacgaggtacccatccttctgcaccttaggtctgaggtgcttggccccctaggaagccctacatgaatgggacagaaggtccttaacaacactggagatgaagcagccgatgctgttttggacaaatgaaacagcgtcccctaaccagccctttctatctcattgttctgacttggacacgccatggctcaccgctcccaaagtccccactatgtctccctagctgaggaaataaaagcagagaggggtgatgaaacagtgacgatcctggggaaacagctgaggaggggagggagggggaagaagccactaaaaaagtgaaatgtgcttgggagaatcggcctgcctgcagggtagatgccctttctctctgctggccagctctgcccctcagtgagaaactttacatattgctaagatgcctggccaatgaaacagttccagagactttatgtcccccagtagaaatatgaatagaaatcaccctgtgggcaatggtcccattttaaaatatgctgtcccattgtcccctagagcctactttaacttgtcagaccatgtattccacttcatatgcaagaggcatgcactgagcccataggtggctaggcaaacacccaatagctccctgaaatggcttcattatgcagcctcgacagccaccccaaccctcccactctcacactgaaacacccagacctagagatagctagacacacccagacacccgccaagcccctcacatacagatatgtgcacaatgatacacagcaaacgtacacagagttcagtacacacaaagagctcacgcccacgtgcacacacccctcagttgggacagagttgaccaccaccacctttctcccaaacacatggcttttgaactgcctttccttggatccagttcaaggggatggaggagcagtgagagtcagccgcccttccactccaatttcccagcacctcccttatctctgcctcacaagtcacccagcccccctctcttccttccttgtgcttgaagaatctctccttgctggaaagccccctgttttctcaatctccctttccacttcggtaaaatctctacttgctggaaagccccctgttttctcaatctccctttccacttcggtaaaatgcccactttctggtccccacctttttcctgagtgtagtcccaaccagccaaatccaacctcaaaacaggaagacccaaggccagtgacccccataggcctgaggcttgtgcaggcagtgggcgtggggtaaggcttcctgatgccccctgtccctgcccagaacctgatggccctcattagtccttggctcttatcttggaagcacaggcgctgacagccgtcccagccctt

SEQ ID NO: 407693 - DNA, 969 bp, Homo sapiens
agcggggctccctcccggtccccacctcggccccgggctccgaagcggctcgggggcgccctttcggtcaacatcgtagtccaccccctccccatccccagcccccggggattcaggctcgccagcgcccagccagggagccggccgggaagcgcgatgggggccccagccgcctcgctcctgctcctgctcctgctgttcgcctgctgctgggcgcccggcggggccaacctctcccaggacgacagccagccctggacatctgatgaaacagtggtggctggtggcaccgtggtgctcaagtgccaagtgaaagatcacgaggactcatccctgcaatggtctaaccctgctcagcagactctctactttggggagaagagagcccttcgagataatcgaattcagctggttacctctacgccccacgagctcagcatcagcatcagcaatgtggccctggcagacgagggcgagtacacctgctcaatcttcactatgcctgtgcgaactgccaagtccctcgtcactgtgctaggaattccacagaagcccatcatcactggttataaatcttcattacgggaaaaagacacagccaccctaaactgtcagtcttctgggagcaagcctgcagcccggctcacctggagaaagggtgaccaagaactccacggagaaccaacccgcatacaggaagatcccaatggtaaaaccttcactgtcagcagctcggtgacattccaggttacccgggaggatgatggggcgagcatcgtgtgctctgtgaaccatgaatctctaaagggagctgacagatccacctctcaacgcattgaagttttatacacaccaactgcgatgattaggccagaccctccccatcctcgtgagggccagaagctgttgctacactgtgagggtcgcggcaatccagttcgcccccgcgagggaccggctcgattcgta

SEQ ID NO: 407694 - DNA, 758 bp, Homo sapiens
atgcaatttccttttcaaaaccagcagcgggtttacaaatcaacaaaaaccacatcatatggccttgaaatgtgctgggttctgcactgtgtctaagaaaaggaaaagaaaaaaaaatggtattgtttcctgatgtcaagaaaagaagcgtgccctgccaatgaggaagtactgtgttgaaaacaaccagtggtcaagctggaaggtttgctagattaggattctgtaacaccctccaactgcgggctgctttgattgctggttctctgagtaacacttcacttgccttctgttagaatgttttaagttattttggcacttggtcaccctacttcagaaagactgtttggtcttttcatgaccatattggcagagtctaatgttatttgctttggattttgtgttatctgaaaagtctattatttttattagaaggtcatttttaaaaagaaagaaaaatatctccaaagtccttcgcaagacatatttccaaaatgaacagaaacactaacgtttatttttttaaaaaggagaaaaaaatctagtaatgggaaaactcctctagaaggacattaatatgggtaggaacatggtcaaagtgccttaaaatatttagcaacctctccttgccaccataacttaacgtctctctcaatgaatgggttatagctgttaaattctgtattaatggagactttttttttaccacttaattataaatgaacacatttcattttcagtgtagaacgtagatatca

SEQ ID NO: 407695 - DNA, 2395 bp, Homo sapiens
acaagcagaagtcaattgtccggtcccacttacaactcatcaaagctgtgagccagttaatagccgatgctgggattggaggctctcggtttcaacattcgcttgcaattaccaataatttcgccaatggagataagcaaatgaaaaacagcaatttcccagcagaggtgaaggacctgactaagcgtataaggactgttttgatggccacagctcagatgaaggagcacgagaaggaccccgagatgctggtggatctccagtacagcctggcaaactcctacgcaagcactcctgaactacgcaggacctggctggaaagtatggccaagattcatgccagaaacggagatttatctgaggctgccatgtgttacatccatattgctgctctcattgcagagtatctgaaaagaaagggttactggaaagtggaaaagatttgcacagcatccctgctctcggaggatacccacccctgtgatagcaactcattactaacaactcccagtggaggaagcatgttctctatgggatggccagcttttttgagcattacaccaaacattaaggaagaaggagcgatgaaagaggattctggaatgcaagatacaccatacaatgagaatatcctggtggagcagctatacatgtgtgtggagtttctctggaagtctgagcgatatgaactcattgctgatgtcaacaagcccatcattgctgtctttgagaaacaacgagacttcaaaaaattgtcagatctctactacgacattcatcggtcatatctgaaagtggcagaggtggtgaattcggagaagcggctgtttggtcgctactatcgtgtggcattttatgggcagggcttttttgaagaagaagaaggtaaagagtatatttataaagagcctaagctgacaggtctgtccgagatttcccaaagattactcaagctctatgcagataaatttggagcagacaatgtgaagataatccaggattccaacaaggtaaaccccaaggatttggaccccaaatatgcctacatccaggtgacctatgtgacgccgttctttgaggaaaaggaaatcgaagaccggaagacagatttcgaaatgcaccacaacatcaaccgctttgtcttcgagacacccttcacgctgtcgggcaagaagcacggtggggtggcggagcagtgcaagcggcggacgatcctgacaacgagtcacctgttcccctacgtgaagaagagaatacaagtaattagccaatcgagcacagaactgaatccaattgaagtggcaattgacgagatgtccaagaaggtttctgagcttaatcagctttgcacaatggaagaagtggacatgatcagactgcagctcaaactgcaaggaagtgtcagcgtgaaggttaatgctgggccaatggcctatgcacgagcttttcttgaagaaaccaatgcaaagaagtaccctgacaaccaagtaaagcttttgaaggagatcttcaggcaatttgcagatgcatgtgggcaggcccttgacgtgaatgagcgcctcatcaaagaggaccagctggagtaccaggaagaactgaggtcccactacaaggacatgctcagcgaactctccacagtcatgaatgagcagattacgggcagggacgacctgtcaaagcgcggagtggaccaaacctgcactcgagtaattagcaaagcaactccggccctacccacggtctccatctcatctagtgctgaagtctgagggctctgcagcatcagacccacctctaagagaactttctgaatttgcagctaatctcggggaagagaaagataggtttaatttatttgaagttttcatggtgttaatatttttgtttacctcgctagcttcagaattttgccaacctctgaatttgcacattttgtataatttttttttctttgagcagtgttgatcaagccaggttgaatatttgccatgaaattccagtgaatgtgtagctcaaatgcaaaccctaagtttgctgtcagttattgtatggtcagtaccccagtcctagtacacatattttaaaggttaaagtgaatgtttttgtaacatttaagcatatttcagatgtaaataaaagattgtaaaatatacggtttttaccaaatttaaaagatcctttttagttaatactatgacagtactaaaaatatatgaataacatttcagataccattatattaaaatatttgtgtatgtgtacaaaagcgttgataaatactaatctttaaagtttgtggagttcctttatttgtaatatatgtgctcttaaaagcaatgggatgtgaaattatgaaagtattttattgttcatagaaataaaaaacacagttact

SEQ ID NO: 407696 - DNA, 1593 bp, Homo sapiens
acacctacgtgtgaataccagaaccagaaaaaaaattttttaaaaaaaaaaattcttttcttggggaaaatgaaaggggaaatttgggatttttctcttttaattaaaaaaaaaaaaaaaaaaaaaaagatagaaagaaaaaagaaaaaaattctaaaggcctaaaacagccctgagaatgagggcctgttagcagtgaaggcagaagggcacacaggtcaaaggagcttgggcacaagctaagaggtattagagaggatggcacctagcagaaaaagtaactcccatgcatgaaaagcatgcagaatggaaggtgccatgtgccgtgaaatgatacatgatcctctggtccttcagggaaacccttgactcttcactaatcctcaaccttgaaatccctttgtatggcttttgtacagcgagtcacctgttcccctacgtgaagaagagaatacaagtaattagccaatcgagcacagaactgaatccaattgaagtggcaattgacgagatgtccaagaaggtttctgagcttaatcagctttgcacaatggaagaagtggacatgatcagactgcagctcaaactgcaaggaagtgtcagcgtgaaggttaatgctgggccaatggcctatgcacgagcttttcttgaagaaaccaatgcaaagaagtaccctgacaaccaagtaaagcttttgaaggagatcttcaggcaatttgcagatgcatgtgggcaggcccttgacgtgaatgagcgcctcatcaaagaggaccagctggagtaccaggaagaactgaggtcccactacaaggacatgctcagcgaactctccacagtcatgaatgagcagattacgggcagggacgacctgtcaaagcgcggagtggaccaaacctgcactcgagtaattagcaaagcaactccggccctacccacggtctccatctcatctagtgctgaagtctgagggctctgcagcatcagacccacctctaagagaactttctgaatttgcagctaatctcggggaagagaaagataggtttaatttatttgaagttttcatggtgttaatatttttgtttacctcgctagcttcagaattttgccaacctctgaatttgcacattttgtataatttttttttctttgagcagtgttgatcaagccaggttgaatatttgccatgaaattccagtgaatgtgtagctcaaatgcaaaccctaagtttgctgtcagttattgtatggtcagtaccccagtcctagtacacatattttaaaggttaaagtgaatgtttttgtaacatttaagcatatttcagatgtaaataaaagattgtaaaatatacggtttttaccaaatttaaaagatcctttttagttaatactatgacagtactaaaaatatatgaataacatttcagataccattatattaaaatatttgtgtatgtgtacaaaagcgttgataaatactaatctttaaagtttgtggagttcctttatttgtaatatatgtgctcttaaaagcaatgggatgtgaaattatgaaagtattttattgttcatagaaataaaaaacacagttact

SEQ ID NO: 407697 - DNA, 2061 bp, Homo sapiens
tgtgaagattgccaagtcatgcagaacgaattatctgagctgcatgtgtacatcatatgctgctctcatgcagagtatctgaagaagttactggaaagtggaaaagatttgcacagcatccctgctctcggaggatacccacccctgtgatagcaactcattactaacaactcccagtggaggaagcatgttctctatgggatggccagcttttttgagcattacaccaaacattaaggaagaaggagcgatgaaagaggattctggaatgcaagatacaccatacaatgagaatatcctggtggagcagctatacatgtgtgtggagtttctctggaagtctgagcgatatgaactcattgctgatgtcaacaagcccatcattgctgtctttgagaaacaacgagacttcaaaaaattgtcagatctctactacgacattcatcggtcatatctgaaagtggcagaggtggtgaattcggagaagcggctgtttggtcgctactatcgtgtggcattttatgggcagggcttttttgaagaagaagaaggtaaagagtatatttataaagagcctaagctgacaggtctgtccgagatttcccaaagattactcaagctctatgcagataaatttggagcagacaatgtgaagataatccaggattccaacaaggtaaaccccaaggatttggaccccaaatatgcctacatccaggtgacctatgtgacgccgttctttgaggaaaaggaaatcgaagaccggaagacagatttcgaaatgcaccacaacatcaaccgctttgtcttcgagacacccttcacgctgtcgggcaagaagcacggtggggtggcggagcagtgcaagcggcggacgatcctgacaacgagtcacctgttcccctacgtgaagaagagaatacaagtaattagccaatcgagcacagaactgaatccaattgaagtggcaattgacgagatgtccaagaaggtttctgagcttaatcagctttgcacaatggaagaagtggacatgatcagactgcagctcaaactgcaaggaagtgtcagcgtgaaggttaatgctgggccaatggcctatgcacgagcttttcttgaagaaaccaatgcaaagaagtaccctgacaaccaagtaaagcttttgaaggagatcttcaggcaatttgcagatgcatgtgggcaggcccttgacgtgaatgagcgcctcatcaaagaggaccagctggagtaccaggaagaactgaggtcccactacaaggacatgctcagcgaactctccacagtcatgaatgagcagattacgggcagggacgacctgtcaaagcgcggagtggaccaaacctgcactcgagtaattagcaaagcaactccggccctacccacggtctccatctcatctagtgctgaagtctgagggctctgcagcatcagacccacctctaagagaactttctgaatttgcagctaatctcggggaagagaaagataggtttaatttatttgaagttttcatggtgttaatatttttgtttacctcgctagcttcagaattttgccaacctctgaatttgcacattttgtataatttttttttctttgagcagtgttgatcaagccaggttgaatatttgccatgaaattccagtgaatgtgtagctcaaatgcaaaccctaagtttgctgtcagttattgtatggtcagtaccccagtcctagtacacatattttaaaggttaaagtgaatgtttttgtaacatttaagcatatttcagatgtaaataaaagattgtaaaatatacggtttttaccaaatttaaaagatcctttttagttaatactatgacagtactaaaaatatatgaataacatttcagataccattatattaaaatatttgtgtatgtgtacaaaagcgttgataaatactaatctttaaagtttgtggagttcctttatttgtaatatatgtgctcttaaaagcaatgggatgtgaaattatgaaagtattttattgttcatagaaataaaaaacacagttact

SEQ ID NO: 407698 - DNA, 2742 bp, Homo sapiens
acaagcagaagtcaattgtccggtcccacttacaactcatcaaagctgtgagccagttaatagccgatgctgggattggaggctctcggtttcaacattcgcttgcaattaccaataatttcgccaatggagataagcaaatgaaaaacagcaatttcccagcagaggtgaaggacctgactaagcgtataaggactgttttgatggccacagctcagatgaaggagcacgagaaggaccccgagatgctggtggatctccagtacagcctggcaaactcctacgcaagcactcctgaactacgcaggacctggctggaaagtatggccaagattcatgccagaaacggagatttatctgaggctgccatgtgttacatccatattgctgctctcattgcagagtatctgaaaagaaagggttactggaaagtggaaaagatttgcacagcatccctgctctcggaggatacccacccctgtgatagcaactcattactaacaactcccagtggaggaagcatgttctctatgggatggccagcttttttgagcattacaccaaacattaaggaagaaggagcgatgaaagaggattctggaatgcaagatacaccatacaatgagaatatcctggtggagcagctatacatgtgtgtggagtttctctggaagtctgagcgatatgaactcattgctgatgtcaacaagcccatcattgctgtctttgagaaacaacgagacttcaaaaaattgtcagatctctactacgacattcatcggtcatatctgaaagtggcagaggtggtgaattcggagaagcggctgtttggtcgctactatcgtgtggcattttatgggcagggcttttttgaagaagaagaaggtaaagagtatatttataaagagcctaagctgacaggtctgtccgagatttcccaaagattactcaagctctatgcagataaatttggagcagacaatgtgaagataatccaggattccaacaaggtaaaccccaaggatttggaccccaaatatgcctacatccaggtgacctatgtgacgccgttctttgaggaaaaggaaatcgaagaccggaagacagatttcgaaatgcaccacaacatcaaccgctttgtcttcgagacacccttcacgctgtcgggcaagaagcacggtggggtggcggagcagtgcaagcggcggacgatcctgacaacgagtcacctgttcccctacgtgaagaagagaatacaagtaattagccaatcgagcacagaactgaatccaattgaagtggcaattgacgagatgtccaagaaggtttctgagcttaatcagctttgcacaatggaagaagtggacatgatcagactgcagctcaaactgcaaggaagtgtcagcgtgaaggttaatgctgggccaatggcctatgcacgagcttttcttgaagaaaccaatgcaaagaagtaccctgacaaccaagtaaagcttttgaaggagatcttcaggcaatttgcagatgcatgtgggcaggcccttgacgtgaatgagcgcctcatcaaagaggaccagctggagtaccaggaagaactgaggtcccactacaaggacatgctcagcgaactctccacagtcatgaatgagcagattacgggcagggacgacctgtcaaagcgcggagtggaccaaacctgcactcgagtaattagcaaagcaactccggccctacccacggtctccatctcatctagtgctgaagtctgagggctctgcagcatcagacccacctctaagagaactttctgaatttgcagctaatctcggggaagagaaagataggtttaatttatttgaagttttcatggtgttaatatttttgtttacctcgctagcttcagaattttgccaacctctgaatttgcacattttgtataatttttttttctttgagcagtgttgatcaagccaggttgaatatttgccatgaaattccagtgaatgtgtagctcaaatgcaaaccctaagtttgctgtcagttattgtatggtcagtaccccagtcctagtacacatattttaaaggttaaagtgaatgtttttgtaacatttaagcatatttcagatgtaaataaaagattgtaaaatatacggtttttaccaaatttaaaagatcctttttagttaatactatgacagtactaaaaatatatgaataacatttcagataccattatattaaaatatttgtgtatgtgtacaaaagcgttgataaatactaatctttaaagtttgtggagttcctttatttgtaatatatgtgctcttaaaagcaatgggatgtgaaattatgaaagtattttattgttcatagaaataaaaaacacagttactctcgtgccgaattcggcacgaggagttttgttctttgtaaccctctcatcatcgaggctatatattaatagacatggtattaagcccacacgaaacattcagaattagaattggattaagaagacgcgttttggcatcacgctgactactcctcatctccgtcctcggggagggcgatgccagcgtgggactctttggaaggcctatcaatcacaggtgcgctaaaatcaaaaggtgggtcagtaggttagtgagggaggcgcgaaaggagatgccagcgggtgttaggaaggatatggtcagaagagctctttgtctccatccacggggccgtctgctcagcccgt

SEQ ID NO: 407699 - DNA, 426 bp, Homo sapiens
ttaaacaaatagaatatattttattcataagaagatttttaaatagtaaaaataaaaatgaagtgctaatcaaaacagctaactataagttctttgctgtttccaaagagtctctgaaccagagactacaacaagcgagtatttttcaagctttaaaagttaatattacatgttagactcctaatagatacttacttcccattttcaaactgcattcagtatcatttgttttcctgatgactagaacatgtaactttcccacatagatgtaacacaggcaaaagacaagacaaatgcatgtaaaatacatttaatagtttaatgggaaagtacagtccaaaaattttaaacttactgttcatggaaatccagcattggtggctcaaatcgtatgggcctgcaattcccccggtagagagatatact

SEQ ID NO: 407700 - DNA, 1177 bp, Homo sapiens
tttgccaactgatgttccttaatggcagcaggcttctcagaaaaaatggaaaattaataattctatatagcaagttctacatatcatcactctattctctaatacttagtgtttaatgtacataaagagtagccaattgtgatattaacaaacttattaacacctgttgacaaagatctttgaagacaaatctacacgcaagcttttgccttagcgaacaacaggaatagtttccttaaaaggatacagctattttgaaatttcctcaaccattgcatcccagtgggggggatacttacatggtaggactgtttggccaaagtgcttgaagcattaggacacaacaaagatagttttgaaatgttttcttgctcaaaatacatttgttcttaggacacggctagtgctcattttacattccatgcctgaagtgtttaaaacactgtggtacaggtttctgattctgtgttggtcaattttgaaatccatgtgttagtagtaagtgtgctgattcgtagagtgggtaacttctgggaactcccctttcttttattgacaatttctttgtaaagcaaatgctaattctacaggctattaataaagactggaactcccttgttcattagacacgcagtaggaaaatgggtaacatagctgtagaaatatatttgcaatatgttctcttcgcacaatttgcatataaatgccgctttccctatttactcaaattagcaatgtgtaatggagcactcatagcctttttgtaggttcctgtgacctttaattggcactcatttcagacaattgccattttagacattgctatcgccatcttttgcaattaagtttcaaagttatcatcatggcatttttaatatttagaaatttctttttttatctctggctttcagttgaagactattcaccccggtggactcatcatgttggggactttcaattgctactttaaaaagaacgcttcactgaaataggtctcatcccatcaggaacatagaaaaacaagcagcaggccgggcgcggcggcacaggcctataatcccagctacttgggaggctgaggcagaagaatcgcttgaacccaggaggcggaggttgcagtgagccgagatcgcgccactgcactccagcctgggcgacagagagagactctgtctca

SEQ ID NO: 407701 - DNA, 314 bp, Homo sapiens
gaggacctaagagtaagcattgggatgttccaaacaagggggtcggggagaagaggaggaaacaacaaaggaatagccagggaagtagaaggaaaaccaaaaggctgtggtgtcctttaaaagccaagggagaaatggtcaaattacatgaagtgctgctcataaataagatgaggaatgaaaggctagccactgcacccagcctacaataagtattttaaataaggaaatgaatctgaatgtctgcaaaaggttaccgaagcagagatgtaataattttcatttttaaaattaggataccagaatctcttgat

SEQ ID NO: 407702 - DNA, 464 bp, Homo sapiens
aaactcaaccctaagctctttaagggtgcaagtgtcatcttgggtttctgcgtctcctgacttcctccccaggcctggtgcagaagcactggcaatgcgtcttatgctgggcagacggtgcccagcaaagttgaatagatatgtggcaacaggctggctcagctggagtttcaccctcagtagggaggaacacataactccttcttgctgtggtatgggagtcccagggtctcaggacagtagaggccactggtccacacatgtcttctatgttcagtttgatctgaatttgagattagcgattctctttctcctctccctagtgggagaacaacaggagctgggctttggctgtagcagcagaggtcccagttagactcaaggaataactttccaagtagcagagactgtggaccatttgccagattggatttcagtgattggttttagactaagaggacttt

SEQ ID NO: 407703 - DNA, 127 bp, Homo sapiens
aaagcaccatgcacatatatttttggaaggaaagtccaggaaagctctggagaggagtggcatgcagaggttgcatggaacatttcccccctttgtattttaacagcacccaaaactcccctgggga

SEQ ID NO: 407704 - DNA, 539 bp, Homo sapiens
atttgccaggagttgtggtgcatgcctgtagtcccagctactcgggaagctcaggtgagtggatcacctgagcctgggaggtcaaggctgcagtgagctgtgatcgtgccactgtactccagcctaggcaatggagtgagacccagtctcaaaaaaacaaagagttgggggtggtgaatgaaatactaatgcatgctatattgtaaatgaacattgaaaataccatgctaagtgaaagaagccagtcacaaaagacaacatatggtagtcatattccatttatatgaaatttccatactaggcaaatctatagaggtagaaagtagattagtggttgcttaggactagaaggaagttggggagatatgaggatgagtgtaaaaggtacaggatttctttttgaggtgataaaaatgatctaaatttgactgtggttgcacatatctgtgaatatactaaaaaccactgatttgtacactttacatgggtgagttgtatggtgtgtgaattatatttcaataaagctgggttgttttttg

SEQ ID NO: 407705 - DNA, 147 bp, Homo sapiens
tgatttacatttcatactgacaagaattagtctttcttcagcactttggtttttttttctcttttgctcctgaaacttttgtatgctctgagataatttttctttgctcatccgtaagagagaaacctacaggcacttttgaggtat

SEQ ID NO: 407706 - DNA, 1342 bp, Homo sapiens
ccgtaggaggccaggatgacggcaaacggcagcagcaggatgaccacgcgggcggcgaacatctggttctcggtagtgtctccgtcgcctccgcaggccagcttgagcaacgccggcagctcacagatgaagtggtccagcaggcggggcgcgcacagcggccgctcagccaggagcgcggtttgcgcaaccgagttggtgaggccgcttagccaggaggcgctggccagcgtgcgacataggcgcggggagacgagccccgcatagcgcagcgggcggcacactgcggccgcgcggtccagagccatcaccgccaggaggacgcattcggccgaacccagagccagcgatgcgcacagctgggccgtgcagtggctgcgcggcagccagagcgctggtccgcgcaggttggccagcagcggcggcaccacgctagtagtgaagcccgcgtctaccaaggccaggtggcagaggaagtagtacatgggcgtgtgcaggcgcgggtcgcgcaccgccagcagcaccagcgccgagttgcccgtcaaggtcaggaggtagcacaggaggacaagggcgaagaggaccggctgcagggaaggccagtcggagaaacccagcaggagaaagcgctcctctgcgctgtagttggcctaaaggaggaaaactcccagaatgtttggaaggtcgaaataaaaaagggtgactaccccttataagcaaagggaaaaccttggagtgtggggctgggctgggagaaggaatggaatcatatacaaggtcagtttgtggattgtaatcccatttacagatgagattacttaaaaataaactccctaagaataagagcaacactccaagcttggcgtggccaacactcggtaggcagaatgatcacctccgttgtttcaggtactctgtgtttatttatgcaacagttcatgtaaaatggagacgaggccagaagaatccttgagcagacagagccagttgggcctcctaagtgaccttaaccttgcttgatttgcaagcatgtctgaaactttatttgtggtatttcttgtaaatgcctatgttaaagaaacacagaacttaagctcaaccaatcagaagcagccaacaaaaacgtaattagtaactaggacttcctcatgggatagaccaaataaggcaactgtataactgtgtaactgtataactgtaaccaatgaaatattatctttgcttttatctatttgtcctaaaaagcctcctcctcatgttctctctggggagctccctagccacttctggcttggagctgcccaattcatggatcactgctcaaataaactcttaaatattt

SEQ ID NO: 407707 - DNA, 679 bp, Homo sapiens
ccgtaggaggccaggatgacggcaaacggcagcagcaggatgaccacgcgggcggcgaacatctggttctcggtagtgtctccgtcgcctccgcaggccagcttgagcaacgccggcagctcacagatgaagtggtccagcaggcggggcgcgcacagcggccgctcagccaggagcgcggtttgcgcaaccgagttggtgaggccgcttagccaggaggcgctggccagcgtgcgacataggcgcggggagacgagccccgcatagcgcagcgggcggcacactgcggccgcgcggtccagagccatcaccgccaggaggacgcattcggccgaacccagagccagcgatgcgcacagctgggccgtgcagtggctgcgcggcagccagagcgctggtccgcgcaggttggccagcagcggcggcaccacgctagtagtgaagcccgcgtctaccaaggccaggtggcagaggaagtagtacatgggcgtgtgcaggcgcgggtcgcgcaccgccagcagcaccagcgccgagttgcccgtcaaggtcaggaggtagcacaggaggacaagggcgaagaggaccggctgcagggaaggccagtcggagaaacccagcaggagaaagcgctcctctgcgctgtagttgcctgaggaaactttcactggttggaggttct

SEQ ID NO: 407708 - DNA, 116 bp, Homo sapiens
aattcaagcttctaacgatgtacggggacatgttctctctggggagctccctagccacttctggcttggagctgcccaattcatggatcactgctcaaataaactcttaaatattt

SEQ ID NO: 407709 - DNA, 769 bp, Homo sapiens
ggcgcaggtcccgcccctttccatctacggggcggcaggaggcccgaagcaagatggcggtgaatcagagccacaccgagaaccgccgcggagccctcatccctaacggtgaaagtctcttgaagcggtctccgaatgtggagctctccttcccacagcgatcagaaggctcaaatgtctttagtggtagaaagacaggaacattgtttctcacttcataccgggtgattttcataacttcatgctccatcagtgatcccatgttgtcttttatgatgccatttgatctgatgacgaacctcactgttgaacaaccagtatttgctgcaaacttcattaagggaactattcaggcagctccatatggtggctgggaaggacaagctacttttaaattagtcttcagaaatggaggtgccattgaatttgcccagttgatggtgaaagctgcctctgctgctgcccgaggatttccacttagaaccttaaatgactggttcagctctatgggaatttatgtaattactggggaagggaatatgtgcactccacagatgccttgttcagttattgtctatggagccccacctgcaggatatggagccccacctcccggatacggagccccactgcaggatatggagcccaacccgtaggaaatgaagcggccgcctgtgggatacagagcctcacctgtgcgatatggagccccacctcttggatacggagccccacctgcaggatatggagccccacctctaggatatgg

SEQ ID NO: 407710 - DNA, 837 bp, Homo sapiens
ggcgcaggtcccgcccctttccatctacggggcggcaggaggcccgaagcaagatggcggtgaatcagagccacaccgagaaccgccgcggagccctcatccctaacggtgaaagacaagcacaaaagcaccacccatgcctctgagaacactggaccatgcacccttgaaaacagctttgcttccttcatcatgagtaatcttcctccagcagtcaaatgtgcctgtgtacatgatgtcagttcctttgcatcctgactgcatcatcatgtagcagcaaatggtgttaaatgaataggaagtcaacccagcaacggcagtgacagtctgtgcatcatccaactgatgacaatctccagctttgcccacatcagctgctacacgagtatgggcaaaatcaagagggtacacaaaacacaaggatgtggccccagtggcaccgcctgatgccagattccctgcaaagtagcgccaaaactgggatctcttgtccacaccatccaggaagatctgcttgtatttatctttgaaggtgggaaaacaaaaagaagtcatttgcttaaagcgcatgtgggagagcttggatttggatttgaacttaggtactgtgcataaactcctgtactccagctgtccctctagaaagaaaaggactctttctctgttttcttctcaccaaagaagatcctattagtaccctagcttcctggatagaaactactttaaagaaccagagatagtggtgcacatctgtagtcccacctattcgagaggctaaggtgggaggatcacttgaggccaggagttcaagaccacgctgagcaaaatagtgggacc

SEQ ID NO: 407711 - DNA, 669 bp, Homo sapiens
cgtctcaaaaaaaaagaatgctcaagatatgtcatgtaatacaacatgcctgttcaaagggggaaaaatcttaggaaataacttacatgtacttcttggtttcatcatacaagacaagcacaaaagcaccacccatgcctctgagaacactggaccatgcacccttgaaaacagctttgcttccttcatcatgagtaatcttcctccagcagtcaaatgtgcctgtgtacatgatgtcagttcctttgcatcctgactgcatcatcatgtagcagcaaatggtgttaaatgaataggaagtcaacccagcaacggcagtgacagtctgtgcatcatccaactgatgacaatgtgagtgttcttgggatccggaagcattccctttgcagtgtcatagttaccgaagtaggcagcaggcagctcggtagataataccctgcacagacacgttaaagccttggtacaggctcttaatcccgtcagatttgtagatcttaactaggcagtcaccgaaacctcgcaattccctttcagctccagctttgcccacatcagctgctacacgagtatgggcaaaatcaagagggtacacaaaacacaaggatgtggccccagtggcaccgcctgatgccagattccctgcaaagtagcgccaaaactgggatctct

SEQ ID NO: 407712 - DNA, 6123 bp, Homo sapiens
agccaatcagaatctcccggcagttggttcccggaggcagaatctgttaaactgacaaagcccacgtctccgggtccctgtctcggggagtcgggactattgggtcaccccgggtagtcgagactctagactgagctgtctcggtcactcaggaggcagttggcagagtattcgtggtcagggaggtgacccgtggtcagcagggtcaggccacccagggacaaagggtgctcctgcaccgggccttggagaaggacagagcggtggggacttggggtcagcgggggagcctccgcggatggggagtcaccacctgccggcaatcagccatgactgcctttgcactgtccatgctctcagcccaccacctcctccccctgccattgcagtggctaacactggagacgaagaccaagacaccacagcctttctccagtacctctcaaatcagcacagacaaggacaaaggcctcaatccacaactgctgaagatggaccctggccacatgggatggtcagacacgcctgcccagctatctgcaggcgaagaggctcagaagaggtttaggggcctgaaggacatcttgcttccatgtccatatgagcaggctatttctgctccatgagtcaattttgccatataaaatacttaatttcagccattccagggtgctataggatgcacagcttcccatcagcccacctgaactccagccatgccattttaataccaggaataaggtcacctgctttcctgccccttaggaggccggagccgtggaagcaaaatggcacttctgtttacctgttatattatttttttgtcatccttatatgtttgaaaaatgcaattatatgaaaaaagtttagtaattacagacataacagcagaaagtcctcggaaccaagcttattctcatggccgattctgctccacctgggactctgctgtgctgcgggcatcctgtggtcagaatcgcagaggggccatcagggaggaccttcccagaggatggacctcacgtgactgctgcgtgggcaagtggcactggccactctgcctggagagaggagtaaatgcagggctggccaggcgacctgcacactctgctaccggccttgtccatctttagcctctaatttgaaaatgaggatcacacagaccaagagtatctttgagggttagtacagaccacagaaatgccctgggcctttcactctctccttttgcaaattcccatgtgtggaaatgccgtttggataatgagggagcctgaaggaggtggacacatgagcagccccgacaggcctggctccatcctctgaaaatggggccccgtgcccggcgtgtggccttactggttcagtcttctttacagtggtaggttttgagtgcccagatgcccagtgcctcctacccggaacaggacaggaccaggctgtcccctggaagaatcccatgcacacttggctattcagggagtttccacccagccgagctcgcctctgtggctaccctggtcttgctgctcatatctgccaggaaaggcctggacttggagagaaacctgggatttggattcagtccttgccagcctggctggttcatatccttacctctgtctgtggaagcctatgttcctgagcagcgagtcagagggggcatctgaacgcagagcagggagcttcagatgggaagaagtcagaggaaccagaatgtatcagacgatgtggagttgggtgcctgagctcaaagcaagctgggccttgggctggctgtgtgatcttgggcaagttcgaccagcttctttgtgcctcttttctctccttaataagataaatgtcttcactagtacactgagggctgccattaagttctatgtgcagggatccaaggcaggccctaggtctcttggtgagtgctactcctccttacaatttgctgcccggagcaacattgggtgacagaacttcttagcaccttggcagtccttgtcctcctggaccctctgttttgagggtggaatgaggtgaagggcaagtgctttcccagctggtcaggtgctctaccaactgggcatattctaatccccccagagtatacagatcagagtttgatgtggccaatgggtccaatgcccaagtgagaatctcttgatgaagttattggtgtggggttttgctttggtttttaattatagagagcaaaagtattgaaagtattacatttaccctaaaggtgtaagcaagttatggtcaagtgaagatgaagtaccatcctcaaacacgggttccattcttagctcatctcatttaaaggagagaaaagccttgcaggtgaaacatggtgggggtagacaggggttcagccaatttcagtgtttggccccaagaagtgaatttgggtttgaggacctctctctggaaggattttatgaccagatcttcctggagatgatattagaagcttttctcaccaaatatttatttgcctggggtgcaacttctgcttcattctctctttgactccagctgtctttttggactgaagtgcaggttgctcacagcatcctacaaagtaactgtcttcccaaatctcacttacctctgagtttctgctgtattcctgtctttctctctctttttttgaactggaatctattactttggatgatgcatgctggcgttttctaaagttttctgattgattgtgtctttaaaaaataatctgataatattttagcttcttgaattttgtggcatatttttaggcctctcctaaacccatttttgagtgctatgacattgttcatgtatgaagttatgccagtagaaacaaaatgctgtcatataggctcccctaaaacttcaaatctggtccagatcttagactggcagcttctgctgtcattggatctcagtgagacctttgcacccatttcctccctttgtgattcatccacggacatccccatctccttgagaacaatctcaggaatattccttgccttctttcggctctcactccatctcattttctgctgttcactcgggaataaagagatgtcccacactttaaagagtaaaaacaaaaattggagctcagagagggtgaacttgtcaatatcacacagagctgggagtgtggtaagcccttgaaatggggctcaatgacaccgctacctcccagggattcctaatgtctgagggttccagtgagctgagatgaacccagggcctaagaagaactctctgacctcctcacctccaaagccccacccagtgcacatggcctgaggcgtccatggtgatggtaaagaaacctcacctgccatctctcccattactgccatgtcccctctcatcctattctgtgccaaatgtccagatgtgatcaatagaatcaggagaaaattgaggcctgaggggagggggccagactctgggagtggagagtggattgaagtcagactagggctgttcagcaaggagttcagggccttcaagtgttgggagcttggcagcaatgccaaggggaatgggggtggatttgggtccaagtttatgttcgaagaatataagcatgatttggagactcctgatgttcatatgcccccatcaagcagagctaggggtcgccagaggagagaatggtgctagaagttcaggtgagaacagggcagacccctgcataaatgtgggatctctctgtttgaatcacggcccaaacaccgtggcagggacactcccaaggaactcaaacatgtattttatcagggctttaacataaggaatattgattcttaagaaaattggaaacatatgagaatctaatttactctgttatgagatgccatacacctggaagaacaggttaactgtcaaattactaccaaattgttgcaaaaaattgccaatgaagcaatcatacaaagctcaggtaacagagtgggtggccatcactctgggagagggagatagcactggagaaggtccttgtgactcagatcaaagagagcaaatggcaaagaagggggacagttgctgttttctgaagtaaagcctcttaggtgttatttgaccatttgttacctgtgaatgtataattttgatttttaaaataagtagaaaggagcctctttcttaaaaccaaccaatctctgagccccacagatggtattctggtttcttgcaggaggttctgggtcccacccgcctgcccccttctaggacaaccccaccagcaaggaggtcttttagttccttctgtgtgtgttcacctgctcgtcctggcttgggccccagggagcccaggaacctcagggttctctcagctgcacttccatccgtggtgcccaacctcagtgcctaggactctgtgtgcctgacctcctccaggcggggctgctccctccaggtgtccacctggtatgggcatcccgtggcagctctcctctgatgaccgagtgtggtgggggtgctaaggccaacttgctgctggcacgcccagaacttatttgctggctgtttcaaagactccctaaaggcaccatggattttccttagaatacagttctgtgcagtcccgcccatcctcttcccctctgtttcccactagggctgatacttgctttaaggtctgatggctcacccagtccttcataattttcacaatgttatgttccttcctaaaacccttgcagtttaatctgctcttggcgtctgcttctcagaggagctgaggaacagagacttcaacccttcttctctcagttcctgctgcccctgtagtgaggctgacagttgcagaccatagagccagcctggccttgcccagagcatacatgacctcttagtaaggctgggccctgctaagggctatgttttgcacacgttcctgctagtcacatccagcacatctgggctaccacttggatggcaacattacattgaagaccactgtggccatggcaggagtagacaaggtggcagtcttgtcttcagtcgtcatggaaatcccagctatgcagcactagcaggtgttttgtaatggaggatcagatgcttgagcttctgagcaggccccctccctctactgccttctgtcagggtcttggcagcagccggctctggaaggcatcccggctctgggttcaagagcttgctgggcttctacatgaaggtgtgaagtgtgaatgttaccttttctgatttacacttctgttttctgctacaaacttgggatgttttctgagggatgctgaatagatgggggtggatggggggagggaggcaggggctagaaagtgttcttctggggccaccctccagcctggggcatctgatggatgaggaggggagaatctttgagatcctgtttatgagggcactgcaaataccacatttttttcttgtttgcaaattctagtggagaagttttaccaggttgggagagaggcctcagaattaagtccctgtctcctgccacagtttacaccggtgaagcttcctggccgagcataaactcccaggtggagtacaaacagccttcaacaatggcaccatcattggtaccaatggcattgagaggaggtggcactgacaccctaagtgggtggcactgacacctaagacttatggtcttctgctgcctggagagctttgcctccatcactggtgcccaccttgggaattcccaggaattactcttcaaaggtacactcggacgcccactctgcaaggccattttgttcccttacagtgcctctgaaatcattttgagagaggagaatagggaattagggtaaacaacggttaaggcataagcaaaagaacagcaggtgcagccagctctagacagcatataggccacatcctcactcctgttataacaaaacagaagtttccacttcagccttttgtttcatcctgggtaagtccttcatagggtgtaaccaattggaggcctctaaagggcacctaggggtgttgctaaattattaatagcttaaaaccctaaagaacattgtaatcagcgctcttgagccctttacataagttggcttccactctgtggagtgtactttgcttcaataaatctgtgctttcattgcttcaaaaaat

SEQ ID NO: 407713 - DNA, 3451 bp, Homo sapiens
caaacttcaaactttttaatggaacaaggacacacaggcattaatccccagtgtccatcaaagttgcaatgcagccctaacgcctggcatccttgaaagggatgtgcatttagtaatgagatttgctcagcagcgtagtcagctgtgtggtgcattctcagctgtgcctcagcagccctgatgcagacatccagaaggagcacagccactttatccagaggtgaagttttgcagcaagacagcattcatagggggagttctcaacaaatgtcagtccccaaaaagggaactggctttattatggtcattaggatattcactcgtagagaacaggaccttctttcggctctcactccatctcattttctgctgttcactcgggaataaagagatgtcccacactttaaagagtaaaaacaaaaattggagctcagagagggtgaacttgtcaatatcacacagagctgggagtgtggtaagcccttgaaatggggctcaatgacaccgctacctcccagggattcctaatgtctgagggttccagtgagctgagatgaacccagggcctaagaagaactctctgacctcctcacctccaaagccccacccagtgcacatggcctgaggcgtccatggtgatggtaaagaaacctcacctgccatctctcccattactgccatgtcccctctcatcctattctgtgccaaatgtccagatgtgatcaatagaatcaggagaaaattgaggcctgaggggagggggccagactctgggagtggagagtggattgaagtcagactagggctgttcagcaaggagttcagggccttcaagtgttgggagcttggcagcaatgccaaggggaatgggggtggatttgggtccaagtttatgttcgaagaatataagcatgatttggagactcctgatgttcatatgcccccatcaagcagagctaggggtcgccagaggagagaatggtgctagaagttcaggtgagaacagggcagacccctgcataaatgtgggatctctctgtttgaatcacggcccaaacaccgtggcagggacactcccaaggaactcaaacatgtattttatcagggctttaacataaggaatattgattcttaagaaaattggaaacatatgagaatctaatttactctgttatgagatgccatacacctggaagaacaggttaactgtcaaattactaccaaattgttgcaaaaaattgccaatgaagcaatcatacaaagctcaggtaacagagtgggtggccatcactctgggagagggagatagcactggagaaggtccttgtgactcagatcaaagagagcaaatggcaaagaagggggacagttgctgttttctgaagtaaagcctcttaggtgttatttgaccatttgttacctgtgaatgtataattttgatttttaaaataagtagaaaggagcctctttcttaaaaccaaccaatctctgagccccacagatggtattctggtttcttgcaggaggttctgggtcccacccgcctgcccccttctaggacaaccccaccagcaaggaggtcttttagttccttctgtgtgtgttcacctgctcgtcctggcttgggccccagggagcccaggaacctcagggttctctcagctgcacttccatccgtggtgcccaacctcagtgcctaggactctgtgtgcctgacctcctccaggcggggctgctccctccaggtgtccacctggtatgggcatcccgtggcagctctcctctgatgaccgagtgtggtgggggtgctaaggccaacttgctgctggcacgcccagaacttatttgctggctgtttcaaagactccctaaaggcaccatggattttccttagaatacagttctgtgcagtcccgcccatcctcttcccctctgtttcccactagggctgatacttgctttaaggtctgatggctcacccagtccttcataattttcacaatgttatgttccttcctaaaacccttgcagtttaatctgctcttggcgtctgcttctcagaggagctgaggaacagagacttcaacccttcttctctcagttcctgctgcccctgtagtgaggctgacagttgcagaccatagagccagcctggccttgcccagagcatacatgacctcttagtaaggctgggccctgctaagggctatgttttgcacacgttcctgctagtcacatccagcacatctgggctaccacttggatggcaacattacattgaagaccactgtggccatggcaggagtagacaaggtggcagtcttgtcttcagtcgtcatggaaatcccagctatgcagcactagcaggtgttttgtaatggaggatcagatgcttgagcttctgagcaggccccctccctctactgccttctgtcagggtcttggcagcagccggctctggaaggcatcccggctctgggttcaagagcttgctgggcttctacatgaaggtgtgaagtgtgaatgttaccttttctgatttacacttctgttttctgctacaaacttgggatgttttctgagggatgctgaatagatgggggtggatggggggagggaggcaggggctagaaagtgttcttctggggccaccctccagcctggggcatctgatggatgaggaggggagaatctttgagatcctgtttatgagggcactgcaaataccacatttttttcttgtttgcaaattctagtggagaagttttaccaggttgggagagaggcctcagaattaagtccctgtctcctgccacagtttacaccggtgaagcttcctggccgagcataaactcccaggtggagtacaaacagccttcaacaatggcaccatcattggtaccaatggcattgagaggaggtggcactgacaccctaagtgggtggcactgacacctaagacttatggtcttctgctgcctggagagctttgcctccatcactggtgcccaccttgggaattcccaggaattactcttcaaaggtacactcggacgcccactctgcaaggccattttgttcccttacagtgcctctgaaatcattttgagagaggagaatagggaattagggtaaacaacggttaaggcataagcaaaagaacagcaggtgcagccagctctagacagcatataggccacatcctcactcctgttataacaaaacagaagtttccacttcagccttttgtttcatcctgggtaagtccttcatagggtgtaaccaattggaggcctctaaagggcacctaggggtgttgctaaattattaatagcttaaaaccctaaagaacattgtaatcagcgctcttgagccctttacataagttggcttccactctgtggagtgtactttgcttcaataaatctgtgctttcattgcttcaaaaaat

SEQ ID NO: 407714 - DNA, 317 bp, Homo sapiens
aagtgctgggattacaggcatgagccaccgtgcccggcccataaatatttcttagtttgtaaaaatgtaacttaaaaacctaaaatatcaaaaaaaatacgaaattgaactatcataggaattcaggctgtacaagtttccatgatgtcgactcactaggaagcttctaggacagcagggagcagaggggaattctcaggacagcagcaccatcctgcacctcccagaaaaggagaggcctggtcctctggccacaggggccagcaacagggggaaagaaactaaaacccaggacttgaaccaccatgtcttctttg

SEQ ID NO: 407715 - DNA, 428 bp, Homo sapiens
aactcaccaagttggacagttcagtggtttttagtatatgcacagagttgtataatcatcatcacaatgaattttagaatattcttaccacctcacagccctaggcagccaccatgggtttgcctgtcccagacatttcatgtaactggaatcatttgtggtcttttgtcactggcatctttcatgtaccatatttttgaggttcttccacgtggcatgtgttagtacttcactcctttctataactgattttttttttttttttttttttggagacagagtttcactcttgtcacccaggctggagagccaatggtgcgatcttggcttactgcaacctctgcctcctgggttcaagcgattctcctgcttcagcctcccaagtagctgggattacaggtgcatgccaccatggccggctaatgttt

SEQ ID NO: 407716 - DNA, 182 bp, Homo sapiens
atgccagctcattcattcaacaaatatttattttgtgcatattatgatccaggcagtgctctaggcaccaaaggtacagaaatgaacaaaacaaagtcccttctgtcatacagcttacaatctagtgggggagattatttttataaactaaaagaacatccttattgatgtgctgattcctg

SEQ ID NO: 407717 - DNA, 409 bp, Homo sapiens
actgcttgacccccggagtttaaatgcagcctgctagcaagactccctatctttaaaaaaacaaaaaaagaaaaaaatctctttctctcacctcctctccccccaacccccatacaagtgaacaaattaaaagatgtgcagaccaggattagagttctgcaaaaattcaatagatgtttgtctttaaatttttactacaaatactttcaaaagcaccatgacccatatggatgaatgagcaaagaatttgagaagttgggctcatttactaaagaggaaatgcaggtacaagcataagggacatgtttttccctgacaggtaattgaagaagtgaaattttaatatgtagtgatttttttttttttactttttgagttagcagaagtatttttctaatgatgtttttgc

SEQ ID NO: 407718 - DNA, 168 bp, Homo sapiens
agcactcttgcagcgattacagctgagttttgatgcaactctacaagccagaggggattgcccccattttatacatggggaaactaagcacacacaacagcagtacttggtagtagtattgagtagtagtactgagcagtagtactcagctggtagaaggcagaccgg

SEQ ID NO: 407719 - DNA, 599 bp, Homo sapiens
tgaggaatctctaaactaccttccataatggctccattattttacattcccactagcaatgttaaaggatttaagtttttccatatccttgccaacacttgttattttctgtattattattatattattattgccatcctagtagatgtgaaatggtatctcattgtgattttgatttgcatttccctaataactaatggtgtagagcatattttcaactgcatgttggctatttgtatatcttcttttgagaaatgtctgttcaagtcctttgatcagtactttttttaactgggttctttttgttgtggggttgtagaagttctttatatattctgtatgttaaatctttatcagatatatgatttacaaatattttcttccattctgtaaattgtctttttactttctttacaatgttctttgatgcccaaaagtttttaattttgatgaaatccaatttatctattttgttgttgttgcttgatgttagctgtgggtttttcattataccctttatcaagttgaggaagttcccttctattcccagttttctgctggtttttattagggaataaaatgcctattctgctcaattg

SEQ ID NO: 407720 - DNA, 482 bp, Homo sapiens
tcacatgttctgacttatttattggagctaaagatgaaaacaactgaacttctagagatagagtagaagaatgtttaccagaggctgggaaaggtagtgggggcatgatgagggggaattggggaatgttaatgggcacaaaaaggtagaatgactaagacctagtatttgatagcacaacaaggttactacagtcaataataattgtacatttttaaggtataattgaattgtttgtaacacaaaggataaatgcttgaggttatggatatcccatttaccctgatgtgattattagacattgcaaacctgtatcaatatatcatgtaccccatagatgtatacacctagtatgtacccaaaaaaattaaaaataaagtaaaaatttcaatgattaggaagaccattattaatatgttttctttaaatgtttctgtaaatttgatacaatttcaataaagcttccaatatttattcttagt

SEQ ID NO: 407721 - DNA, 381 bp, Homo sapiens
gcaacgtcaaataaccacccctgaattcccagagaaaagtccaatagctggtgggaatcaaaacaaggaaagaaaaagacaggacagttcggctgtaagacctgagtaagcgctggtggagtgtctgaggcacagttggccgcagagatcttcctagctggaccctgccccctctgggagaagtgattgctcagacctcaaggctccattcagatacctgcgcgaaggcctatgcctgaagactgggaggctacagcccacatgacacttccctgggccccgattgagatatctggtgagttttagcatccgatgcacgcacactcttatctggcccagccactgggagacttatttcaaatgaatcaccagagccatctt

SEQ ID NO: 407722 - DNA, 781 bp, Homo sapiens
agggtgtttctccatgttggtcagtctggtcttgaaatcctaacctcagctgatccacccacctcggcctcccaaagtggtgggattacaggcgtgagccactgcaactggctcttttaaatgtaattttatttatttatttatttttgagcctgttttgcagcctttacaaaaatcagggttttcccacaagatcatgaagattttcatataagggacctctgaccatttgtgttggcgttggcagtaaaggtcaagcaggaataaggtaataacattcaagctccccacctttggccaggttcctgcctttctagttcatattttggccaaacctagctactcgccaggctgaggcaagagaatcacttgaacccggagggcaggcggaggttgcagcgagccaagatcgcaccattgcactgcagcctgggcaaaaagaaagaaacttagtctaaaaaaaagaaaaaatcaagacccttctcctctctccgtcatcgtagtgtgtgcttgacttggcttcttgccatgtcttctcacaagactttcaggattaagagagtcctggccaagaaacaaaagcagaattgttccattccccagtggattcgcatgaaaactgataataaggtcacaatcacgcaaccatatcaagctgaaaatgtcacccctatctggagagttggacatgttttattgggaatatattttttatctctgactctgttacgaacacattggttggctaggttcggtaataaatatgtgaaacattttattt

SEQ ID NO: 407723 - DNA, 962 bp, Homo sapiens
gagggcctttgccggggaggcgccgccgccgagcccgcggccagacgccccatcagtagcgtccgcaccgggagccgcggctctcgcccgagccgtgggcgcgcccgaggggcgggctcgcctcccgccgtccctcgcagctctgccgggcccgagcccgcgccgccgccgccgccgccttgccgctcgggccgcgcggcccgggaagcttgcggccgcgggctgcatgggcagcgcccgcgccccgccgctgagccgtcgcggagccgcgcagccctcggagcacgaatatatacagccctgctctgggacacacctccattggatttaaaagacagtcctcgtcagcactgactttcagctatggaatcgcagacggttgatgatgaagcgccggccgtgtaaatgaagatcgggtgaggagcaggacgatgcccaagggtgggtgccctaaagcaccacagcaggaagagcttcccctcagcagcgacatggtggagaagcagactgggaaaaaggataaagataaagtttctctaaccaagaccccaaaactggagcgtggcgatggcgggaaggaggtgagggagcgagccagcaagcggaagctgcccttcaccgcgggcgccaatggggagcagaaggactcggacacagagcgctgggcaagaacccgtcctaggaccaggcctctgtaagggctgtgggtgcagcaaggagtgggaaggcacctgccatgtcccggccccaagacagctctgcccaccgagccctctcagaccagcttgccctgggacttctagcccatcttgcctgccctgctctgcctgccctgtctgcccggggcctcttgtatctgcttttgaagtctgtcctctaccacctcaagggtggtctcagtttaaaaagccttatcactgaaagcattcatattaaattatatgatatctgggatttgcttc

SEQ ID NO: 407724 - DNA, 369 bp, Homo sapiens
ctctctctctctctctctctctctctctctgtactgattcaacaatagaacatgtcacacacgaactggaaactgattctgtgggcgacaagagtctatagtaaacgttatgacagattctttgaatgcgctaatctcagactggactaaagttgggattaaatttaatttgtacttgagttcagtgcattgctgttctgggcataggaaatccaggttgctggtgatgaacagctgaaaagagctgtgtcaccatggttgtctctgtcagtcatgtgaccacccttacccttgtaaaatcaagcaagggagagattattttctaatgtaaatgaaaataaaaaataaagcagcttgcagaaaaaaaaa

SEQ ID NO: 407725 - DNA, 1098 bp, Homo sapiens
tagcaggctgttactggtccggagatttttggatggataaagataaagtttctctaaccaagaccccaaaactggagcgtggcgatggcgggaaggaggtgagggagcgagccagcaagcggaagctgcccttcaccgcgggcgccaatggggagcagaaggactcggacacaggaccgccggggtcctgcttgtcctggggcagccacgagggagccctcgtcaggagcgccatgggccgaagctgcctgccctctgcacgtggatgtttctttggaacaaggggaaaaattatgattttcttattttgctttgacctgtgaatgacaccctggtctctggtgcctggggtgtgctctctgcagtgctgccaggcacatgctggttccttcagcgttaggtgcttggcaccttcagtcttttcctgacgtcatgtttgttcctggtgcctcagataggagacggctgttctgacggctcctgcttccccattcctggagggaagacagacttagccactggtatctgtgggacttcttggaactctgaatgccagaccttgcccagtgctagaggcgacaagtgtgtgaagttgaagaggcttctcccacctgctcagctgcagtggacccgagcgggcagagagagcagagtgcagcaggggccaggctgtgctcgcaggcggggcaggtgcctggagagcatggcgcccctgggagcctctggccaggaagggcatgtgctctgcagtgtgccgtggaccagtggcctcagctcagtgtgttgacgagggtcccaaggcactcacgtgtgtggggatgttagcaacacacggcgggaagccctgatgcagtttctcaccaagcgtgtagcagaccccacgcaccccacacaggtcaggcaccccacacagggcacagaccccacacaccccacacagggcaggcacctcacacagggcacagaccccacgcacccgacacagggcaggcacctcacacagggcacagaccccacgcatcccacacagggcaggcaccccacacagggcacagacccacgcaccccacacagggcagggatcccacgcagggcaca

SEQ ID NO: 407726 - DNA, 443 bp, Homo sapiens
gccctgatcagagcagctgcctgccttgactagttactgagtctgttgagtgcggtgtgagagtggatgagttttgagctgcctctgaattcagtgaattgtgtgtcttctcttttgaagcagacggttgatgatgaagcgccggccgtgtaaatgaagatcgggtgaggagcaggacgatgcccaagggtgggtgccctaaagcaccacagcaggaagagcttcccctcagcagcgacatggtggagaagcagactgggaaaaaggtaatgctgccccctcccagccctgcatgctcaccgcacccagatggggatgaggtgggaatggggtgctgcccgcctgtggcctgttctccgccctccggccctttcctcgtgcctctgtctgcagccaggagtggagagggtggtgaggagtgatctttcccaaagtggccttgc

SEQ ID NO: 407727 - DNA, 4798 bp, Homo sapiens
gagggcctttgccggggaggcgccgccgccgagcccgcggccagacgccccatcagtagcgtccgcaccgggagccgcggctctcgcccgagccgtgggcgcgcccgaggggcgggctcgcctcccgccgtccctcgcagctctgccgggcccgagcccgcgccgccgccgccgccgccttgccgctcgggccgcgcggcccgggaagcttgcggccgcgggctgcatgggcagcgcccgcgccccgccgctgagccgtcgcggagccgcgcagccctcggagcacgaatatatacagccctgctctgggacacacctccattggatttaaaagacagtcctcgtcagcactgactttcagctatggaatcgcagacggttgatgatgaagcgccggccgtgtaaatgaagatcgggtgaggagcaggacgatgcccaagggtgggtgccctaaagcaccacagcaggaagagcttcccctcagcagcgacatggtggagaagcagactgggaaaaaggataaagataaagtttctctaaccaagaccccaaaactggagcgtggcgatggcgggaaggaggtgagggagcgagccagcaagcggaagctgcccttcaccgcgggcgccaatggggagcagaaggactcggacacagagaagcagggccctgagcggaagaggattaagaaggagcctgtcacccggaaggccgggctgctgtttggcatggggctgtctggaatccgagccggctaccccctctccgagcgccagcaggtggcccttctcatgcagatgacggccgaggagtctgccaacagcccagtggacacaacaccaaagcacccctcccagtctacagtgtgtcagaagggaacgcccaactctgcctcaaaaaccaaagataaagtgaacaagagaaacgagcgtggagagacccgcctgcaccgagccgccatccgcggggacgcccggcgcatcaaagagctcatcagcgagggggcagacgtcaacgtcaaggacttcgcaggctggacggcgctgcacgaggcctgtaaccggggctactacgacgtcgcgaagcagctgctggctgcaggtgcggaggtgaacaccaagggcctagatgacgacacgcctttgcacgacgctgccaacaacgggcactacaaggtggtgaagctgctgctgcggtacggagggaacccgcagcagagcaacaggaaaggcgagacgccgctgaaagtggccaactcccccacgatggtgaacctcctgttaggcaaaggcacttacacttccagcgaggagagctcgacggagagctcagaagaggaagacgcaccatccttcgcaccttccagttcagtcgacggcaacaacacggactccgagttcgaaaaaggcctcaagcacaaggccaagaacccagagccacagaaggccacggcccccgtcaaggacgagtatgagtttgatgaggacgacgagcaggacagggttcctccggtggacgacaagcacctattgaaaaaggactacagaaaagaaacgaaatccaatagttttatctctatacccaaaatggaggttaaaagttacactaaaaataacacgattgcaccaaagaaagcgtcccatcgtatcctgtcagacacgtcggacgaggaggacgcgagtgtcaccgtggggacaggagagaagctgagactctcggcacatacgatattgcctggtagtaagacacgagagccttctaatgccaagcagcagaaggaaaaaaataaagtgaaaaagaagcgaaagaaagaaacaaaaggcagagaggttcgcttcggaaagcggagcgacaagttctgctcctcggagtcggagagcgagtcctcagagagtggggaggatgacagggactctctggggagctctggctgcctcaaggggtccccgctggtgctgaaggacccctccctgttcagctccctctctgcctcctccacctcgtctcacgggagctctgccgcccagaagcagaaccccagccacacagaccagcacaccaagcactggcggacagacaattggaaaaccatttcttccccggcttggtcagaggtcagttctttatcagactccacaaggacgagactgacaagcgagtctgactactcctctgagggctccagtgtggaatcgctgaagccagtgaggaagaggcaggagcacaggaagcgagcctccctgtcggagaagaagagccccttcctgtccagcgcggagggcgctgtccccaaactggacaaggaggggaaagttgtcaaaaaacataaaacaaaacacaaacacaaaaacaaggagaagggacagtgttccatcagccaagagctgaagttgaaaagttttacttacgaatatgaggactccaagcagaagtcagataaggctatactgttagagaatgatctttccactgaaaacaagctaaaagtgttaaagcacgatcgcgaccactttaaaaaagaagagaaacttagcaaaatgaaattagaagaaaaagaatggctctttaaagatgaaaaatcactgaagagaatcaaagacacaaacaaagacatcagcaggtctttccgagaagagaaagaccgttcgaataaagcagaaaaggagagatcgctgaaggaaaagtctccgaaagaagaaaaactgagactgtacaaagaggagagaaagaagaaatcaaaagaccggccctcaaaattagagaagaagaatgatttaaaagaggacaaaatttcaaaagagaaggagaagatttttaaagaagataaagaaaaactcaaaaaagaaaaggtttatagggaagattctgcttttgacgaatattgtaacaaaaatcagtttctggagaatgaagacaccaaatttagcctttctgacgatcagcgagatcggtggttttctgacttgtccgattcatcctttgatttcaaaggggaggacagctgggactcgccagtgacagactacagggacatgaagagcgactctgtggccaagctcatcttggagacggtgaaggaggacagcaaggagaggaggcgggacagccgggcccgggagaagcgagactacagagagcccttcttccgaaagaaggacagggactatttggataaaaactctgagaagaggaaagagcagactgaaaagcataaaagtgtccctggctacctttcggaaaaggacaagaagaggagagagtccgcagaggccgggcgggacagaaaggacgccctggagagctgcaaggagcgcagggacggcagggccaagcccgaggaggtgcaccgggaggagctgaaggagtgtggctgcgagagtggcttcaaggacaagtccgacggcgactttgggaagggcctggagccgtgggaacggcaccacccagcacgagagaaggagaagaaggatggccccgataaggaaaggaaggagaagacaaaaccagaaagatacaaagagaaatccagtgacaaggacaaaagtgagaaatcaatcctggaaaaatgtcagaaggacaaagaatttgataaatgttttaaagagaaaaaagataccaaggaaaaacataaagacacacatggcaaagacaaagaaaggaaagcgtctctcgaccaagggaaagagaagaaggagaaggctttccctgggatcatctcagaagacttctctgaaaaaaaagatgacaagaaaggcaaagagaaaagctggtacatcgcagacatcttcacagatgagagtgaggacgacagagacagctgcatggggagcgggttcaagatgggagaggccagcgacttgccgaggacggacggcctccaggagaaggaggaaggacgggaggcctatgcctccgacagacacaggaagtcttctgacaagcagcaccctgagaggcagaaggacaaggagcccagagacaggagaaaggaccgaggggctgccgacgcggggagagacaaaaaagagaaagtctttgaaaagcacaaggagaagaaggataaagagtccacagaaaagtacaaggacaggaaggacagagcctcagtggactccacgcaagataagaaaaataaacagaagctccccgagaaggctgaaaagaagcacgctgccgaagacaaggctaaaagcaaacacaaagagaagtcggacaaagaacattccaaggagaggaagtcctcgagaagtgccgacgcggaaaaaagcctgcttgaaaagttggaagaagaggctctccatgagtacagagaagactccaacgataaaatcagcgaggtctcctctgacagcttcacggaccgagggcaggagccggggctgactgccttcctggaggtctctttcacggagccacctggagacgacaagccgagggagagcgcctgcctccctgagaagctgaaagagaaggagaggcacagacactcctcatcttcatccaagaagagccacgaccgagagcgagccaagaaagagaaggccgagaagaaagagaagggcgaagattacaaggagggcggtagcaggaaggactccggccagtacgaaaaggacttcctggaggcggatgcttacggagtttcttacaacatgaaagctgacatagaagatgagctagataaaaccattgaattgttttctaccgaaaagaaagataaaaatgattccgagagagaaccttccaagaaaatagaaaaggaactaaagccttatggatctagtgccatcaacatcct

SEQ ID NO: 407728 - DNA, 5001 bp, Homo sapiens
gagggcctttgccggggaggcgccgccgccgagcccgcggccagacgccccatcagtagcgtccgcaccgggagccgcggctctcgcccgagccgtgggcgcgcccgaggggcgggctcgcctcccgccgtccctcgcagctctgccgggcccgagcccgcgccgccgccgccgccgccttgccgctcgggccgcgcggcccgggaagcttgcggccgcgggctgcatgggcagcgcccgcgccccgccgctgagccgtcgcggagccgcgcagccctcggagcacgaatatatacagccctgctctgggacacacctccattggatttaaaagacagtcctcgtcagcactgactttcagctatggaatcgcagacggttgatgatgaagcgccggccgtgtaaatgaagatcgggtgaggagcaggacgatgcccaagggtgggtgccctaaagcaccacagcaggaagagcttcccctcagcagcgacatggtggagaagcagactgggaaaaaggataaagataaagtttctctaaccaagaccccaaaactggagcgtggcgatggcgggaaggaggtgagggagcgagccagcaagcggaagctgcccttcaccgcgggcgccaatggggagcagaaggactcggacacagagaagcagggccctgagcggaagaggattaagaaggagcctgtcacccggaaggccgggctgctgtttggcatggggctgtctggaatccgagccggctaccccctctccgagcgccagcaggtggcccttctcatgcagatgacggccgaggagtctgccaacagcccagtggacacaacaccaaagcacccctcccagtctacagtgtgtcagaagggaacgcccaactctgcctcaaaaaccaaagataaagtgaacaagagaaacgagcgtggagagacccgcctgcaccgagccgccatccgcggggacgcccggcgcatcaaagagctcatcagcgagggggcagacgtcaacgtcaaggacttcgcaggctggacggcgctgcacgaggcctgtaaccggggctactacgacgtcgcgaagcagctgctggctgcaggtgcggaggtgaacaccaagggcctagatgacgacacgcctttgcacgacgctgccaacaacgggcactacaaggtggtgaagctgctgctgcggtacggagggaacccgcagcagagcaacaggaaaggcgagacgccgctgaaagtggccaactcccccacgatggtgaacctcctgttaggcaaaggcacttacacttccagcgaggagagctcgacggagagctcagaagaggaagacgcaccatccttcgcaccttccagttcagtcgacggcaacaacacggactccgagttcgaaaaaggcctcaagcacaaggccaagaacccagagccacagaaggccacggcccccgtcaaggacgagtatgagtttgatgaggacgacgagcaggacagggttcctccggtggacgacaagcacctattgaaaaaggactacagaaaagaaacgaaatccaatagttttatctctatacccaaaatggaggttaaaagttacactaaaaataacacgattgcaccaaagaaagcgtcccatcgtatcctgtcagacacgtcggacgaggaggacgcgagtgtcaccgtggggacaggagagaagctgagactctcggcacatacgatattgcctggtagtaagacacgagagccttctaatgccaagcagcagaaggaaaaaaataaagtgaaaaagaagcgaaagaaagaaacaaaaggcagagaggttcgcttcggaaagcggagcgacaagttctgctcctcggagtcggagagcgagtcctcagagagtggggaggatgacagggactctctggggagctctggctgcctcaaggggtccccgctggtgctgaaggacccctccctgttcagctccctctctgcctcctccacctcgtctcacgggagctctgccgcccagaagcagaaccccagccacacagaccagcacaccaagcactggcggacagacaattggaaaaccatttcttccccggcttggtcagaggtcagttctttatcagactccacaaggacgagactgacaagcgagtctgactactcctctgagggctccagtgtggaatcgctgaagccagtgaggaagaggcaggagcacaggaagcgagcctccctgtcggagaagaagagccccttcctgtccagcgcggagggcgctgtccccaaactggacaaggaggggaaagttgtcaaaaaacataaaacaaaacacaaacacaaaaacaaggagaagggacagtgttccatcagccaagagctgaagttgaaaagttttacttacgaatatgaggactccaagcagaagtcagataaggctatactgttagagaatgatctttccactgaaaacaagctaaaagtgttaaagcacgatcgcgaccactttaaaaaagaagagaaacttagcaaaatgaaattagaagaaaaagaatggctctttaaagatgaaaaatcactgaagagaatcaaagacacaaacaaagacatcagcaggtctttccgagaagagaaagaccgttcgaataaagcagaaaaggagagatcgctgaaggaaaagtctccgaaagaagaaaaactgagactgtacaaagaggagagaaagaagaaatcaaaagaccggccctcaaaattagagaagaagaatgatttaaaagaggacaaaatttcaaaagagaaggagaagatttttaaagaagataaagaaaaactcaaaaaagaaaaggtttatagggaagattctgcttttgacgaatattgtaacaaaaatcagtttctggagaatgaagacaccaaatttagcctttctgacgatcagcgagatcggtggttttctgacttgtccgattcatcctttgatttcaaaggggaggacagctgggactcgccagtgacagactacagggacatgaagagcgactctgtggccaagctcatcttggagacggtgaaggaggacagcaaggagaggaggcgggacagccgggcccgggagaagcgagactacagagagcccttcttccgaaagaaggacagggactatttggataaaaactctgagaagaggaaagagcagactgaaaagcataaaagtgtccctggctacctttcggaaaaggacaagaagaggagagagtccgcagaggccgggcgggacagaaaggacgccctggagagctgcaaggagcgcagggacggcagggccaagcccgaggaggtgcaccgggaggagctgaaggagtgtggctgcgagagtggcttcaaggacaagtccgacggcgactttgggaagggcctggagccgtgggaacggcaccacccagcacgagagaaggagaagaaggatggccccgataaggaaaggaaggagaagacaaaaccagaaagatacaaagagaaatccagtgacaaggacaaaagtgagaaatcaatcctggaaaaatgtcagaaggacaaagaatttgataaatgttttaaagagaaaaaagataccaaggaaaaacataaagacacacatggcaaagacaaagaaaggaaagcgtctctcgaccaagggaaagagaagaaggagaaggctttccctgggatcatctcagaagacttctctgaaaaaaaagatgacaagaaaggcaaagagaaaagctggtacatcgcagacatcttcacagatgagagtgaggacgacagagacagctgcatggggagcgggttcaagatgggagaggccagcgacttgccgaggacggacggcctccaggagaaggaggaaggacgggaggcctatgcctccgacagacacaggaagtcttctgacaagcagcaccctgagaggcagaaggacaaggagcccagagacaggagaaaggaccgaggggctgccgacgcggggagagacaaaaaagagaaagtctttgaaaagcacaaggagaagaaggataaagagtccacagaaaagtacaaggacaggaaggacagagcctcagtggactccacgcaagataagaaaaataaacagaagctccccgagaaggctgaaaagaagcacgctgccgaagacaaggctaaaagcaaacacaaagagaagtcggacaaagaacattccaaggagaggaagtcctcgagaagtgccgacgcggaaaaaagcctgcttgaaaagttggaagaagaggctctccatgagtacagagaagactccaacgataaaatcagcgaggtctcctctgacagcttcacggaccgagggcaggagccggggctgactgccttcctggaggtctctttcacggagccacctggagacgacaagccgagggagagcgcctgcctccctgagaagctgaaagagaaggagaggcacagacactcctcatcttcatccaagaagagccacgaccgagagcgagccaagaaagagaaggccgagaagaaagagaagggcgaagattacaaggagggcggtagcaggaaggactccggccagtacgaaaaggacttcctggaggcggatgcttacggagtttcttacaacatgaaagctgacatagaagatgagctagataaaaccattgaattgttttctaccgaaaagaaagataaaaatgattccgagagagaaccttccaagaaaatagaaaaggaactaaagccttatggatctagtgccatcaacatcctaaaagagaagaagaagagagagaaacacagggagaaatggagagacgagaaggagaggcaccgggacaggcatgcggatgggctgctgcggcatcacagggacgagctcctgcggcatcacagggacgagcagaagcccgccaccagggacaaggacagcccgccccgcgtgctcaaagacaagtccagggacgagggcccga

SEQ ID NO: 407729 - DNA, 4895 bp, Homo sapiens
gagggcctttgccggggaggcgccgccgccgagcccgcggccagacgccccatcagtagcgtccgcaccgggagccgcggctctcgcccgagccgtgggcgcgcccgaggggcgggctcgcctcccgccgtccctcgcagctctgccgggcccgagcccgcgccgccgccgccgccgccttgccgctcgggccgcgcggcccgggaagcttgcggccgcgggctgcatgggcagcgcccgcgccccgccgctgagccgtcgcggagccgcgcagccctcggagcacgaatatatacagccctgctctgggacacacctccattggatttaaaagacagtcctcgtcagcactgactttcagctatggaatcgcagacggttgatgatgaagcgccggccgtgtaaatgaagatcgggtgaggagcaggacgatgcccaagggtgggtgccctaaagcaccacagcaggaagagcttcccctcagcagcgacatggtggagaagcagactgggaaaaaggataaagataaagtttctctaaccaagaccccaaaactggagcgtggcgatggcgggaaggaggtgagggagcgagccagcaagcggaagctgcccttcaccgcgggcgccaatggggagcagaaggactcggacacagatgcctccagcccagtccctgttgtggtgctgcaaggctggtacgctcctcgaagcaccatggcatgagatggaggttcctagaagcaagaagaaagagaagcagggccctgagcggaagaggattaagaaggagcctgtcacccggaaggccgggctgctgtttggcatggggctgtctggaatccgagccggctaccccctctccgagcgccagcaggtggcccttctcatgcagatgacggccgaggagtctgccaacagcccagtggacacaacaccaaagcacccctcccagtctacagtgtgtcagaagggaacgcccaactctgcctcaaaaaccaaagataaagtgaacaagagaaacgagcgtggagagacccgcctgcaccgagccgccatccgcggggacgcccggcgcatcaaagagctcatcagcgagggggcagacgtcaacgtcaaggacttcgcaggctggacggcgctgcacgaggcctgtaaccggggctactacgacgtcgcgaagcagctgctggctgcaggtgcggaggtgaacaccaagggcctagatgacgacacgcctttgcacgacgctgccaacaacgggcactacaaggtggtgaagctgctgctgcggtacggagggaacccgcagcagagcaacaggaaaggcgagacgccgctgaaagtggccaactcccccacgatggtgaacctcctgttaggcaaaggcacttacacttccagcgaggagagctcgacggagagctcagaagaggaagacgcaccatccttcgcaccttccagttcagtcgacggcaacaacacggactccgagttcgaaaaaggcctcaagcacaaggccaagaacccagagccacagaaggccacggcccccgtcaaggacgagtatgagtttgatgaggacgacgagcaggacagggttcctccggtggacgacaagcacctattgaaaaaggactacagaaaagaaacgaaatccaatagttttatctctatacccaaaatggaggttaaaagttacactaaaaataacacgattgcaccaaagaaagcgtcccatcgtatcctgtcagacacgtcggacgaggaggacgcgagtgtcaccgtggggacaggagagaagctgagactctcggcacatacgatattgcctggtagtaagacacgagagccttctaatgccaagcagcagaaggaaaaaaataaagtgaaaaagaagcgaaagaaagaaacaaaaggcagagaggttcgcttcggaaagcggagcgacaagttctgctcctcggagtcggagagcgagtcctcagagagtggggaggatgacagggactctctggggagctctggctgcctcaaggggtccccgctggtgctgaaggacccctccctgttcagctccctctctgcctcctccacctcgtctcacgggagctctgccgcccagaagcagaaccccagccacacagaccagcacaccaagcactggcggacagacaattggaaaaccatttcttccccggcttggtcagaggtcagttctttatcagactccacaaggacgagactgacaagcgagtctgactactcctctgagggctccagtgtggaatcgctgaagccagtgaggaagaggcaggagcacaggaagcgagcctccctgtcggagaagaagagccccttcctgtccagcgcggagggcgctgtccccaaactggacaaggaggggaaagttgtcaaaaaacataaaacaaaacacaaacacaaaaacaaggagaagggacagtgttccatcagccaagagctgaagttgaaaagttttacttacgaatatgaggactccaagcagaagtcagataaggctatactgttagagaatgatctttccactgaaaacaagctaaaagtgttaaagcacgatcgcgaccactttaaaaaagaagagaaacttagcaaaatgaaattagaagaaaaagaatggctctttaaagatgaaaaatcactgaagagaatcaaagacacaaacaaagacatcagcaggtctttccgagaagagaaagaccgttcgaataaagcagaaaaggagagatcgctgaaggaaaagtctccgaaagaagaaaaactgagactgtacaaagaggagagaaagaagaaatcaaaagaccggccctcaaaattagagaagaagaatgatttaaaagaggacaaaatttcaaaagagaaggagaagatttttaaagaagataaagaaaaactcaaaaaagaaaaggtttatagggaagattctgcttttgacgaatattgtaacaaaaatcagtttctggagaatgaagacaccaaatttagcctttctgacgatcagcgagatcggtggttttctgacttgtccgattcatcctttgatttcaaaggggaggacagctgggactcgccagtgacagactacagggacatgaagagcgactctgtggccaagctcatcttggagacggtgaaggaggacagcaaggagaggaggcgggacagccgggcccgggagaagcgagactacagagagcccttcttccgaaagaaggacagggactatttggataaaaactctgagaagaggaaagagcagactgaaaagcataaaagtgtccctggctacctttcggaaaaggacaagaagaggagagagtccgcagaggccgggcgggacagaaaggacgccctggagagctgcaaggagcgcagggacggcagggccaagcccgaggaggtgcaccgggaggagctgaaggagtgtggctgcgagagtggcttcaaggacaagtccgacggcgactttgggaagggcctggagccgtgggaacggcaccacccagcacgagagaaggagaagaaggatggccccgataaggaaaggaaggagaagacaaaaccagaaagatacaaagagaaatccagtgacaaggacaaaagtgagaaatcaatcctggaaaaatgtcagaaggacaaagaatttgataaatgttttaaagagaaaaaagataccaaggaaaaacataaagacacacatggcaaagacaaagaaaggaaagcgtctctcgaccaagggaaagagaagaaggagaaggctttccctgggatcatctcagaagacttctctgaaaaaaaagatgacaagaaaggcaaagagaaaagctggtacatcgcagacatcttcacagatgagagtgaggacgacagagacagctgcatggggagcgggttcaagatgggagaggccagcgacttgccgaggacggacggcctccaggagaaggaggaaggacgggaggcctatgcctccgacagacacaggaagtcttctgacaagcagcaccctgagaggcagaaggacaaggagcccagagacaggagaaaggaccgaggggctgccgacgcggggagagacaaaaaagagaaagtctttgaaaagcacaaggagaagaaggataaagagtccacagaaaagtacaaggacaggaaggacagagcctcagtggactccacgcaagataagaaaaataaacagaagctccccgagaaggctgaaaagaagcacgctgccgaagacaaggctaaaagcaaacacaaagagaagtcggacaaagaacattccaaggagaggaagtcctcgagaagtgccgacgcggaaaaaagcctgcttgaaaagttggaagaagaggctctccatgagtacagagaagactccaacgataaaatcagcgaggtctcctctgacagcttcacggaccgagggcaggagccggggctgactgccttcctggaggtctctttcacggagccacctggagacgacaagccgagggagagcgcctgcctccctgagaagctgaaagagaaggagaggcacagacactcctcatcttcatccaagaagagccacgaccgagagcgagccaagaaagagaaggccgagaagaaagagaagggcgaagattacaaggagggcggtagcaggaaggactccggccagtacgaaaaggacttcctggaggcggatgcttacggagtttcttacaacatgaaagctgacatagaagatgagctagataaaaccattgaattgttttctaccgaaaagaaagataaaaatgattccgagagagaaccttccaagaaaatagaaaaggaactaaagccttatggatctagtgccatcaacatcct

SEQ ID NO: 407730 - DNA, 3049 bp, Homo sapiens
gagggcctttgccggggaggcgccgccgccgagcccgcggccagacgccccatcagtagcgtccgcaccgggagccgcggctctcgcccgagccgtgggcgcgcccgaggggcgggctcgcctcccgccgtccctcgcagctctgccgggcccgagcccgcgccgccgccgccgccgccttgccgctcgggccgcgcggcccgggaagcttgcggccgcgggctgcatgggcagcgcccgcgccccgccgctgagccgtcgcggagccgcgcagccctcggagcacgaatatatacagccctgctctgggacacacctccattggatttaaaagacagtcctcgtcagcactgactttcagctatggaatcgcagacggttgatgatgaagcgccggccgtgtaaatgaagatcgggtgaggagcaggacgatgcccaagggtgggtgccctaaagcaccacagcaggaagagcttcccctcagcagcgacatggtggagaagcagactgggaaaaaggataaagataaagtttctctaaccaagaccccaaaactggagcgtggcgatggcgggaaggaggtgagggagcgagccagcaagcggaagctgcccttcaccgcgggcgccaatggggagcagaaggactcggacacagagaagcagggccctgagcggaagaggattaagaaggagcctgtcacccggaaggccgggctgctgtttggcatggggctgtctggaatccgagccggctaccccctctccgagcgccagcaggtggcccttctcatgcagatgacggccgaggagtctgccaacagcccagtggacacaacaccaaagcacccctcccagtctacagtgtgtcagaagggaacgcccaactctgcctcaaaaaccaaagataaagtgaacaagagaaacgagcgtggagagacccgcctgcaccgagccgccatccgcggggacgcccggcgcatcaaagagctcatcagcgagggggcagacgtcaacgtcaaggacttcgcaggctggacggcgctgcacgaggcctgtaaccggggctactacgacgtcgcgaagcagctgctggctgcaggtgcggaggtgaacaccaagggcctagatgacgacacgcctttgcacgacgctgccaacaacgggcactacaagggttggcatccccccgttcttcacacatccggcctgtcctggcatctgggtggttctgtagctttgtttccccgtagctagccggttccatgatgtggggcacaggaaagcgagttttcgccttgcccaccctcaaggccgagctgtgccctctgtctgcccccagctttccccttctgggtcagcctggacggcctctcacaggtttcccagcaagtgccatctatgaaaggctcgtatccgctagccgtgtaggtctggttggatttgagcaggtgaaggattacaccaagtggaaggaggcctgcaggagttgctgccggtccccgtcaccactgtgggactgttagacctgcaaggcagacccaccctcgtctggaatgaggtaacaccaagaggtgtggccagtgcacagaaccatagactcaagctttagaaagtggccattgtggccggcccaggagcagtgggcactgagaggtctcagcctctgtgggggtcgagagaggtcgtggtgtgcctgacagccccgtcctgccggaaagcaggggtgctgcctggagatgcggcgggtctcactgatgtcttcgtcagagctccgtggagagcccctggttgcaggcaggacagcaaggctgaggggtcacacggggccacatctgctggtgcccgtcgtgctcctctgcagcaagcccagcctggccattgctggaggtcctggagcccacagtgccttggccttaaagagctcacttgagaaacggcttgttccggtggggtggggggtggattgaagactctgagacgagcagggaactcagaacactgagtccctatttgatgttaaaatatgaccgttaaacttctgggtaagataatgaatggcactatggtttatactgtttctgttttatgggctcttccagagacgtgaactggaaaaggctctgcagtgtctgggattcgctcagtgctgcaggggagggcaggtgtgaggggaatggccctggagggtgatggggctggggcatccgatgcagctttatagttctgtaattaccacttttaaactttttattacgaaaaatgtcaaggaccctggaattacggtgaggtaggcaggataatggcccccaagatgcccgtgttgtgacccccagaccttgtgagtgcctcacatggggagattgtcctaggtcatcttgcaggcccagggcagccccatgggcccttaaagcttgagagcctttcctgctgagtctgagagatgccagaagcaggagaggttagaacccgaggagggccgcacctgcgctgctggccttagaggagggccgaggagtgtggtggcccctaagcagctgggactggggacctccgtcccagccctgcaagaaactgaattctgccagcagcccccatgatggaggaaaggaaggatcctgccctgccagcaccttgacctctgacctccacaattgtaagcctgaggttttgtgtagtcaccatagaaaactcacacacataagaactctgtactgattcaacaatagaacatgtcacacacgaactggaaactgattctgtgggcgacaagagtctatagtaaacgttatgacagattctttgaatgcgctaatctcagactggactaaagttgggattaaatttaatttgtacttgagttcagtgcattgctgttctgggcataggaaatccaggttgctggtgatgaacagctgaaaagagctgtgtcaccatggttgtctctgtcagtcatgtgaccacccttacccttgtaaaatcaagcaagggagagattattttctaatgtaaatgaaaataaaaaataaagcagcttgcagaaaaaaaaa

SEQ ID NO: 407731 - DNA, 4280 bp, Homo sapiens
gagggcctttgccggggaggcgccgccgccgagcccgcggccagacgccccatcagtagcgtccgcaccgggagccgcggctctcgcccgagccgtgggcgcgcccgaggggcgggctcgcctcccgccgtccctcgcagctctgccgggcccgagcccgcgccgccgccgccgccgccttgccgctcgggccgcgcggcccgggaagcttgcggccgcgggctgcatgggcagcgcccgcgccccgccgctgagccgtcgcggagccgcgcagccctcggagcacgaatatatacagccctgctctgggacacacctccattggatttaaaagacagtcctcgtcagcactgactttcagctatggaatcgcagacggttgatgatgaagcgccggccgtgtaaatgaagatcgggtgaggagcaggacgatgcccaagggtgggtgccctaaagcaccacagcaggaagagcttcccctcagcagcgacatggtggagaagcagactgggaaaaaggataaagataaagtttctctaaccaagaccccaaaactggagcgtggcgatggcgggaaggaggtgagggagcgagccagcaagcggaagctgcccttcaccgcgggcgccaatggggagcagaaggactcggacacaggtggtgaagctgctgctgcggtacggagggaacccgcagcagagcaacaggaaaggcgagacgccgctgaaagtggccaactcccccacgatggtgaacctcctgttaggcaaaggcacttacacttccagcgaggagagctcgacggagagctcagaagaggaagacgcaccatccttcgcaccttccagttcagtcgacggcaacaacacggactccgagttcgaaaaaggcctcaagcacaaggccaagaacccagagccacagaaggccacggcccccgtcaaggacgagtatgagtttgatgaggacgacgagcaggacagggttcctccggtggacgacaagcacctattgaaaaaggactacagaaaagaaacgaaatccaatagttttatctctatacccaaaatggaggttaaaagttacactaaaaataacacgattgcaccaaagaaagcgtcccatcgtatcctgtcagacacgtcggacgaggaggacgcgagtgtcaccgtggggacaggagagaagctgagactctcggcacatacgatattgcctggtagtaagacacgagagccttctaatgccaagcagcagaaggaaaaaaataaagtgaaaaagaagcgaaagaaagaaacaaaaggcagagaggttcgcttcggaaagcggagcgacaagttctgctcctcggagtcggagagcgagtcctcagagagtggggaggatgacagggactctctggggagctctggctgcctcaaggggtccccgctggtgctgaaggacccctccctgttcagctccctctctgcctcctccacctcgtctcacgggagctctgccgcccagaagcagaaccccagccacacagaccagcacaccaagcactggcggacagacaattggaaaaccatttcttccccggcttggtcagaggtcagttctttatcagactccacaaggacgagactgacaagcgagtctgactactcctctgagggctccagtgtggaatcgctgaagccagtgaggaagaggcaggagcacaggaagcgagcctccctgtcggagaagaagagccccttcctgtccagcgcggagggcgctgtccccaaactggacaaggaggggaaagttgtcaaaaaacataaaacaaaacacaaacacaaaaacaaggagaagggacagtgttccatcagccaagagctgaagttgaaaagttttacttacgaatatgaggactccaagcagaagtcagataaggctatactgttagagaatgatctttccactgaaaacaagctaaaagtgttaaagcacgatcgcgaccactttaaaaaagaagagaaacttagcaaaatgaaattagaagaaaaagaatggctctttaaagatgaaaaatcactgaagagaatcaaagacacaaacaaagacatcagcaggtctttccgagaagagaaagaccgttcgaataaagcagaaaaggagagatcgctgaaggaaaagtctccgaaagaagaaaaactgagactgtacaaagaggagagaaagaagaaatcaaaagaccggccctcaaaattagagaagaagaatgatttaaaagaggacaaaatttcaaaagagaaggagaagatttttaaagaagataaagaaaaactcaaaaaagaaaaggtttatagggaagattctgcttttgacgaatattgtaacaaaaatcagtttctggagaatgaagacaccaaatttagcctttctgacgatcagcgagatcggtggttttctgacttgtccgattcatcctttgatttcaaaggggaggacagctgggactcgccagtgacagactacagggacatgaagagcgactctgtggccaagctcatcttggagacggtgaaggaggacagcaaggagaggaggcgggacagccgggcccgggagaagcgagactacagagagcccttcttccgaaagaaggacagggactatttggataaaaactctgagaagaggaaagagcagactgaaaagcataaaagtgtccctggctacctttcggaaaaggacaagaagaggagagagtccgcagaggccgggcgggacagaaaggacgccctggagagctgcaaggagcgcagggacggcagggccaagcccgaggaggtgcaccgggaggagctgaaggagtgtggctgcgagagtggcttcaaggacaagtccgacggcgactttgggaagggcctggagccgtgggaacggcaccacccagcacgagagaaggagaagaaggatggccccgataaggaaaggaaggagaagacaaaaccagaaagatacaaagagaaatccagtgacaaggacaaaagtgagaaatcaatcctggaaaaatgtcagaaggacaaagaatttgataaatgttttaaagagaaaaaagataccaaggaaaaacataaagacacacatggcaaagacaaagaaaggaaagcgtctctcgaccaagggaaagagaagaaggagaaggctttccctgggatcatctcagaagacttctctgaaaaaaaagatgacaagaaaggcaaagagaaaagctggtacatcgcagacatcttcacagatgagagtgaggacgacagagacagctgcatggggagcgggttcaagatgggagaggccagcgacttgccgaggacggacggcctccaggagaaggaggaaggacgggaggcctatgcctccgacagacacaggaagtcttctgacaagcagcaccctgagaggcagaaggacaaggagcccagagacaggagaaaggaccgaggggctgccgacgcggggagagacaaaaaagagaaagtctttgaaaagcacaaggagaagaaggataaagagtccacagaaaagtacaaggacaggaaggacagagcctcagtggactccacgcaagataagaaaaataaacagaagctccccgagaaggctgaaaagaagcacgctgccgaagacaaggctaaaagcaaacacaaagagaagtcggacaaagaacattccaaggagaggaagtcctcgagaagtgccgacgcggaaaaaagcctgcttgaaaagttggaagaagaggctctccatgagtacagagaagactccaacgataaaatcagcgaggtctcctctgacagcttcacggaccgagggcaggagccggggctgactgccttcctggaggtctctttcacggagccacctggagacgacaagccgagggagagcgcctgcctccctgagaagctgaaagagaaggagaggcacagacactcctcatcttcatccaagaagagccacgaccgagagcgagccaagaaagagaaggccgagaagaaagagaagggcgaagattacaaggagggcggtagcaggaaggactccggccagtacgaaaaggacttcctggaggcggatgcttacggagtttcttacaacatgaaagctgacatagaagatgagctagataaaaccattgaattgttttctaccgaaaagaaagataaaaatgattccgagagagaaccttccaagaaaatagaaaaggaactaaagccttatggatctagtgccatcaacatcct

SEQ ID NO: 407732 - DNA, 2974 bp, Homo sapiens
gagggcctttgccggggaggcgccgccgccgagcccgcggccagacgccccatcagtagcgtccgcaccgggagccgcggctctcgcccgagccgtgggcgcgcccgaggggcgggctcgcctcccgccgtccctcgcagctctgccgggcccgagcccgcgccgccgccgccgccgccttgccgctcgggccgcgcggcccgggaagcttgcggccgcgggctgcatgggcagcgcccgcgccccgccgctgagccgtcgcggagccgcgcagccctcggagcacgcccgtgcagcctgccaggactcttccagacacgggatttgtcggtgaacaacgcagagctgatgcagacataatatatacagccctgctctgggacacacctccattggatttaaaagacagtcctcgtcagcactgactttcagctatggaatcggataaagataaagtttctctaaccaagaccccaaaactggagcgtggcgatggcgggaaggaggtgagggagcgagccagcaagcggaagctgcccttcaccgcgggcgccaatggggagcagaaggactcggacacagagaagcagggccctgagcggaagaggattaagaaggagcctgtcacccggaaggccgggctgctgtttggcatggggctgtctggaatccgagccggctaccccctctccgagcgccagcaggtggcccttctcatgcagatgacggccgaggagtctgccaacagcccagtggacacaacaccaaagcacccctcccagtctacagtgtgtcagaagggaacgcccaactctgcctcaaaaaccaaagataaagtgaacaagagaaacgagcgtggagagacccgcctgcaccgagccgccatccgcggggacgcccggcgcatcaaagagctcatcagcgagggggcagacgtcaacgtcaaggacttcgcaggctggacggcgctgcacgaggcctgtaaccggggctactacgacgtcgcgaagcagctgctggctgcaggtgcggaggtgaacaccaagggcctagatgacgacacgcctttgcacgacgctgccaacaacgggcactacaagggttggcatccccccgttcttcacacatccggcctgtcctggcatctgggtggttctgtagctttgtttccccgtagctagccggttccatgatgtggggcacaggaaagcgagttttcgccttgcccaccctcaaggccgagctgtgccctctgtctgcccccagctttccccttctgggtcagcctggacggcctctcacaggtttcccagcaagtgccatctatgaaaggctcgtatccgctagccgtgtaggtctggttggatttgagcaggtgaaggattacaccaagtggaaggaggcctgcaggagttgctgccggtccccgtcaccactgtgggactgttagacctgcaaggcagacccaccctcgtctggaatgaggtaacaccaagaggtgtggccagtgcacagaaccatagactcaagctttagaaagtggccattgtggccggcccaggagcagtgggcactgagaggtctcagcctctgtgggggtcgagagaggtcgtggtgtgcctgacagccccgtcctgccggaaagcaggggtgctgcctggagatgcggcgggtctcactgatgtcttcgtcagagctccgtggagagcccctggttgcaggcaggacagcaaggctgaggggtcacacggggccacatctgctggtgcccgtcgtgctcctctgcagcaagcccagcctggccattgctggaggtcctggagcccacagtgccttggccttaaagagctcacttgagaaacggcttgttccggtggggtggggggtggattgaagactctgagacgagcagggaactcagaacactgagtccctatttgatgttaaaatatgaccgttaaacttctgggtaagataatgaatggcactatggtttatactgtttctgttttatgggctcttccagagacgtgaactggaaaaggctctgcagtgtctgggattcgctcagtgctgcaggggagggcaggtgtgaggggaatggccctggagggtgatggggctggggcatccgatgcagctttatagttctgtaattaccacttttaaactttttattacgaaaaatgtcaaggaccctggaattacggtgaggtaggcaggataatggcccccaagatgcccgtgttgtgacccccagaccttgtgagtgcctcacatggggagattgtcctaggtcatcttgcaggcccagggcagccccatgggcccttaaagcttgagagcctttcctgctgagtctgagagatgccagaagcaggagaggttagaacccgaggagggccgcacctgcgctgctggccttagaggagggccgaggagtgtggtggcccctaagcagctgggactggggacctccgtcccagccctgcaagaaactgaattctgccagcagcccccatgatggaggaaaggaaggatcctgccctgccagcaccttgacctctgacctccacaattgtaagcctgaggttttgtgtagtcaccatagaaaactcacacacataagaactctgtactgattcaacaatagaacatgtcacacacgaactggaaactgattctgtgggcgacaagagtctatagtaaacgttatgacagattctttgaatgcgctaatctcagactggactaaagttgggattaaatttaatttgtacttgagttcagtgcattgctgttctgggcataggaaatccaggttgctggtgatgaacagctgaaaagagctgtgtcaccatggttgtctctgtcagtcatgtgaccacccttacccttgtaaaatcaagcaagggagagattattttctaatgtaaatgaaaataaaaaataaagcagcttgcagaaaaaaaaa

SEQ ID NO: 407733 - DNA, 3059 bp, Homo sapiens
gagggcctttgccggggaggcgccgccgccgagcccgcggccagacgccccatcagtagcgtccgcaccgggagccgcggctctcgcccgagccgtgggcgcgcccgaggggcgggctcgcctcccgccgtccctcgcagctctgccgggcccgagcccgcgccgccgccgccgccgccttgccgctcgggccgcgcggcccgggaagcttgcggccgcgggctgcatgggcagcgcccgcgccccgccgctgagccgtcgcggagccgcgcagccctcggagcacgaatatatacagccctgctctgggacacacctccattggatttaaaagacagtcctcgtcagcactgactttcagctatggaatcgcagacggttgatgatgaagcgccggccgtgtaaatgaagatcgggtgaggagcaggacgatgcccaagggtgggtgccctaaagcaccacagcaggaagagcttcccctcagcagcgacatggtggagaagcagactgggaaaaaggataaagataaagtttctctaaccaagaccccaaaactggagcgtggcgatggcgggaaggaggtgagggagcgagccagcaagcggaagctgcccttcaccgcgggcgccaatggggagcagaaggactcggacacagagaagcagggccctgagcggaagaggattaagaaggagcctgtcacccggaaggccgggctgctgtttggcatggggctgtctggaatccgagccggctaccccctctccgagcgccagcaggtggcccttctcatgcagatgacggccgaggagtctgccaacagcccagtggacacaacaccaaagcacccctcccagtctacagtgtgtcagaagggaacgcccaactctgcctcaaaaaccaaagataaagtgaacaagagaaacgagcgtggagagacccgcctgcaccgagccgccatccgcggggacgcccggcgcatcaaagagctcatcagcgagggggcagacgtcaacgtcaaggacttcgcaggctggacggcgctgcacgaggcctgtaaccggggctactacgacgtcgcgaagcagctgctggctgcaggtgcggaggtgaacaccaagggcctagatgacgacacgcctttgcacgacgctgccaacaacgggcactacaagggttggcatccccccgttcttcacacatccggcctgtcctggcatctgggtggttctgtagctttgtttccccgtagctagccggttccatgatgtggggcacaggaaagcgagttttcgccttgcccaccctcaaggccgagctgtgccctctgtctgcccccagctttccccttctgggtcagcctggacggcctctcacaggtttcccagcaagtgccatctatgaaaggctcgtatccgctagccgtgtaggtctggttggatttgagcaggtgaaggattacaccaagtggaaggaggcctgcaggagttgctgccggtccccgtcaccactgtgggactgttagacctgcaaggcagacccaccctcgtctggaatgaggtaacaccaagaggtgtggccagtgcacagaaccatagactcaagctttagaaagtggccattgtggccggcccaggagcagtgggcactgagaggtctcagcctctgtgggggtcgagagaggtcgtggtgtgcctgacagccccgtcctgccggaaagcaggggtgctgcctggagatgcggcgggtctcactgatgtcttcgtcagagctccgtggagagcccctggttgcaggcaggacagcaaggctgaggggtcacacggggccacatctgctggtgcccgtcgtgctcctctgcagcaagcccagcctggccattgctggaggtcctggagcccacagtgccttggccttaaagagctcacttgagaaacggcttgttccggtggggtggggggtggattgaagactctgagacgagcagggaactcagaacactgagtccctatttgatgttaaaatatgaccgttaaacttctgggtaagataatgaatggcactatggtttatactgtttctgttttatgggctcttccagagacgtgaactggaaaaggctctgcagtgtctgggattcgctcagtgctgcaggggagggcaggtgtgaggggaatggccctggagggtgatggggctggggcatccgatgcagctttatagttctgtaattaccacttttaaactttttattacgaaaaatgtcaaggaccctggaattacggtgaggtaggcaggataatggcccccaagatgcccgtgttgtgacccccagaccttgtgagtgcctcacatggggagattgtcctaggtcatcttgcaggcccagggcagccccatgggcccttaaagcttgagagcctttcctgctgagtctgagagatgccagaagcaggagaggttagaacccgaggagggccgcacctgcgctgctggccttagaggagggccgaggagtgtggtggcccctaagcagctgggactggggacctccgtcccagccctgcaagaaactgaattctgccagcagcccccatgatggaggaaaggaaggatcctgccctgccagcaccttgacctctgacctccacaattgtaagcctgaggttttgtgtagtcaccatagaaaactcacacacataagaactctgtactgattcaacaatagaacatgtcacacacgaactggaaactgattctgtgggcgacaagagtctatagtaaacgttatgacagattctttgaatgcgctaatctcagactggactaaagttgggattaaatttaatttgtacttgagttcagtgcattgctgttctgggcataggaaatccaggttgctggtgatgaacagctgaaaagagctgtgtcaccatggttgtctctgtcagtcatgtgaccacccttacccttgtaaaatcaatgcgatagcggagatgagggatagctactgattgataacatcgaaagagtcttcaaataaatggcgagctaccaga

SEQ ID NO: 407734 - DNA, 2554 bp, Homo sapiens
gagggcctttgccggggaggcgccgccgccgagcccgcggccagacgccccatcagtagcgtccgcaccgggagccgcggctctcgcccgagccgtgggcgcgcccgaggggcgggctcgcctcccgccgtccctcgcagctctgccgggcccgagcccgcgccgccgccgccgccgccttgccgctcgggccgcgcggcccgggaagcttgcggccgcgggctgcatgggcagcgcccgcgccccgccgctgagccgtcgcggagccgcgcagccctcggagcacgaatatatacagccctgctctgggacacacctccattggatttaaaagacagtcctcgtcagcactgactttcagctatggaatcgcagacggttgatgatgaagcgccggccgtgtaaatgaagatcgggtgaggagcaggacgatgcccaagggtgggtgccctaaagcaccacagcaggaagagcttcccctcagcagcgacatggtggagaagcagactgggaaaaaggataaagataaagtttctctaaccaagaccccaaaactggagcgtggcgatggcgggaaggaggtgagggagcgagccagcaagcggaagctgcccttcaccgcgggcgccaatggggagcagaaggactcggacacagagaagcagggccctgagcggaagaggattaagaaggagcctgtcacccggaaggccgggctgctgtttggcatggggctgtctggaatccgagccggctaccccctctccgagcgccagcaggtggcccttctcatgcagatgacggccgaggagtctgccaacagcccagtggacacaacaccaaagcacccctcccagtctacagtgtgtcagaagggaacgcccaactctgcctcaaaaaccaaagataaagtgaacaagagaaacgagcgtggagagacccgcctgcaccgagccgccatccgcggggacgcccggcgcatcaaagagctcatcagcgagggggcagacgtcaacgtcaaggacttcgcaggctggacggcgctgcacgaggcctgtaaccggggctactacgacgtcgcgaagcagctgctggctgcaggtgcggaggtgaacaccaagggcctagatgacgacacgcctttgcacgacgctgccaacaacgggcactacaagatcgcaccccctccctccctggcggagcccctgaaggagctgttcaggcagcaggaggccgtccggggaaagctgcgtctacagcacagcatcgagcgggagaagctgatcgtatcctgtgagcaggagattctgcgggttcactgccgggcggccaggaccatcgccaaccaggcagtgccattcagcgcctgcacgatgctgctggactccgaggtctacaacatgcccctggagagccagggtgacgagaacaagtcagtgcgcgaccgtttcaacgcccgccagttcatctcctggctccaggacgtggatgacaagtatgaccgcatgaagacttgcctcctcatgcggcagcagcacgaggccgcggcctgaacgccgtgcagaggatggagtggcagctgaaggtgcaggaactggaccccgccgggcacaagtccctgtgcgtgaacgaggtgccctccttctacgtgcccatggtcgacgtcaacgacgactttgtattgttgccggcatgacaccgcgggacggccgcaggacgcaggcgagggccgcacggctgcccaggactgctgctgagccccaggggcggaggagggagcgccctgtccacccgggcggggagagaccccgagagagactgcacttggccacagcgcctccatcccttccagactggtccagacgtcggggaggtgaaacacgtctcttctctaccagctgccgcggcgggggcaaagcccccagagcctcactggccccggcgggatgaggagaccatgccgggcgcgcacacacggcagcttctgtttgaaaacggcgaccttcgggcccttttctccagcaactgcagaggcatttcaggagttggagaacggagtacatttttaaaattttttgttccattctgatcaactaaagaaaattaaggtgtccacctctcacaaacagtgacctgcaggtcggaggggcaggagccccatcccagccgtggttctgttgccgccgagctgcgacggcctcagactgggcttcagacctggtgcggagccaggcggagggacacagagccaggactcccagccgtattgaaatggagtcaaatccgcgtggtttgtatcttctttcctttaatcttgggcattttgtttctctttctgagaacgtaacttgaaacactacagagccaataatcatataaaaagtgtatccgtaaacgctgtacagttttatataccttcacaatgtacttttgctgccttctagataatttattttgcaacacattactgcacagttgtaaataacttatgtactgtaacatcactttcagttatgtgtaaagaaataaataaattaattaaaatgctctttgt

SEQ ID NO: 407735 - DNA, 2499 bp, Homo sapiens
atcggttgatctagaggatcccagttcgacggagactctcctcttttgtcctggctacctttcggaaaaggacaagaagaggagagagtccgcagaggccgggcgggacagaaaggacgccctgtgagagctgcaagggagcgcagggacggcagggccaagcccgaggaggcgcaccgggaggagctgaaggagtgtggctgcgagagtggcttcaaggacaagtccgacggcgactttgggaagggcctggagccgtgggaacggcaccacccagcacgagagaaggagaagaaggatggccccgataaggaaaggaaggagaagacaaaaccagaaagaccgttcgaataaagcagaaaaggagagatcgctgaaggaaaagtctccgaaagaagaaaaactgagactgtacaaagaggagagaaagaagaaatcaaaagaccggccctcaaaattagagaagaagaatgatttaaaagaggacaaaatttcaaaagagaaggagaagatttttaaagaagataaagaaaaactcaaaaaagaaaaggtttatagggaagattctgcttttgacgaatattgtaacaaaaatcagtttctggagaatgaagacaccaaatttagcctttctgacgatcagcgagatcggtggttttctgacttgtccgattcatcctttgatttcaaaggggaggacagctgggactcgccagtgacagactacagggacatgaagagcgactctgtggccaagctcatcttggagacggtgaaggaggacagcaaggagaggaggcgggacagccgggcccgggagaagcgagactacagagagcccttcttccgaaagaaggacagggactatttggataaaaactctgagaagaggaaagagcagactgaaaagcataaaagtgtccctggctacctttcggaaaaggacaagaagaggagagagtccgcagaggccgggcgggacagaaaggacgccctggagagctgcaaggagcgcagggacggcagggccaagcccgaggaggtgcaccgggaggagctgaaggagtgtggctgcgagagtggcttcaaggacaagtccgacggcgactttgggaagggcctggagccgtgggaacggcaccacccagcacgagagaaggagaagaaggatggccccgataaggaaaggaaggagaagacaaaaccagaaagatacaaagagaaatccagtgacaaggacaaaagtgagaaatcaatcctggaaaaatgtcagaaggacaaagaatttgataaatgttttaaagagaaaaaagataccaaggaaaaacataaagacacacatggcaaagacaaagaaaggaaagcgtctctcgaccaagggaaagagaagaaggagaaggctttccctgggatcatctcagaagacttctctgaaaaaaaagatgacaagaaaggcaaagagaaaagctggtacatcgcagacatcttcacagatgagagtgaggacgacagagacagctgcatggggagcgggttcaagatgggagaggccagcgacttgccgaggacggacggcctccaggagaaggaggaaggacgggaggcctatgcctccgacagacacaggaagtcttctgacaagcagcaccctgagaggcagaaggacaaggagcccagagacaggagaaaggaccgaggggctgccgacgcggggagagacaaaaaagagaaagtctttgaaaagcacaaggagaagaaggataaagagtccacagaaaagtacaaggacaggaaggacagagcctcagtggactccacgcaagataagaaaaataaacagaagctccccgagaaggctgaaaagaagcacgctgccgaagacaaggctaaaagcaaacacaaagagaagtcggacaaagaacattccaaggagaggaagtcctcgagaagtgccgacgcggaaaaaagcctgcttgaaaagttggaagaagaggctctccatgagtacagagaagactccaacgataaaatcagcgaggtctcctctgacagcttcacggaccgagggcaggagccggggctgactgccttcctggaggtctctttcacggagccacctggagacgacaagccgagggagagcgcctgcctccctgagaagctgaaagagaaggagaggcacagacactcctcatcttcatccaagaagagccacgaccgagagcgagccaagaaagagaaggccgagaagaaagagaagggcgaagattacaaggagggcggtagcaggaaggactccggccagtacgaaaaggacttcctggaggcggatgcttacggagtttcttacaacatgaaagctgacatagaagatgagctagataaaaccattgaattgttttctaccgaaaagaaagataaaaatgattccgagagagaaccttccaagaaaatagaaaaggaactaaagccttatggatctagtgccatcaacatcct

SEQ ID NO: 407736 - DNA, 2271 bp, Homo sapiens
aaagatacaaagagaaatccagtgacaaggacaaaagtgagaaatcaatcctggaaaaatgtcagaaggacaaagaatttgataaatgttggcacgaggaaaaaagataccaaggaaaaacataaagacacacatggagagatcgctgaaggaaaagtctccgaaagaagaaaaactgagactgtacaaagaggagagaaagaagaaatcaaaagaccggccctcaaaattagagaagaagaatgatttaaaagaggacaaaatttcaaaagagaaggagaagatttttaaagaagataaagaaaaactcaaaaaagaaaaggtttatagggaagattctgcttttgacgaatattgtaacaaaaatcagtttctggagaatgaagacaccaaatttagcctttctgacgatcagcgagatcggtggttttctgacttgtccgattcatcctttgatttcaaaggggaggacagctgggactcgccagtgacagactacagggacatgaagagcgactctgtggccaagctcatcttggagacggtgaaggaggacagcaaggagaggaggcgggacagccgggcccgggagaagcgagactacagagagcccttcttccgaaagaaggacagggactatttggataaaaactctgagaagaggaaagagcagactgaaaagcataaaagtgtccctggctacctttcggaaaaggacaagaagaggagagagtccgcagaggccgggcgggacagaaaggacgccctggagagctgcaaggagcgcagggacggcagggccaagcccgaggaggtgcaccgggaggagctgaaggagtgtggctgcgagagtggcttcaaggacaagtccgacggcgactttgggaagggcctggagccgtgggaacggcaccacccagcacgagagaaggagaagaaggatggccccgataaggaaaggaaggagaagacaaaaccagaaagatacaaagagaaatccagtgacaaggacaaaagtgagaaatcaatcctggaaaaatgtcagaaggacaaagaatttgataaatgttttaaagagaaaaaagataccaaggaaaaacataaagacacacatggcaaagacaaagaaaggaaagcgtctctcgaccaagggaaagagaagaaggagaaggctttccctgggatcatctcagaagacttctctgaaaaaaaagatgacaagaaaggcaaagagaaaagctggtacatcgcagacatcttcacagatgagagtgaggacgacagagacagctgcatggggagcgggttcaagatgggagaggccagcgacttgccgaggacggacggcctccaggagaaggaggaaggacgggaggcctatgcctccgacagacacaggaagtcttctgacaagcagcaccctgagaggcagaaggacaaggagcccagagacaggagaaaggaccgaggggctgccgacgcggggagagacaaaaaagagaaagtctttgaaaagcacaaggagaagaaggataaagagtccacagaaaagtacaaggacaggaaggacagagcctcagtggactccacgcaagataagaaaaataaacagaagctccccgagaaggctgaaaagaagcacgctgccgaagacaaggctaaaagcaaacacaaagagaagtcggacaaagaacattccaaggagaggaagtcctcgagaagtgccgacgcggaaaaaagcctgcttgaaaagttggaagaagaggctctccatgagtacagagaagactccaacgataaaatcagcgaggtctcctctgacagcttcacggaccgagggcaggagccggggctgactgccttcctggaggtctctttcacggagccacctggagacgacaagccgagggagagcgcctgcctccctgagaagctgaaagagaaggagaggcacagacactcctcatcttcatccaagaagagccacgaccgagagcgagccaagaaagagaaggccgagaagaaagagaagggcgaagattacaaggagggcggtagcaggaaggactccggccagtacgaaaaggacttcctggaggcggatgcttacggagtttcttacaacatgaaagctgacatagaagatgagctagataaaaccattgaattgttttctaccgaaaagaaagataaaaatgattccgagagagaaccttccaagaaaatagaaaaggaactaaagccttatggatctagtgccatcaacatcct

SEQ ID NO: 407737 - DNA, 2164 bp, Homo sapiens
gagctcggtaccccacaccacctgagtcagagagatcgctgaaggaaaagtctccgaaagaagaaaaactgagactgtacaaagaggagagaaagaagaaatcaaaagaccggccctcaaaattagagaagaagaatgatttaaaagaggacaaaatttcaaaagagaaggagaagatttttaaagaagataaagaaaaactcaaaaaagaaaaggtttatagggaagattctgcttttgacgaatattgtaacaaaaatcagtttctggagaatgaagacaccaaatttagcctttctgacgatcagcgagatcggtggttttctgacttgtccgattcatcctttgatttcaaaggggaggacagctgggactcgccagtgacagactacagggacatgaagagcgactctgtggccaagctcatcttggagacggtgaaggaggacagcaaggagaggaggcgggacagccgggcccgggagaagcgagactacagagagcccttcttccgaaagaaggacagggactatttggataaaaactctgagaagaggaaagagcagactgaaaagcataaaagtgtccctggctacctttcggaaaaggacaagaagaggagagagtccgcagaggccgggcgggacagaaaggacgccctggagagctgcaaggagcgcagggacggcagggccaagcccgaggaggtgcaccgggaggagctgaaggagtgtggctgcgagagtggcttcaaggacaagtccgacggcgactttgggaagggcctggagccgtgggaacggcaccacccagcacgagagaaggagaagaaggatggccccgataaggaaaggaaggagaagacaaaaccagaaagatacaaagagaaatccagtgacaaggacaaaagtgagaaatcaatcctggaaaaatgtcagaaggacaaagaatttgataaatgttttaaagagaaaaaagataccaaggaaaaacataaagacacacatggcaaagacaaagaaaggaaagcgtctctcgaccaagggaaagagaagaaggagaaggctttccctgggatcatctcagaagacttctctgaaaaaaaagatgacaagaaaggcaaagagaaaagctggtacatcgcagacatcttcacagatgagagtgaggacgacagagacagctgcatggggagcgggttcaagatgggagaggccagcgacttgccgaggacggacggcctccaggagaaggaggaaggacgggaggcctatgcctccgacagacacaggaagtcttctgacaagcagcaccctgagaggcagaaggacaaggagcccagagacaggagaaaggaccgaggggctgccgacgcggggagagacaaaaaagagaaagtctttgaaaagcacaaggagaagaaggataaagagtccacagaaaagtacaaggacaggaaggacagagcctcagtggactccacgcaagataagaaaaataaacagaagctccccgagaaggctgaaaagaagcacgctgccgaagacaaggctaaaagcaaacacaaagagaagtcggacaaagaacattccaaggagaggaagtcctcgagaagtgccgacgcggaaaaaagcctgcttgaaaagttggaagaagaggctctccatgagtacagagaagactccaacgataaaatcagcgaggtctcctctgacagcttcacggaccgagggcaggagccggggctgactgccttcctggaggtctctttcacggagccacctggagacgacaagccgagggagagcgcctgcctccctgagaagctgaaagagaaggagaggcacagacactcctcatcttcatccaagaagagccacgaccgagagcgagccaagaaagagaaggccgagaagaaagagaagggcgaagattacaaggagggcggtagcaggaaggactccggccagtacgaaaaggacttcctggaggcggatgcttacggagtttcttacaacatgaaagctgacatagaagatgagctagataaaaccattgaattgttttctaccgaaaagaaagataaaaatgattccgagagagaaccttccaagaaaatagaaaaggaactaaagccttatggatctagtgccatcaacatcct

SEQ ID NO: 407738 - DNA, 2023 bp, Homo sapiens
cgaacactgtggcacaagctcaggccgcagacggtgccggccccgaggacgacactgaggcctcccgtgccgccgccccagccgaaggccctcctggcggcatccagccggaagccgcagaaccaaaacccacggccgaagccccgaaggccccccgagtggaggagatccctcagcgcatgaccaggaaccgggcgcagatgctcgcgaaccagagcaagcagggcccgcccccctccgagaaggagtgcgcccccacccctgccccggtcaccagggccaaggcccgcggctccgaggacgacgacgcccaggcccagcatccgcgcaaacgccgctttcagcgctccacccagcagctgcagcagcagctgaacacgtccacgcagcagacgcgggaggtgatccagcagacgctggccgccatcgtggacgccatcaagctggatgccatcgagccctaccacagcgacagggccaacccctacttcgaatacctgcagatcaggaagaagatcgaggagaagcgcaagatcctgtgctgtatcacgccgcaggcgccccagtgctacgccgagtacgtcacctacacgggctcctacctcctggacggcaagccgctcagcaagctccacatccccgtgatcgcaccccctccctccctggcggagcccctgaaggagctgttcaggcagcaggaggccgtccggggaaagctgcgtctacagcacagcatcgagcgggagaagctgatcgtatcctgtgagcaggagattctgcgggttcactgccgggcggccaggaccatcgccaaccaggcagtgccattcagcgcctgcacgatgctgctggactccgaggtctacaacatgcccctggagagccagggtgacgagaacaagtcagtgcgcgaccgtttcaacgcccgccagttcatctcctggctccaggacgtggatgacaagtatgaccgcatgaagacttgcctcctcatgcggcagcagcacgaggccgcggcctgaacgccgtgcagaggatggagtggcagctgaaggtgcaggaactggaccccgccgggcacaagtccctgtgcgtgaacgaggtgccctccttctacgtgcccatggtcgacgtcaacgacgactttgtattgttgccggcatgacaccgcgggacggccgcaggacgcaggcgagggccgcacggctgcccaggactgctgctgagccccaggggcggaggagggagcgccctgtccacccgggcggggagagaccccgagagagactgcacttggccacagcgcctccatcccttccagactggtccagacgtcggggaggtgaaacacgtctcttctctaccagctgccgcggcgggggcaaagcccccagagcctcactggccccggcgggatgaggagaccatgccgggcgcgcacacacggcagcttctgtttgaaaacggcgaccttcgggcccttttctccagcaactgcagaggcatttcaggagttggagaacggagtacatttttaaaattttttgttccattctgatcaactaaagaaaattaaggtgtccacctctcacaaacagtgacctgcaggtcggaggggcaggagccccatcccagccgtggttctgttgccgccgagctgcgacggcctcagactgggcttcagacctggtgcggagccaggcggagggacacagagccaggactcccagccgtattgaaatggagtcaaatccgcgtggtttgtatcttctttcctttaatcttgggcattttgtttctctttctgagaacgtaacttgaaacactacagagccaataatcatataaaaagtgtatccgtaaacgctgtacagttttatataccttcacaatgtacttttgctgccttctagataatttattttgcaacacattactgcacagttgtaaataacttatgtactgtaacatcactttcagttatgtgtaaagaaataaataaattaattaaaatgctctttgt

SEQ ID NO: 407739 - DNA, 1515 bp, Homo sapiens
aaagatacaaagagaaatccagtgacaaggacaaaagtgagaaatcaatcctggaaaaatgtcagaaggacaaagaatttgataaatgttggcacgaggaaaaaagataccaaggaaaaacataaagacacacatggcgataaggaaaggaaggagaagacaaaaccagaaagatacaaagagaaatccagtgacaaggacaaaagtgagaaatcaatcctgggatcatctcagaagacttctctgaaaaaaaagatgacaagaaaggcaaagagaaaagctggtacatcgcagacatcttcacagatgagagtgaggacgacagagacagctgcatggggagcgggttcaagatgggagaggccagcgacttgccgaggacggacggcctccaggagaaggaggaaggacgggaggcctatgcctccgacagacacaggaagtcttctgacaagcagcaccctgagaggcagaaggacaaggagcccagagacaggagaaaggaccgaggggctgccgacgcggggagagacaaaaaagagaaagtctttgaaaagcacaaggagaagaaggataaagagtccacagaaaagtacaaggacaggaaggacagagcctcagtggactccacgcaagataagaaaaataaacagaagctccccgagaaggctgaaaagaagcacgctgccgaagacaaggctaaaagcaaacacaaagagaagtcggacaaagaacattccaaggagaggaagtcctcgagaagtgccgacgcggaaaaaagcctgcttgaaaagttggaagaagaggctctccatgagtacagagaagactccaacgataaaatcagcgaggtctcctctgacagcttcacggaccgagggcaggagccggggctgactgccttcctggaggtctctttcacggagccacctggagacgacaagccgagggagagcgcctgcctccctgagaagctgaaagagaaggagaggcacagacactcctcatcttcatccaagaagagccacgaccgagagcgagccaagaaagagaaggccgagaagaaagagaagggcgaagattacaaggagggcggtagcaggaaggactccggccagtacgaaaaggacttcctggaggcggatgcttacggagtttcttacaacatgaaagctgacatagaagatgagctagataaaaccattgaattgttttctaccgaaaagaaagataaaaatgattccgagagagaaccttccaagaaaatagaaaaggaactaaagccttatggatctagtgccatcaacatcctaaaagagaagaagaagagagagaaacacagggagaaatggagagacgagaaggagaggcaccgggacaggcatgcggatgggctgctgcggcatcacagggacgagctcctgcggcatcacagggacgagcagaagcccgccaccagggacaaggacagcccgccccgcgtgctcaaagacaagtccagggacgagggcccga

SEQ ID NO: 407740 - DNA, 375 bp, Homo sapiens
tcgtggacgccatcaagctggatgccatcgagccctaccacagcgacagggccaacccctacttcgaatacctgcagatcaggaagaagatcgaggagaagcgcaagatcctgtgctgtatcacgccgcaggcgccccagtgctacgccgagtacgtcacctacacgggctcctacctcctggacggcaagccgctcagcaagctccacatccccgtggtgagtgcggggcccgggagagccactgccttctctctctgggatgcgtctggggcccctagtcacggctttctccagcccgtcttgtcccactcatggcccttgacctctctcgacctttctgccacctgaggagacacagccccacttctgctgt

SEQ ID NO: 407741 - DNA, 832 bp, Homo sapiens
  misc_feature (813)..(813): n is a, c, g, or t
atcggttgatctagaggatcccagttcgacggagactctcctcttttgtcctggctacctttcggaaaaggacaagaagaggagagagtccgcagaggccgggcgggacagaaaggacgccctgtgagagctgcaagggagcgcagggacggcagggccaagcccgaggaggcgcaccgggaggagctgaaggagtgtggctgcgagagtggcttcaaggacaagtccgacggcgactttgggaagggcctggagccgtgggaacggcaccacccagcacgagagaaggagaagaaggatggccccgataaggaaaggaaggagaagacaaaaccagaaagaccgttcgaataaagcagaaaaggagagatcgctgaaggaaaagtctccgaaagaagaaaaactgagactgtacaaagaggagagaaagaagaaatcaaaagaccggccctcaaaattagagaagaagaatgatttaaaagaggacaaaatttcaaaagagaaggagaagatttttaaagaagataaagaaaaactcaaaaaagaaaaggtttatagggaagattctgcttttgacgaatattgtaacaaaaatcagtttctggagaatgaagacaccaaatttagcctttctgacgatcagcgagatcggtggttttctgacttgtccgattcatcctttgatttcaaaggggaggacagctgggactcgccagtgacagactacagggacatgaagagcgactctgtggccaagctcatcttggagacggtgaaggaggacagcaaggagtctgaagccgtctggaggtnagacctcgatcgtatagta

SEQ ID NO: 407742 - DNA, 448 bp, Homo sapiens
aagatggaaatggagcccacgactctgcagtgcatcctgatgccgcgctgacctgacggcttgtgcgtgtccctttggctgcaccagtgagcacagtggcaggcgtgtcagagaaagggccccttctgcagacggtctctcaccattgccgaccacggaatcccagaaccgctgagctgcctcgggaagaaccagcaggataaagataaagtttctctaaccaagaccccaaaactggagcgtggcgatggcgggaaggaggtgagggagcgagccatcagtgccctgtgtcagaaatatcctcgcaaacacgccgtccttatgaacttcctgttcaccatgctgcgggaagagggtggctttgagtataaacgcgctatcgtggactgcatcatcagcatcattgaagagaactcagagagcagaaggtcactcacagatcctgtat

SEQ ID NO: 407743 - DNA, 4652 bp, Homo sapiens
gagggcctttgccggggaggcgccgccgccgagcccgcggccagacgccccatcagtagcgtccgcaccgggagccgcggctctcgcccgagccgtgggcgcgcccgaggggcgggctcgcctcccgccgtccctcgcagctctgccgggcccgagcccgcgccgccgccgccgccgccttgccgctcgggccgcgcggcccgggaagcttgcggccgcgggctgcatgggcagcgcccgcgccccgccgctgagccgtcgcggagccgcgcagccctcggagcacgaatatatacagccctgctctgggacacacctccattggatttaaaagacagtcctcgtcagcactgactttcagctatggaatcgcagacggttgatgatgaagcgccggccgtgtaaatgaagatcgggtgaggagcaggacgatgcccaagggtgggtgccctaaagcaccacagcaggaagagcttcccctcagcagcgacatggtggagaagcagactgggaaaaaggataaagataaagtttctctaaccaagaccccaaaactggagcgtggcgatggcgggaaggaggtgagggagcgagccagcaagcggaagctgcccttcaccgcgggcgccaatggggagcagaaggactcggacacagagaagcagggccctgagcggaagaggattaagaaggagcctgtcacccggaaggccgggctgctgtttggcatggggctgtctggaatccgagccggctaccccctctccgagcgccagcaggtggcccttctcatgcagatgacggccgaggagtctgccaacagcccagtggacacaacaccaaagcacccctcccagtctacagtgtgtcagaagggaacgcccaactctgcctcaaaaaccaaagataaagtgaacaagagaaacgagcgtggagagacccgcctgcaccgagccgccatccgcggggacgcccggcgcatcaaagagctcatcagcgagggggcagacgtcaacgtcaaggacttcgcaggctggacggcgctgcacgaggcctgtaaccggggctactacgacgtcgcgaagcagctgctggctgcaggtgcggaggtgaacaccaagggcctagatgacgacacgcctttgcacgacgctgccaacaacgggcactacaaggtggtgaagctgctgctgcggtacggagggaacccgcagcagagcaacaggaaaggcgagacgccgctgaaagtggccaactcccccacgatggtgaacctcctgttaggcaaaggcacttacacttccagcgaggagagctcgacggagagctcagaagaggaagacgcaccatccttcgcaccttccagttcagtcgacggcaacaacacggactccgagttcgaaaaaggcctcaagcacaaggccaagaacccagagccacagaaggccacggcccccgtcaaggacgagtatgagtttgatgaggacgacgagcaggacagggttcctccggtggacgacaagcacctattgaaaaaggactacagaaaagaaacgaaatccaatagttttatctctatacccaaaatggaggttaaaagttacactaaaaataacacgattgcaccaaagaaagcgtcccatcgtatcctgtcagacacgtcggacgaggaggacgcgagtgtcaccgtggggacaggagagaagctgagactctcggcacatacgatattgcctggtagtaagacacgagagccttctaatgccaagcagcagaaggaaaaaaataaagtgaaaaagaagcgaaagaaagaaacaaaaggcagagaggttcgcttcggaaagcggagcgacaagttctgctcctcggagtcggagagcgagtcctcagagagtggggaggatgacagggactctctggggagctctggctgcctcaaggggtccccgctggtgctgaaggacccctccctgttcagctccctctctgcctcctccacctcgtctcacgggagctctgccgcccagaagcagaaccccagccacacagaccagcacaccaagcactggcggacagacaattggaaaaccatttcttccccggcttggtcagaggtcagttctttatcagactccacaaggacgagactgacaagcgagtctgactactcctctgagggctccagtgtggaatcgctgaagccagtgaggaagaggcaggagcacaggaagcgagcctccctgtcggagaagaagagccccttcctgtccagcgcggagggcgctgtccccaaactggacaaggaggggaaagttgtcaaaaaacataaaacaaaacacaaacacaaaaacaaggagaagggacagtgttccatcagccaagagctgaagttgaaaagttttacttacgaatatgaggactccaagcagaagtcagataaggctatactgttagagaatgatctttccactgaaaacaagctaaaagtgttaaagcacgatcgcgaccactttaaaaaagaagagaaacttagcaaaatgaaattagaagaaaaagaatggctctttaaagatgaaaaatcactgaagagaatcaaagacacaaacaaagacatcagcaggtctttccgagaagagaaagaccgttcgaataaagcagaaaaggagagatcgctgaaggaaaagtctccgaaagaagaaaaactgagactgtacaaagaggagagaaagaagaaatcaaaagaccggccctcaaaattagagaagaagaatgatttaaaagaggacaaaatttcaaaagagaaggagaagatttttaaagaagataaagaaaaactcaaaaaagaaaaggtttatagggaagattctgcttttgacgaatattgtaacaaaaatcagtttctggagaatgaagacaccaaatttagcctttctgacgatcagcgagatcggtggttttctgacttgtccgattcatcctttgatttcaaaggggaggacagctgggactcgccagtgacagactacagggacatgaagagcgactctgtggccaagctcatcttggagacggtgaaggaggacagcaaggagaggaggcgggacagccgggcccgggagaagcgagactacagagagcccttcttccgaaagaaggacagggactatttggataaaaactctgagaagaggaaagagcagactgaaaagcataaaagtgtccctggctacctttcggaaaaaggacaagtccgacggcgactttgggaagggcctggagccgtgggaacggcaccacccagcacgagagaaggagaagaaggatggccccgataaggaaaggaaggagaagacaaaaccagaaagatacaaagagaaatccagtgacaaggacaaaagtgagaaatcaatcctggaaaaatgtcagaaggacaaagaatttgataaatgttttaaagagaaaaaagataccaaggaaaaacataaagacacacatggcaaagacaaagaaaggaaagcgtctctcgaccaagggaaagagaagaaggagaaggctttccctgggatcatctcagaagacttctctgaaaaaaaagatgacaagaaaggcaaagagaaaagctggtacatcgcagacatcttcacagatgagagtgaggacgacagagacagctgcatggggagcgggttcaagatgggagaggccagcgacttgccgaggacggacggcctccaggagaaggaggaaggacgggaggcctatgcctccgacagacacaggaagtcttctgacaagcagcaccctgagaggcagaaggacaaggagcccagagacaggagaaaggaccgaggggctgccgacgcggggagagacaaaaaagagaaagtctttgaaaagcacaaggagaagaaggataaagagtccacagaaaagtacaaggacaggaaggacagagcctcagtggactccacgcaagataagaaaaataaacagaagctccccgagaaggctgaaaagaagcacgctgccgaagacaaggctaaaagcaaacacaaagagaagtcggacaaagaacattccaaggagaggaagtcctcgagaagtgccgacgcggaaaaaagcctgcttgaaaagttggaagaagaggctctccatgagtacagagaagactccaacgataaaatcagcgaggtctcctctgacagcttcacggaccgagggcaggagccggggctgactgccttcctggaggtctctttcacggagccacctggagacgacaagccgagggagagcgcctgcctccctgagaagctgaaagagaaggagaggcacagacactcctcatcttcatccaagaagagccacgaccgagagcgagccaagaaagagaaggccgagaagaaagagaagggcgaagattacaaggagggcggtagcaggaaggactccggccagtacgaaaaggacttcctggaggcggatgcttacggagtttcttacaacatgaaagctgacatagaagatgagctagataaaaccattgaattgttttctaccgaaaagaaagataaaaatgattccgagagagaaccttccaagaaaatagaaaaggaactaaagccttatggatctagtgccatcaacatcct

SEQ ID NO: 407744 - DNA, 4917 bp, Homo sapiens
gagggcctttgccggggaggcgccgccgccgagcccgcggccagacgccccatcagtagcgtccgcaccgggagccgcggctctcgcccgagccgtgggcgcgcccgaggggcgggctcgcctcccgccgtccctcgcagctctgccgggcccgagcccgcgccgccgccgccgccgccttgccgctcgggccgcgcggcccgggaagcttgcggccgcgggctgcatgggcagcgcccgcgccccgccgctgagccgtcgcggagccgcgcagccctcggagcacgaatatatacagccctgctctgggacacacctccattggatttaaaagacagtcctcgtcagcactgactttcagctatggaatcgcagacggttgatgatgaagcgccggccgtgtaaatgaagatcgggtgaggagcaggacgatgcccaagggtgggtgccctaaagcaccacagcaggaagagcttcccctcagcagcgacatggtggagaagcagactgggaaaaaggataaagataaagtttctctaaccaagaccccaaaactggagcgtggcgatggcgggaaggaggtgagggagcgagccagcaagcggaagctgcccttcaccgcgggcgccaatggggagcagaaggactcggacacagtgctctgtgttgatgccttcagatgcctccagcccagtccctgttgtggtgctgcaaggctggtacgctcctcgaagcaccatggcatgagatggaggttcctagaagcaagaagaaagagaagcagggccctgagcggaagaggattaagaaggagcctgtcacccggaaggccgggctgctgtttggcatggggctgtctggaatccgagccggctaccccctctccgagcgccagcaggtggcccttctcatgcagatgacggccgaggagtctgccaacagcccagtggacacaacaccaaagcacccctcccagtctacagtgtgtcagaagggaacgcccaactctgcctcaaaaaccaaagataaagtgaacaagagaaacgagcgtggagagacccgcctgcaccgagccgccatccgcggggacgcccggcgcatcaaagagctcatcagcgagggggcagacgtcaacgtcaaggacttcgcaggctggacggcgctgcacgaggcctgtaaccggggctactacgacgtcgcgaagcagctgctggctgcaggtgcggaggtgaacaccaagggcctagatgacgacacgcctttgcacgacgctgccaacaacgggcactacaaggtggtgaagctgctgctgcggtacggagggaacccgcagcagagcaacaggaaaggcgagacgccgctgaaagtggccaactcccccacgatggtgaacctcctgttaggcaaaggcacttacacttccagcgaggagagctcgacggagagctcagaagaggaagacgcaccatccttcgcaccttccagttcagtcgacggcaacaacacggactccgagttcgaaaaaggcctcaagcacaaggccaagaacccagagccacagaaggccacggcccccgtcaaggacgagtatgagtttgatgaggacgacgagcaggacagggttcctccggtggacgacaagcacctattgaaaaaggactacagaaaagaaacgaaatccaatagttttatctctatacccaaaatggaggttaaaagttacactaaaaataacacgattgcaccaaagaaagcgtcccatcgtatcctgtcagacacgtcggacgaggaggacgcgagtgtcaccgtggggacaggagagaagctgagactctcggcacatacgatattgcctggtagtaagacacgagagccttctaatgccaagcagcagaaggaaaaaaataaagtgaaaaagaagcgaaagaaagaaacaaaaggcagagaggttcgcttcggaaagcggagcgacaagttctgctcctcggagtcggagagcgagtcctcagagagtggggaggatgacagggactctctggggagctctggctgcctcaaggggtccccgctggtgctgaaggacccctccctgttcagctccctctctgcctcctccacctcgtctcacgggagctctgccgcccagaagcagaaccccagccacacagaccagcacaccaagcactggcggacagacaattggaaaaccatttcttccccggcttggtcagaggtcagttctttatcagactccacaaggacgagactgacaagcgagtctgactactcctctgagggctccagtgtggaatcgctgaagccagtgaggaagaggcaggagcacaggaagcgagcctccctgtcggagaagaagagccccttcctgtccagcgcggagggcgctgtccccaaactggacaaggaggggaaagttgtcaaaaaacataaaacaaaacacaaacacaaaaacaaggagaagggacagtgttccatcagccaagagctgaagttgaaaagttttacttacgaatatgaggactccaagcagaagtcagataaggctatactgttagagaatgatctttccactgaaaacaagctaaaagtgttaaagcacgatcgcgaccactttaaaaaagaagagaaacttagcaaaatgaaattagaagaaaaagaatggctctttaaagatgaaaaatcactgaagagaatcaaagacacaaacaaagacatcagcaggtctttccgagaagagaaagaccgttcgaataaagcagaaaaggagagatcgctgaaggaaaagtctccgaaagaagaaaaactgagactgtacaaagaggagagaaagaagaaatcaaaagaccggccctcaaaattagagaagaagaatgatttaaaagaggacaaaatttcaaaagagaaggagaagatttttaaagaagataaagaaaaactcaaaaaagaaaaggtttatagggaagattctgcttttgacgaatattgtaacaaaaatcagtttctggagaatgaagacaccaaatttagcctttctgacgatcagcgagatcggtggttttctgacttgtccgattcatcctttgatttcaaaggggaggacagctgggactcgccagtgacagactacagggacatgaagagcgactctgtggccaagctcatcttggagacggtgaaggaggacagcaaggagaggaggcgggacagccgggcccgggagaagcgagactacagagagcccttcttccgaaagaaggacagggactatttggataaaaactctgagaagaggaaagagcagactgaaaagcataaaagtgtccctggctacctttcggaaaaggacaagaagaggagagagtccgcagaggccgggcgggacagaaaggacgccctggagagctgcaaggagcgcagggacggcagggccaagcccgaggaggtgcaccgggaggagctgaaggagtgtggctgcgagagtggcttcaaggacaagtccgacggcgactttgggaagggcctggagccgtgggaacggcaccacccagcacgagagaaggagaagaaggatggccccgataaggaaaggaaggagaagacaaaaccagaaagatacaaagagaaatccagtgacaaggacaaaagtgagaaatcaatcctggaaaaatgtcagaaggacaaagaatttgataaatgttttaaagagaaaaaagataccaaggaaaaacataaagacacacatggcaaagacaaagaaaggaaagcgtctctcgaccaagggaaagagaagaaggagaaggctttccctgggatcatctcagaagacttctctgaaaaaaaagatgacaagaaaggcaaagagaaaagctggtacatcgcagacatcttcacagatgagagtgaggacgacagagacagctgcatggggagcgggttcaagatgggagaggccagcgacttgccgaggacggacggcctccaggagaaggaggaaggacgggaggcctatgcctccgacagacacaggaagtcttctgacaagcagcaccctgagaggcagaaggacaaggagcccagagacaggagaaaggaccgaggggctgccgacgcggggagagacaaaaaagagaaagtctttgaaaagcacaaggagaagaaggataaagagtccacagaaaagtacaaggacaggaaggacagagcctcagtggactccacgcaagataagaaaaataaacagaagctccccgagaaggctgaaaagaagcacgctgccgaagacaaggctaaaagcaaacacaaagagaagtcggacaaagaacattccaaggagaggaagtcctcgagaagtgccgacgcggaaaaaagcctgcttgaaaagttggaagaagaggctctccatgagtacagagaagactccaacgataaaatcagcgaggtctcctctgacagcttcacggaccgagggcaggagccggggctgactgccttcctggaggtctctttcacggagccacctggagacgacaagccgagggagagcgcctgcctccctgagaagctgaaagagaaggagaggcacagacactcctcatcttcatccaagaagagccacgaccgagagcgagccaagaaagagaaggccgagaagaaagagaagggcgaagattacaaggagggcggtagcaggaaggactccggccagtacgaaaaggacttcctggaggcggatgcttacggagtttcttacaacatgaaagctgacatagaagatgagctagataaaaccattgaattgttttctaccgaaaagaaagataaaaatgattccgagagagaaccttccaagaaaatagaaaaggaactaaagccttatggatctagtgccatcaacatcct

SEQ ID NO: 407745 - DNA, 4966 bp, Homo sapiens
gagggcctttgccggggaggcgccgccgccgagcccgcggccagacgccccatcagtagcgtccgcaccgggagccgcggctctcgcccgagccgtgggcgcgcccgaggggcgggctcgcctcccgccgtccctcgcagctctgccgggcccgagcccgcgccgccgccgccgccgccttgccgctcgggccgcgcggcccgggaagcttgcggccgcgggctgcatgggcagcgcccgcgccccgccgctgagccgtcgcggagccgcgcagccctcggagcacgcccgtgcagcctgccaggactcttccagacacgggatttgtcggtgaacaacgcagagctgatgcagacataatatatacagccctgctctgggacacacctccattggatttaaaagacagtcctcgtcagcactgactttcagctatggaatcgcagacggttgatgatgaagcgccggccgtgtaaatgaagatcgggtgaggagcaggacgatgcccaagggtgggtgccctaaagcaccacagcaggaagagcttcccctcagcagcgacatggtggagaagcagactgggaaaaaggataaagataaagtttctctaaccaagaccccaaaactggagcgtggcgatggcgggaaggaggtgagggagcgagccagcaagcggaagctgcccttcaccgcgggcgccaatggggagcagaaggactcggacacagatgcctccagcccagtccctgttgtggtgctgcaaggctggtacgctcctcgaagcaccatggcatgagatggaggttcctagaagcaagaagaaagagaagcagggccctgagcggaagaggattaagaaggagcctgtcacccggaaggccgggctgctgtttggcatggggctgtctggaatccgagccggctaccccctctccgagcgccagcaggtggcccttctcatgcagatgacggccgaggagtctgccaacagcccagtggacacaacaccaaagcacccctcccagtctacagtgtgtcagaagggaacgcccaactctgcctcaaaaaccaaagataaagtgaacaagagaaacgagcgtggagagacccgcctgcaccgagccgccatccgcggggacgcccggcgcatcaaagagctcatcagcgagggggcagacgtcaacgtcaaggacttcgcaggctggacggcgctgcacgaggcctgtaaccggggctactacgacgtcgcgaagcagctgctggctgcaggtgcggaggtgaacaccaagggcctagatgacgacacgcctttgcacgacgctgccaacaacgggcactacaaggtggtgaagctgctgctgcggtacggagggaacccgcagcagagcaacaggaaaggcgagacgccgctgaaagtggccaactcccccacgatggtgaacctcctgttaggcaaaggcacttacacttccagcgaggagagctcgacggagagctcagaagaggaagacgcaccatccttcgcaccttccagttcagtcgacggcaacaacacggactccgagttcgaaaaaggcctcaagcacaaggccaagaacccagagccacagaaggccacggcccccgtcaaggacgagtatgagtttgatgaggacgacgagcaggacagggttcctccggtggacgacaagcacctattgaaaaaggactacagaaaagaaacgaaatccaatagttttatctctatacccaaaatggaggttaaaagttacactaaaaataacacgattgcaccaaagaaagcgtcccatcgtatcctgtcagacacgtcggacgaggaggacgcgagtgtcaccgtggggacaggagagaagctgagactctcggcacatacgatattgcctggtagtaagacacgagagccttctaatgccaagcagcagaaggaaaaaaataaagtgaaaaagaagcgaaagaaagaaacaaaaggcagagaggttcgcttcggaaagcggagcgacaagttctgctcctcggagtcggagagcgagtcctcagagagtggggaggatgacagggactctctggggagctctggctgcctcaaggggtccccgctggtgctgaaggacccctccctgttcagctccctctctgcctcctccacctcgtctcacgggagctctgccgcccagaagcagaaccccagccacacagaccagcacaccaagcactggcggacagacaattggaaaaccatttcttccccggcttggtcagaggtcagttctttatcagactccacaaggacgagactgacaagcgagtctgactactcctctgagggctccagtgtggaatcgctgaagccagtgaggaagaggcaggagcacaggaagcgagcctccctgtcggagaagaagagccccttcctgtccagcgcggagggcgctgtccccaaactggacaaggaggggaaagttgtcaaaaaacataaaacaaaacacaaacacaaaaacaaggagaagggacagtgttccatcagccaagagctgaagttgaaaagttttacttacgaatatgaggactccaagcagaagtcagataaggctatactgttagagaatgatctttccactgaaaacaagctaaaagtgttaaagcacgatcgcgaccactttaaaaaagaagagaaacttagcaaaatgaaattagaagaaaaagaatggctctttaaagatgaaaaatcactgaagagaatcaaagacacaaacaaagacatcagcaggtctttccgagaagagaaagaccgttcgaataaagcagaaaaggagagatcgctgaaggaaaagtctccgaaagaagaaaaactgagactgtacaaagaggagagaaagaagaaatcaaaagaccggccctcaaaattagagaagaagaatgatttaaaagaggacaaaatttcaaaagagaaggagaagatttttaaagaagataaagaaaaactcaaaaaagaaaaggtttatagggaagattctgcttttgacgaatattgtaacaaaaatcagtttctggagaatgaagacaccaaatttagcctttctgacgatcagcgagatcggtggttttctgacttgtccgattcatcctttgatttcaaaggggaggacagctgggactcgccagtgacagactacagggacatgaagagcgactctgtggccaagctcatcttggagacggtgaaggaggacagcaaggagaggaggcgggacagccgggcccgggagaagcgagactacagagagcccttcttccgaaagaaggacagggactatttggataaaaactctgagaagaggaaagagcagactgaaaagcataaaagtgtccctggctacctttcggaaaaggacaagaagaggagagagtccgcagaggccgggcgggacagaaaggacgccctggagagctgcaaggagcgcagggacggcagggccaagcccgaggaggtgcaccgggaggagctgaaggagtgtggctgcgagagtggcttcaaggacaagtccgacggcgactttgggaagggcctggagccgtgggaacggcaccacccagcacgagagaaggagaagaaggatggccccgataaggaaaggaaggagaagacaaaaccagaaagatacaaagagaaatccagtgacaaggacaaaagtgagaaatcaatcctggaaaaatgtcagaaggacaaagaatttgataaatgttttaaagagaaaaaagataccaaggaaaaacataaagacacacatggcaaagacaaagaaaggaaagcgtctctcgaccaagggaaagagaagaaggagaaggctttccctgggatcatctcagaagacttctctgaaaaaaaagatgacaagaaaggcaaagagaaaagctggtacatcgcagacatcttcacagatgagagtgaggacgacagagacagctgcatggggagcgggttcaagatgggagaggccagcgacttgccgaggacggacggcctccaggagaaggaggaaggacgggaggcctatgcctccgacagacacaggaagtcttctgacaagcagcaccctgagaggcagaaggacaaggagcccagagacaggagaaaggaccgaggggctgccgacgcggggagagacaaaaaagagaaagtctttgaaaagcacaaggagaagaaggataaagagtccacagaaaagtacaaggacaggaaggacagagcctcagtggactccacgcaagataagaaaaataaacagaagctccccgagaaggctgaaaagaagcacgctgccgaagacaaggctaaaagcaaacacaaagagaagtcggacaaagaacattccaaggagaggaagtcctcgagaagtgccgacgcggaaaaaagcctgcttgaaaagttggaagaagaggctctccatgagtacagagaagactccaacgataaaatcagcgaggtctcctctgacagcttcacggaccgagggcaggagccggggctgactgccttcctggaggtctctttcacggagccacctggagacgacaagccgagggagagcgcctgcctccctgagaagctgaaagagaaggagaggcacagacactcctcatcttcatccaagaagagccacgaccgagagcgagccaagaaagagaaggccgagaagaaagagaagggcgaagattacaaggagggcggtagcaggaaggactccggccagtacgaaaaggacttcctggaggcggatgcttacggagtttcttacaacatgaaagctgacatagaagatgagctagataaaaccattgaattgttttctaccgaaaagaaagataaaaatgattccgagagagaaccttccaagaaaatagaaaaggaactaaagccttatggatctagtgccatcaacatcct

SEQ ID NO: 407746 - DNA, 2797 bp, Homo sapiens
gccctgatcagagcagctgcctgccttgactagttactgagtctgttgagtgcggtgtgagagtggatgagttttgagctgcctctgaattcagtgaattgtgtgtcttctcttttgaagcagacggttgatgatgaagcgccggccgtgtaaatgaagatcgggtgaggagcaggacgatgcccaagggtgggtgccctaaagcaccacagcaggaagagcttcccctcagcagcgacatggtggagaagcagactgggaaaaaggataaagataaagtttctctaaccaagaccccaaaactggagcgtggcgatggcgggaaggaggtgagggagcgagccagcaagcggaagctgcccttcaccgcgggcgccaatggggagcagaaggactcggacacagagaagcagggccctgagcggaagaggattaagaaggagcctgtcacccggaaggccgggctgctgtttggcatggggctgtctggaatccgagccggctaccccctctccgagcgccagcaggtggcccttctcatgcagatgacggccgaggagtctgccaacagcccagtggacacaacaccaaagcacccctcccagtctacagtgtgtcagaagggaacgcccaactctgcctcaaaaaccaaagataaagtgaacaagagaaacgagcgtggagagacccgcctgcaccgagccgccatccgcggggacgcccggcgcatcaaagagctcatcagcgagggggcagacgtcaacgtcaaggacttcgcaggctggacggcgctgcacgaggcctgtaaccggggctactacgacgtcgcgaagcagctgctggctgcaggtgcggaggtgaacaccaagggcctagatgacgacacgcctttgcacgacgctgccaacaacgggcactacaagggttggcatccccccgttcttcacacatccggcctgtcctggcatctgggtggttctgtagctttgtttccccgtagctagccggttccatgatgtggggcacaggaaagcgagttttcgccttgcccaccctcaaggccgagctgtgccctctgtctgcccccagctttccccttctgggtcagcctggacggcctctcacaggtttcccagcaagtgccatctatgaaaggctcgtatccgctagccgtgtaggtctggttggatttgagcaggtgaaggattacaccaagtggaaggaggcctgcaggagttgctgccggtccccgtcaccactgtgggactgttagacctgcaaggcagacccaccctcgtctggaatgaggtaacaccaagaggtgtggccagtgcacagaaccatagactcaagctttagaaagtggccattgtggccggcccaggagcagtgggcactgagaggtctcagcctctgtgggggtcgagagaggtcgtggtgtgcctgacagccccgtcctgccggaaagcaggggtgctgcctggagatgcggcgggtctcactgatgtcttcgtcagagctccgtggagagcccctggttgcaggcaggacagcaaggctgaggggtcacacggggccacatctgctggtgcccgtcgtgctcctctgcagcaagcccagcctggccattgctggaggtcctggagcccacagtgccttggccttaaagagctcacttgagaaacggcttgttccggtggggtggggggtggattgaagactctgagacgagcagggaactcagaacactgagtccctatttgatgttaaaatatgaccgttaaacttctgggtaagataatgaatggcactatggtttatactgtttctgttttatgggctcttccagagacgtgaactggaaaaggctctgcagtgtctgggattcgctcagtgctgcaggggagggcaggtgtgaggggaatggccctggagggtgatggggctggggcatccgatgcagctttatagttctgtaattaccacttttaaactttttattacgaaaaatgtcaaggaccctggaattacggtgaggtaggcaggataatggcccccaagatgcccgtgttgtgacccccagaccttgtgagtgcctcacatggggagattgtcctaggtcatcttgcaggcccagggcagccccatgggcccttaaagcttgagagcctttcctgctgagtctgagagatgccagaagcaggagaggttagaacccgaggagggccgcacctgcgctgctggccttagaggagggccgaggagtgtggtggcccctaagcagctgggactggggacctccgtcccagccctgcaagaaactgaattctgccagcagcccccatgatggaggaaaggaaggatcctgccctgccagcaccttgacctctgacctccacaattgtaagcctgaggttttgtgtagtcaccatagaaaactcacacacataagaactctgtactgattcaacaatagaacatgtcacacacgaactggaaactgattctgtgggcgacaagagtctatagtaaacgttatgacagattctttgaatgcgctaatctcagactggactaaagttgggattaaatttaatttgtacttgagttcagtgcattgctgttctgggcataggaaatccaggttgctggtgatgaacagctgaaaagagctgtgtcaccatggttgtctctgtcagtcatgtgaccacccttacccttgtaaaatcaagcaagggagagattattttctaatgtaaatgaaaataaaaaataaagcagcttgcagaaaaaaaaa

SEQ ID NO: 407747 - DNA, 3684 bp, Homo sapiens
cttatagaggatccccaacccgggaccgcttttaacgacgctgcacaacgggcactacaaggtggtgaagctgctgctgcggtacggagggaacccgcagcagagcaacaggaaaggcgagacgccgctgaaagtggccaactcccccacgatggtgaacctcctgttaggcaaaggcacttacacttccagcgaggagagctcgacggagagctcagaagaggaagacgcaccatccttcgcaccttccagttcagtcgacggcaacaacacggactccgagttcgaaaaaggcctcaagcacaaggccaagaacccagagccacagaaggccacggcccccgtcaaggacgagtatgagtttgatgaggacgacgagcaggacagggttcctccggtggacgacaagcacctattgaaaaaggactacagaaaagaaacgaaatccaatagttttatctctatacccaaaatggaggttaaaagttacactaaaaataacacgattgcaccaaagaaagcgtcccatcgtatcctgtcagacacgtcggacgaggaggacgcgagtgtcaccgtggggacaggagagaagctgagactctcggcacatacgatattgcctggtagtaagacacgagagccttctaatgccaagcagcagaaggaaaaaaataaagtgaaaaagaagcgaaagaaagaaacaaaaggcagagaggttcgcttcggaaagcggagcgacaagttctgctcctcggagtcggagagcgagtcctcagagagtggggaggatgacagggactctctggggagctctggctgcctcaaggggtccccgctggtgctgaaggacccctccctgttcagctccctctctgcctcctccacctcgtctcacgggagctctgccgcccagaagcagaaccccagccacacagaccagcacaccaagcactggcggacagacaattggaaaaccatttcttccccggcttggtcagaggtcagttctttatcagactccacaaggacgagactgacaagcgagtctgactactcctctgagggctccagtgtggaatcgctgaagccagtgaggaagaggcaggagcacaggaagcgagcctccctgtcggagaagaagagccccttcctgtccagcgcggagggcgctgtccccaaactggacaaggaggggaaagttgtcaaaaaacataaaacaaaacacaaacacaaaaacaaggagaagggacagtgttccatcagccaagagctgaagttgaaaagttttacttacgaatatgaggactccaagcagaagtcagataaggctatactgttagagaatgatctttccactgaaaacaagctaaaagtgttaaagcacgatcgcgaccactttaaaaaagaagagaaacttagcaaaatgaaattagaagaaaaagaatggctctttaaagatgaaaaatcactgaagagaatcaaagacacaaacaaagacatcagcaggtctttccgagaagagaaagaccgttcgaataaagcagaaaaggagagatcgctgaaggaaaagtctccgaaagaagaaaaactgagactgtacaaagaggagagaaagaagaaatcaaaagaccggccctcaaaattagagaagaagaatgatttaaaagaggacaaaatttcaaaagagaaggagaagatttttaaagaagataaagaaaaactcaaaaaagaaaaggtttatagggaagattctgcttttgacgaatattgtaacaaaaatcagtttctggagaatgaagacaccaaatttagcctttctgacgatcagcgagatcggtggttttctgacttgtccgattcatcctttgatttcaaaggggaggacagctgggactcgccagtgacagactacagggacatgaagagcgactctgtggccaagctcatcttggagacggtgaaggaggacagcaaggagaggaggcgggacagccgggcccgggagaagcgagactacagagagcccttcttccgaaagaaggacagggactatttggataaaaactctgagaagaggaaagagcagactgaaaagcataaaagtgtccctggctacctttcggaaaaggacaagaagaggagagagtccgcagaggccgggcgggacagaaaggacgccctggagagctgcaaggagcgcagggacggcagggccaagcccgaggaggtgcaccgggaggagctgaaggagtgtggctgcgagagtggcttcaaggacaagtccgacggcgactttgggaagggcctggagccgtgggaacggcaccacccagcacgagagaaggagaagaaggatggccccgataaggaaaggaaggagaagacaaaaccagaaagatacaaagagaaatccagtgacaaggacaaaagtgagaaatcaatcctggaaaaatgtcagaaggacaaagaatttgataaatgttttaaagagaaaaaagataccaaggaaaaacataaagacacacatggcaaagacaaagaaaggaaagcgtctctcgaccaagggaaagagaagaaggagaaggctttccctgggatcatctcagaagacttctctgaaaaaaaagatgacaagaaaggcaaagagaaaagctggtacatcgcagacatcttcacagatgagagtgaggacgacagagacagctgcatggggagcgggttcaagatgggagaggccagcgacttgccgaggacggacggcctccaggagaaggaggaaggacgggaggcctatgcctccgacagacacaggaagtcttctgacaagcagcaccctgagaggcagaaggacaaggagcccagagacaggagaaaggaccgaggggctgccgacgcggggagagacaaaaaagagaaagtctttgaaaagcacaaggagaagaaggataaagagtccacagaaaagtacaaggacaggaaggacagagcctcagtggactccacgcaagataagaaaaataaacagaagctccccgagaaggctgaaaagaagcacgctgccgaagacaaggctaaaagcaaacacaaagagaagtcggacaaagaacattccaaggagaggaagtcctcgagaagtgccgacgcggaaaaaagcctgcttgaaaagttggaagaagaggctctccatgagtacagagaagactccaacgataaaatcagcgaggtctcctctgacagcttcacggaccgagggcaggagccggggctgactgccttcctggaggtctctttcacggagccacctggagacgacaagccgagggagagcgcctgcctccctgagaagctgaaagagaaggagaggcacagacactcctcatcttcatccaagaagagccacgaccgagagcgagccaagaaagagaaggccgagaagaaagagaagggcgaagattacaaggagggcggtagcaggaaggactccggccagtacgaaaaggacttcctggaggcggatgcttacggagtttcttacaacatgaaagctgacatagaagatgagctagataaaaccattgaattgttttctaccgaaaagaaagataaaaatgattccgagagagaaccttccaagaaaatagaaaaggaactaaagccttatggatctagtgccatcaacatcct

SEQ ID NO: 407748 - DNA, 3270 bp, Homo sapiens
agtacggctaggttacgaggccggggtgaaatccaatagttttatctctatacccaaaatggaggttaaaagttacactaaaaataacacgattgcaccaaagaaagcgtcccatcgtatcctgtcagacacgtcggacgaggaggacgcgagtgtcaccgtggggacaggagagaagctgagactctcggcacatacgatattgcctggtagtaagacacgagagccttctaatgccaagcagcagaaggaaaaaaataaagtgaaaaagaagcgaaagaaagaaacaaaaggcagagaggttcgcttcggaaagcggagcgacaagttctgctcctcggagtcggagagcgagtcctcagagagtggggaggatgacagggactctctggggagctctggctgcctcaaggggtccccgctggtgctgaaggacccctccctgttcagctccctctctgcctcctccacctcgtctcacgggagctctgccgcccagaagcagaaccccagccacacagaccagcacaccaagcactggcggacagacaattggaaaaccatttcttccccggcttggtcagaggtcagttctttatcagactccacaaggacgagactgacaagcgagtctgactactcctctgagggctccagtgtggaatcgctgaagccagtgaggaagaggcaggagcacaggaagcgagcctccctgtcggagaagaagagccccttcctgtccagcgcggagggcgctgtccccaaactggacaaggaggggaaagttgtcaaaaaacataaaacaaaacacaaacacaaaaacaaggagaagggacagtgttccatcagccaagagctgaagttgaaaagttttacttacgaatatgaggactccaagcagaagtcagataaggctatactgttagagaatgatctttccactgaaaacaagctaaaagtgttaaagcacgatcgcgaccactttaaaaaagaagagaaacttagcaaaatgaaattagaagaaaaagaatggctctttaaagatgaaaaatcactgaagagaatcaaagacacaaacaaagacatcagcaggtctttccgagaagagaaagaccgttcgaataaagcagaaaaggagagatcgctgaaggaaaagtctccgaaagaagaaaaactgagactgtacaaagaggagagaaagaagaaatcaaaagaccggccctcaaaattagagaagaagaatgatttaaaagaggacaaaatttcaaaagagaaggagaagatttttaaagaagataaagaaaaactcaaaaaagaaaaggtttatagggaagattctgcttttgacgaatattgtaacaaaaatcagtttctggagaatgaagacaccaaatttagcctttctgacgatcagcgagatcggtggttttctgacttgtccgattcatcctttgatttcaaaggggaggacagctgggactcgccagtgacagactacagggacatgaagagcgactctgtggccaagctcatcttggagacggtgaaggaggacagcaaggagaggaggcgggacagccgggcccgggagaagcgagactacagagagcccttcttccgaaagaaggacagggactatttggataaaaactctgagaagaggaaagagcagactgaaaagcataaaagtgtccctggctacctttcggaaaaggacaagaagaggagagagtccgcagaggccgggcgggacagaaaggacgccctggagagctgcaaggagcgcagggacggcagggccaagcccgaggaggtgcaccgggaggagctgaaggagtgtggctgcgagagtggcttcaaggacaagtccgacggcgactttgggaagggcctggagccgtgggaacggcaccacccagcacgagagaaggagaagaaggatggccccgataaggaaaggaaggagaagacaaaaccagaaagatacaaagagaaatccagtgacaaggacaaaagtgagaaatcaatcctggaaaaatgtcagaaggacaaagaatttgataaatgttttaaagagaaaaaagataccaaggaaaaacataaagacacacatggcaaagacaaagaaaggaaagcgtctctcgaccaagggaaagagaagaaggagaaggctttccctgggatcatctcagaagacttctctgaaaaaaaagatgacaagaaaggcaaagagaaaagctggtacatcgcagacatcttcacagatgagagtgaggacgacagagacagctgcatggggagcgggttcaagatgggagaggccagcgacttgccgaggacggacggcctccaggagaaggaggaaggacgggaggcctatgcctccgacagacacaggaagtcttctgacaagcagcaccctgagaggcagaaggacaaggagcccagagacaggagaaaggaccgaggggctgccgacgcggggagagacaaaaaagagaaagtctttgaaaagcacaaggagaagaaggataaagagtccacagaaaagtacaaggacaggaaggacagagcctcagtggactccacgcaagataagaaaaataaacagaagctccccgagaaggctgaaaagaagcacgctgccgaagacaaggctaaaagcaaacacaaagagaagtcggacaaagaacattccaaggagaggaagtcctcgagaagtgccgacgcggaaaaaagcctgcttgaaaagttggaagaagaggctctccatgagtacagagaagactccaacgataaaatcagcgaggtctcctctgacagcttcacggaccgagggcaggagccggggctgactgccttcctggaggtctctttcacggagccacctggagacgacaagccgagggagagcgcctgcctccctgagaagctgaaagagaaggagaggcacagacactcctcatcttcatccaagaagagccacgaccgagagcgagccaagaaagagaaggccgagaagaaagagaagggcgaagattacaaggagggcggtagcaggaaggactccggccagtacgaaaaggacttcctggaggcggatgcttacggagtttcttacaacatgaaagctgacatagaagatgagctagataaaaccattgaattgttttctaccgaaaagaaagataaaaatgattccgagagagaaccttccaagaaaatagaaaaggaactaaagccttatggatctagtgccatcaacatcct

SEQ ID NO: 407749 - DNA, 1581 bp, Homo sapiens
gagggcctttgccggggaggcgccgccgccgagcccgcggccagacgccccatcagtagcgtccgcaccgggagccgcggctctcgcccgagccgtgggcgcgcccgaggggcgggctcgcctcccgccgtccctcgcagctctgccgggcccgagcccgcgccgccgccgccgccgccttgccgctcgggccgcgcggcccgggaagcttgcggccgcgggctgcatgggcagcgcccgcgccccgccgctgagccgtcgcggagccgcgcagccctcggagcacgaatatatacagccctgctctgggacacacctccattggatttaaaagacagtcctcgtcagcactgactttcagctatggaatcgcagacggttgatgatgaagcgccggccgtgtaaatgaagatcgggtgaggagcaggacgatgcccaagggtgggtgccctaaagcaccacagcaggaagagcttcccctcagcagcgacatggtggagaagcagactgggaaaaaggataaagataaagtttctctaaccaagaccccaaaactggagcgtggcgatggcgggaaggaggtgagggagcgagccagcaagcggaagctgcccttcaccgcgggcgccaatggggagcagaaggactcggacacaggaccgccggggtcctgcttgtcctggggcagccacgagggagccctcgtcaggagcgccatgggccgaagctgcctgccctctgcacgtggatgtttctttggaacaaggggaaaaattatgattttcttattttgctttgacctgtgaatgacaccctggtctctggtgcctggggtgtgctctctgcagtgctgccaggcacatgctggttccttcagcgttaggtgcttggcaccttcagtcttttcctgacgtcatgtttgttcctggtgcctcagataggagacggctgttctgacggctcctgcttccccattcctggagggaagacagacttagccactggtatctgtgggacttcttggaactctgaatgccagaccttgcccagtgctagaggcgacaagtgtgtgaagttgaagaggcttctcccacctgctcagctgcagtggacccgagcgggcagagagagcagagtgcagcaggggccaggctgtgctcgcaggcggggcaggtgcctggagagcatggcgcccctgggagcctctggccaggaagggcatgtgctctgcagtgtgccgtggaccagtggcctcagctcagtgtgttgacgagggtcccaaggcactcacgtgtgtggggatgttagcaacacacggcgggaagccctgatgcagtttctcaccaagcgtgtagcagaccccacgcaccccacacaggtcaggcaccccacacagggcacagaccccacacaccccacacagggcaggcacctcacacagggcacagaccccacgcacccgacacagggcaggcacctcacacagggcacagaccccacgcatcccacacagggcaggcaccccacacagggcacagacccacgcaccccacacagggcagggatcccacgcagggcaca

SEQ ID NO: 407750 - DNA, 1086 bp, Homo sapiens
cgctacaaggcccgtgacgtggatacaagtataccgcattaagacttgcctcctcatgcggcagcagcacgaggccgcggcctgaacgccgtgcagaggatggagtggcagctgaaggtgcaggaactggaccccgccgggcacaagtccctgtgcgtgaacgaggtgccctccttctacgtgcccatggtcgacgtcaacgacgactttgtattgttgccggcatgacaccgcgggacggccgcaggacgcaggcgagggccgcacggctgcccaggactgctgctgagccccaggggcggaggagggagcgccctgtccacccgggcggggagagaccccgagagagactgcacttggccacagcgcctccatcccttccagactggtccagacgtcggggaggtgaaacacgtctcttctctaccagctgccgcggcgggggcaaagcccccagagcctcactggccccggcgggatgaggagaccatgccgggcgcgcacacacggcagcttctgtttgaaaacggcgaccttcgggcccttttctccagcaactgcagaggcatttcaggagttggagaacggagtacatttttaaaattttttgttccattctgatcaactaaagaaaattaaggtgtccacctctcacaaacagtgacctgcaggtcggaggggcaggagccccatcccagccgtggttctgttgccgccgagctgcgacggcctcagactgggcttcagacctggtgcggagccaggcggagggacacagagccaggactcccagccgtattgaaatggagtcaaatccgcgtggtttgtatcttctttcctttaatcttgggcattttgtttctctttctgagaacgtaacttgaaacactacagagccaataatcatataaaaagtgtatccgtaaacgctgtacagttttatataccttcacaatgtacttttgctgccttctagataatttattttgcaacacattactgcacagttgtaaataacttatgtactgtaacatcactttcagttatgtgtaaagaaataaataaattaattaaaatgctctttgt

SEQ ID NO: 407751 - DNA, 954 bp, Homo sapiens
gcggccgctgcccgccttaatccacagaaaagtacaaggacaggaaggacagagcctcagtggactccacgcaagataagaaaaataaacagaagctccccgagaaggctgaaaagaagcacgctgccgaagacaaggctaaaagcaaacacaaagagaagtcggacaaagaacattccaaggagaggaagtcctcgagaagtgccgacgcggaaaaaagcctgcttgaaaagttggaagaagaggctctccatgagtacagagaagactccaacgataaaatcagcgaggtctcctctgacagcttcacggaccgagggcaggagccggggctgactgccttcctggaggtctctttcacggagccacctggagacgacaagccgagggagagcgcctgcctccctgagaagctgaaagagaaggagaggcacagacactcctcatcttcatccaagaagagccacgaccgagagcgagccaagaaagagaaggccgagaagaaagagaagggcgaagattacaaggagggcggtagcaggaaggactccggccagtacgaaaaggacttcctggaggcggatgcttacggagtttcttacaacatgaaagctgacatagaagatgagctagataaaaccattgaattgttttctaccgaaaagaaagataaaaatgattccgagagagaaccttccaagaaaatagaaaaggaactaaagccttatggatctagtgccatcaacatcctaaaagagaagaagaagagagagaaacacagggagaaatggagagacgagaaggagaggcaccgggacaggcatgcggatgggctgctgcggcatcacagggacgagctcctgcggcatcacagggacgagcagaagcccgccaccagggacaaggacagcccgccccgcgtgctcaaagacaagtccagggacgagggcccga

SEQ ID NO: 407752 - DNA, 396 bp, Homo sapiens
aaaacaaaaaaaaacaaaaacaaaaaacaagacaaacaagaccaaaaacccccgagacaagacgacccacagcgtacgaaggtggggccctggatgactttccagcctcttcaactgacttgctcccctctccttttcttctctttagagacccagcccagggccctcccacccttgcccagacctggtgggcccttcagagggaggggtggacctgtttctctttcactttcatttgctggtgtgagccatggggtgtgtatttgtatgtggggagtaggtgtttgaggttcccgttctttcccttcccaagtctctgggggtggaaaggaggaagagatactagttaaagattttaaaaatgtaaataaaatatacttcccagaaaaaaaaaaa

SEQ ID NO: 407753 - DNA, 1818 bp, Homo sapiens
ccgccgtaccagttgcccagttcgtccctttccacctttacagtgaatgactctgggaggcgtttgggcccagagaagtggatccgccgcttgcgccgcatggagtccgaatcggaaagcggggctgctgctgacacccccccactggagaccctaagcttccatggtgatgaagagattatcgaggtggtagaacttgatcccggtccgccggacccagatgacctggcccaggagatggaagatgtggactttgaggaagaagaggaggaagagggcaacgaagagggctgggttctagaaccccaggaaggggtggtcggcagcatggagggccccgacgatagcgaggtcacctttgcattgcactcagcatctgtgttttgtgtgagcctggaccccaagaccaataccttggcagtgaccgggggtgaagatgacaaagccttcgtatggcggctcagcgatggggagctgctctttgagtgtgcaggccataaagactctgtgacttgtgctggtttcagccatgactccactctagtggccacaggggacatgagtggcctcttgaaagtgtggcaggtggacactaaggaggaggtctggtcctttgaagcgggagacctggagtggatggagtggcatcctcgggcacctgtcctgttggcgggcacagctgacggcaacacctggatgtggaaagtcccgaatggtgactgcaagaccttccagggtcccaactgcccagccacctgtggccgagtcctccctgatgggaagagagctgtggtaggctatgaagatgggaccatcaggatttgggacctgaagcagggaagccctatccatgtactgaaagggactgagggtcaccagggcccactcacctgtgttgctgccaaccaggatggcagcttgatcctaactggctctgtggactgccaggccaagctggtcagtgccaccaccggcaaggtggtgggtgtttttagacctgagactgtggcctcccagcccagcctgggagaaggggaggagagtgagtccaactcggtggagtccttgggcttctgcagtgtgatgcccctggcagctgttggctacctggatgggaccttggccatctatgacctggctacgcagactcttaggcatcagtgtcagcaccagtcgggcatcgtgcagctgctgtgggaggcaggcactgccgtggtatatacctgcagcctggatggcatcgtgcgcctctgggacgcccggaccggccgcctgcttactgactaccggggccacacggctgagatcctggactttgccctcagcaaagatgcctccctggtggtgaccacgtcaggagaccacaaagcgaaagtattttgtgtccaaaggcctgaccgttaatggctgcagcccctgcctgtgtgtctggtgttgaggggacgaagggacccctgcccctgtctgccagcagaggcagtagggcacagagggaagaggagggtggggccctggatgactttccagcctcttcaactgacttgctcccctctccttttcttctctttagagacccagcccagggccctcccacccttgcccagacctggtgggcccttcagagggaggggtggacctgtttctctttcactttcatttgctggtgtgagccatggggtgtgtatttgtatgtggggagtaggtgtttgaggttcccgttctttcccttcccaagtctctgggggtggaaaggaggaagagatactagttaaagattttaaaaatgtaaataaaatatacttcccagaaaaaaaaaaa

SEQ ID NO: 407754 - DNA, 1771 bp, Homo sapiens
tggcgaattcggcacgagggagagagagaagtggatccgccgcttgcgccgcatggagtccgaatcggaaagcggggctgctgctgacacccccccactggagaccctaagcttccatggtgatgaagagattatcgaggtggtagaacttgatcccggtccgccggacccagatgacctggcccaggagatggaagatgtggactttgaggaagaagaggaggaagagggcaacgaagagggctgggttctagaaccccaggaaggggtggtcggcagcatggagggccccgacgatagcgaggtcacctttgcattgcactcagcatctgtgttttgtgtgagcctggaccccaagaccaataccttggcagtgaccgggggtgaagatgacaaagccttcgtatggcggctcagcgatggggagctgctctttgagtgtgcaggccataaagactctgtgacttgtgctggtttcagccatgactccactctagtggccacaggggacatgagtggcctcttgaaagtgtggcaggtggacactaaggaggaggtctggtcctttgaagcgggagacctggagtggatggagtggcatcctcgggcacctgtcctgttggcgggcacagctgacggcaacacctggatgtggaaagtcccgaatggtgactgcaagaccttccagggtcccaactgcccagccacctgtggccgagtcctccctgatgggaagagagctgtggtaggctatgaagatgggaccatcaggatttgggacctgaagcagggaagccctatccatgtactgaaagggactgagggtcaccagggcccactcacctgtgttgctgccaaccaggatggcagcttgatcctaactggctctgtggactgccaggccaagctggtcagtgccaccaccggcaaggtggtgggtgtttttagacctgagactgtggcctcccagcccagcctgggagaaggggaggagagtgagtccaactcggtggagtccttgggcttctgcagtgtgatgcccctggcagctgttggctacctggatgggaccttggccatctatgacctggctacgcagactcttaggcatcagtgtcagcaccagtcgggcatcgtgcagctgctgtgggaggcaggcactgccgtggtatatacctgcagcctggatggcatcgtgcgcctctgggacgcccggaccggccgcctgcttactgactaccggggccacacggctgagatcctggactttgccctcagcaaagatgcctccctggtggtgaccacgtcaggagaccacaaagcgaaagtattttgtgtccaaaggcctgaccgttaatggctgcagcccctgcctgtgtgtctggtgttgaggggacgaagggacccctgcccctgtctgccagcagaggcagtagggcacagagggaagaggagggtggggccctggatgactttccagcctcttcaactgacttgctcccctctccttttcttctctttagagacccagcccagggccctcccacccttgcccagacctggtgggcccttcagagggaggggtggacctgtttctctttcactttcatttgctggtgtgagccatggggtgtgtatttgtatgtggggagtaggtgtttgaggttcccgttctttcccttcccaagtctctgggggtggaaaggaggaagagatactagttaaagattttaaaaatgtaaataaaatatacttcccagaaaaaaaaaaa

SEQ ID NO: 407755 - DNA, 2069 bp, Homo sapiens
aggggctcgagttccgcgtcgtcgcgcagagctgactctgggaggcgtttgggcccagagaagtggatccgccgcttgcgccgcatggagtccgaatcggaaagcggggctgctgctgacacccccccactggagaccctaagcttccatggtgatgaagagattatcgaggtggtagaacttgatcccggtccgccggacccagatgacctggcccaggagatggaagatgtggactttgaggaagaagaggaggaagagggcaacgaagagggctgggttctagaaccccaggaaggggtggtcggcagcatggagggccccgacgatagcgaggtcacctttgcattgcactcagcatctgtgttttgtgtgagcctggaccccaagaccaataccttggcagtgaccgggggtgaagatgacaaagccttcgtatggcggctcagcgatggggagctgctctttgagtgtgcaggccataaagactctgtgacttgtgctggtttcagccatgactccactctagtggccacaggggacatgagtggcctcttgaaagtgtggcaggtggacactaaggaggaggtctggtcctttgaagcgggagacctggagtggatggagtggcatcctcgggcacctgtcctgttggcgggcacagctgacggcaacacctggatgtggaaagtcccgaatggtgactgcaagaccttccagggtcccaactgcccagccacctgtggccgagtcctccctgatgggaagagagctgtggtaggctatgaagatgggaccatcaggatttgggacctgaagcagggaagccctatccatgtactgaaagggactgagggtcaccagggcccactcacctgtgttgctgccaaccaggatggcagcttgatcctaactggctctgtggactgccaggccaagctggtcagtgccaccaccggcaaggtgagtggacctggagcccggctggggcctccgctttcccgactcctctccttccttcctgggtcttcactgtctcctctccccaccgtctttctctccatcaagcacccggattccgtgtcctcctctgatcctctctggctttcaggtggtgggtgtttttagacctgagactgtggcctcccagcccagcctgggagaaggggaggagagtgagtccaactcggtggagtccttgggcttctgcagtgtgtgagtgaggatggggaaaggggtttgtgggaggggcctgggctgggggcccgggaggacggcagggcgtgtgagtccaggccctcatgagtcttcatggtacgctcctctggccagggatgcccctggcagctgttggctacctggatgggaccttggccatctatgacctggctacgcagactcttaggcatcagtgtcagcaccagtcgggcatcgtgcagctgctgtgggaggcaggcactgccgtggtatatacctgcagcctggatggcatcgtgcgcctctgggacgcccggaccggccgcctgcttactgactaccggggccacacggctgagatcctggactttgccctcagcaaagatgcctccctggtggtgaccacgtcaggagaccacaaagcgaaagtattttgtgtccaaaggcctgaccgttaatggctgcagcccctgcctgtgtgtctggtgttgaggggacgaagggacccctgcccctgtctgccagcagaggcagtagggcacagagggaagaggagggtggggccctggatgactttccagcctcttcaactgacttgctcccctctccttttcttctctttagagacccagcccagggccctcccacccttgcccagacctggtgggcccttcagagggaggggtggacctgtttctctttcactttcatttgctggtgtgagccatggggtgtgtatttgtatgtggggagtaggtgtttgaggttcccgttctttcccttcccaagtctctgggggtggaaaggaggaagagatactagttaaagattttaaaaatgtaaataaaatatacttcccagaaaaaaaaaaa

SEQ ID NO: 407756 - DNA, 1730 bp, Homo sapiens
aggggctcgagttccgcgtcgtcgcgcagagctgactctgggaggcgtttgggcccagagaagtggatccgccgcttgcgccgcatggagtccgaatcggaaagcggggctgctgctgacacccccccactggagaccctaagcttccatggtgatgaagagattatcgaggtggtagaacttgatcccggtccgccggacccagatgacctggcccaggagatggaagatgtggactttgaggaagaagaggaggaagagggcaacgaagagggctgggttctagaaccccaggaaggggtggtcggcagcatggagggccccgacgatagcgaggtcacctttgcattgcactcagcatctgtgttttgtgtgagcctggaccccaagaccaataccttggcagtgaccgggggtgaagatgacaaagccttcgtatggcggctcagcgatggggagctgctctttgagtgtgcaggccataaagactctgtgacttgtgctggtttcagccatgactccactctagtggccacaggggacatgagtggcctcttgaaagtgtggcaggtggacactaaggaggaggtctggtcctttgaagcgggagacctggagtggatggagtggcatcctcgggcacctgtcctgttggcgggcacagctgacggcaacacctggatgtggaaagtcccgaatggtgactgcaagaccttccagggtcccaactgcccagccacctgtggccgagtcctccctgatgggaagagagctgtggtaggctatgaagatgggaccatcaggatttgggacctgaagcagggaagccctatccatgtactgaaagggactgagggtcaccagggcccactcacctgtgttgctgccaaccaggatggcagcttgatcctaactggctctgtggactgccaggccaagctggtcagtgccaccaccggcaaggtggtgggtgtttttagacctgagactgtggcctcccagcccagcctgggagaaggggaggagagtgagtccaactcggtggagtccttgggcttctgcagtgtgatgcccctggcagctgttggctacctggatgggaccttggccatctatgacctggctacgcagactcttaggcatcagtgtcagcaccagtcgggcatcgtgcagctgctgtgggaggcaggcactgccgtggtatatacctgcagcctggatggcatcgtgcgcctctgggacgcccggaccggccgcctgcttactgactaccggggccacacggctgagatcctggactttgccctcagcaaagatgcctccctggtggtgaccacgtcaggagaccacaaagcgaaagtattttgtgtccaaaggcctgaccgttaatggctgcagcccctgcctgtgtgtcggtggggccctggatgactttccagcctcttcaactgacttgctcccctctccttttcttctctttagagacccagcccagggccctcccacccttgcccagacctggtgggcccttcagagggaggggtggacctgtttctctttcactttcatttgctggtgtgagccatggggtgtgtatttgtatgtggggagtaggtgtttgaggttcccgttctttcccttcccaagtctctgggggtggaaaggaggaagagatactagttaaagattttaaaaatgtaaataaaatatacttcccagaaaaaaaaaaa

SEQ ID NO: 407757 - DNA, 1791 bp, Homo sapiens
  misc_feature (1331)..(1331): n is a, c, g, or t
  misc_feature (1333)..(1333): n is a, c, g, or t
  misc_feature (1386)..(1386): n is a, c, g, or t
  misc_feature (1391)..(1391): n is a, c, g, or t
aggggctcgagttccgcgtcgtcgcgcagagctgactctgggaggcgtttgggcccagagaagtggatccgccgcttgcgccgcatggagtccgaatcggaaagcggggctgctgctgacacccccccactggagaccctaagcttccatggtgatgaagagattatcgaggtggtagaacttgatcccggtccgccggacccagatgacctggcccaggagatggaagatgtggactttgaggaagaagaggaggaagagggcaacgaagagggctgggttctagaaccccaggaaggggtggtcggcagcatggagggccccgacgatagcgaggtcacctttgcattgcactcagcatctgtgttttgtgtgagcctggaccccaagaccaataccttggcagtgaccgggggtgaagatgacaaagccttcgtatggcggctcagcgatggggagctgctctttgagtgtgcaggccataaagactctgtgacttgtgctggtttcagccatgactccactctagtggccacaggggacatgagtggcctcttgaaagtgtggcaggtggacactaaggaggaggtctggtcctttgaagcgggagacctggagtggatggagtggcatcctcgggcacctgtcctgttggcgggcacagctgacggcaacacctggatgtggaaagtcccgaatggtgactgcaagaccttccagggtcccaactgcccagccacctgtggccgagtcctccctgatgggaagagagctgtggtaggctatgaagatgggaccatcaggatttgggacctgaagcagggaagccctatccatgtactgaaagggactgagggtcaccagggcccactcacctgtgttgctgccaaccaggatggcagcttgatcctaactggctctgtggactgccaggccaagctggtcagtgccaccaccggcaaggtggtgggtgtttttagacctgagactgtggcctcccagcccagcctgggagaaggggaggagagtgagtccaactcggtggagtccttgggcttctgcagtgtgatgcccctggcagctgttggctacctggatgggaccttggccatctatgacctggctacgcagactcttaggcatcagtgtcagcaccagtcgggcatcgtgcagctgctgtgggaggcaggcactgccgtggtatatacctgcagcctggatggcatcgtgcgcctctgggacgcccggaccggccgcctgcttactgactaccggggccacacggctgagatcctggactttgccctcagcaaagattcctccctggtgtnanccacgtttttattttttttttttttatattttttttttttttaaattcttttnttttntttgttttcattggtgttgaggggacgaagggacccctgcccctgtctgccagcagaggcagtagggcacagagggaagaggagggtggggccctggatgactttccagcctcttcaactgacttgctcccctctccttttcttctctttagagacccagcccagggccctcccacccttgcccagacctggtgggcccttcagagggaggggtggacctgtttctctttcactttcatttgctggtgtgagccatggggtgtgtatttgtatgtggggagtaggtgtttgaggttcccgttctttcccttcccaagtctctgggggtggaaaggaggaagagatactagttaaagattttaaaaatgtaaataaaatatacttcccagaaaaaaaaaaa

SEQ ID NO: 407758 - DNA, 2098 bp, Homo sapiens
aggggctcgagttccgcgtcgtcgcgcagagctgactctgggaggcgtttgggcccagagaagtggatccgccgcttgcgccgcatggagtccgaatcggaaagcggggctgctgctgacacccccccactggagaccctaagcttccatggtgatgaagagattatcgaggtggtagaacttgatcccggtccgccggacccagatgacctggcccaggagatggaagatgtggactttgaggaagaagaggaggaagagggcaacgaagagggctgggttctagaaccccaggaaggggtggtcggcagcatggagggccccgacgatagcgaggtcacctttgcattgcactcagcatctgtgttttgtgtgagcctggaccccaagaccaataccttggcagtgaccgggggtgaagatgacaaagccttcgtatggcggctcagcgatggggagctgctctttgagtgtgcaggccataaagactctgtgacttgtgctggtttcagccatgactccactctagtggccacaggggacatgagtggcctcttgaaagtgtggcaggtggacactaaggaggaggtctggtcctttgaagcgggagacctggagtggatggagtggcatcctcgggcacctgtcctgttggcgggcacagctgacggcaacacctggatgtggaaagtcccgaatggtgactgcaagaccttccagggtcccaactgcccagccacctgtggccgagtcctccctgatggtgagagcacctcccttgagtgacctttcctgggtgcagaggccgaatcccgggatatacacctcccagagcagccttctgggtcacagccggcaaaatctgaggcctgctgtttgcagtgctgacctcctgggccccaaagttcacagcgcctccttcctgctctgaactcacctgtgattcctggggcagtgtctgggcccttccactcttctttcctctccctctccccattcccttgcttagtgtatgtgagcgtgccctctgccctctcttcatctgtgcctctcttcagggaagagagctgtggtaggctatgaagatgggaccatcaggatttgggacctgaagcagggaagccctatccatgtactgaaagggactgagggtcaccagggcccactcacctgtgttgctgccaaccaggatggcagcttgatcctaactggctctgtggactgccaggccaagctggtcagtgccaccaccggcaaggtggtgggtgtttttagacctgagactgtggcctcccagcccagcctgggagaaggggaggagagtgagtccaactcggtggagtccttgggcttctgcagtgtgatgcccctggcagctgttggctacctggatgggaccttggccatctatgacctggctacgcagactcttaggcatcagtgtcagcaccagtcgggcatcgtgcagctgctgtgggaggcaggcactgccgtggtatatacctgcagcctggatggcatcgtgcgcctctgggacgcccggaccggccgcctgcttactgactaccggggccacacggctgagatcctggactttgccctcagcaaagatgcctccctggtggtgaccacgtcaggagaccacaaagcgaaagtattttgtgtccaaaggcctgaccgttaatggctgcagcccctgcctgtgtgtctggtgttgaggggacgaagggacccctgcccctgtctgccagcagaggcagtagggcacagagggaagaggagggtggggccctggatgactttccagcctcttcaactgacttgctcccctctccttttcttctctttagagacccagcccagggccctcccacccttgcccagacctggtgggcccttcagagggaggggtggacctgtttctctttcactttcatttgctggtgtgagccatggggtgtgtatttgtatgtggggagtaggtgtttgaggttcccgttctttcccttcccaagtctctgggggtggaaaggaggaagagatactagttaaagattttaaaaatgtaaataaaatatacttcccagaaaaaaaaaaa

SEQ ID NO: 407759 - DNA, 1773 bp, Homo sapiens
ctggccagccgtggcctcccgtcctgtgtcccgcgcgcccccgcggaccccggtgtgtctgactccaccttcccttctcgccacatgacccgccccagcctcaggcctcctcatgcttctctccgtacctcttaccgcctcccgagccccatcttctaaccctctccccaaagcaatgacctggcccaggagatggaagatgtggactttgaggaagaagaggaggaagagggcaacgaagagggctgggttctagaaccccaggaaggggtggtcggcagcatggagggccccgacgatagcgaggtcacctttgcattgcactcagcatctgtgttttgtgtgagcctggaccccaagaccaataccttggcagtgaccgggggtgaagatgacaaagccttcgtatggcggctcagcgatggggagctgctctttgagtgtgcaggccataaagactctgtgacttgtgctggtttcagccatgactccactctagtggccacaggggacatgagtggcctcttgaaagtgtggcaggtggacactaaggaggaggtctggtcctttgaagcgggagacctggagtggatggagtggcatcctcgggcacctgtcctgttggcgggcacagctgacggcaacacctggatgtggaaagtcccgaatggtgactgcaagaccttccagggtcccaactgcccagccacctgtggccgagtcctccctgatgggaagagagctgtggtaggctatgaagatgggaccatcaggatttgggacctgaagcagggaagccctatccatgtactgaaagggactgagggtcaccagggcccactcacctgtgttgctgccaaccaggatggcagcttgatcctaactggctctgtggactgccaggccaagctggtcagtgccaccaccggcaaggtggtgggtgtttttagacctgagactgtggcctcccagcccagcctgggagaaggggaggagagtgagtccaactcggtggagtccttgggcttctgcagtgtgatgcccctggcagctgttggctacctggatgggaccttggccatctatgacctggctacgcagactcttaggcatcagtgtcagcaccagtcgggcatcgtgcagctgctgtgggaggcaggcactgccgtggtatatacctgcagcctggatggcatcgtgcgcctctgggacgcccggaccggccgcctgcttactgactaccggggccacacggctgagatcctggactttgccctcagcaaagatgcctccctggtggtgaccacgtcaggagaccacaaagcgaaagtattttgtgtccaaaggcctgaccgttaatggctgcagcccctgcctgtgtgtctggtgttgaggggacgaagggacccctgcccctgtctgccagcagaggcagtagggcacagagggaagaggagggtggggccctggatgactttccagcctcttcaactgacttgctcccctctccttttcttctctttagagacccagcccagggccctcccacccttgcccagacctggtgggcccttcagagggaggggtggacctgtttctctttcactttcatttgctggtgtgagccatggggtgtgtatttgtatgtggggagtaggtgtttgaggttcccgttctttcccttcccaagtctctgggggtggaaaggaggaagagatactagttaaagattttaaaaatgtaaataaaatatacttcccagaaaaaaaaaaa

SEQ ID NO: 407760 - DNA, 1441 bp, Homo sapiens
  misc_feature (27)..(27): n is a, c, g, or t
cggacgcgtgggtcgacccacgcgtcngaccaataccttggcagtgaccgggggtgaagatgacaaagccttcgtatggcggctcagcgatggggagctgctctttgagtgtgcaggccataaagactctgtgacttgtgctggtttcagccatgactccactctagtggccacaggggacatgagtggcctcttgaaagtgtggcaggtggacactaaggaggaggtctggtcctttgaagcgggagacctggagtggatggagtggcatcctcgggcacctgtcctgttggcgggcacagctgacggcaacacctggatgtggaaagtcccgaatggtgactgcaagaccttccagggtcccaactgcccagccacctgtggccgagtcctccctgatgggaagagagctgtggtaggctatgaagatgggaccatcaggatttgggacctgaagcagggaagccctatccatgtactgaaagggactgagggtcaccagggcccactcacctgtgttgctgccaaccaggatggcagcttgatcctaactggctctgtggactgccaggccaagctggtcagtgccaccaccggcaaggtggtgggtgtttttagacctgagactgtggcctcccagcccagcctgggagaaggggaggagagtgagtccaactcggtggagtccttgggcttctgcagtgtgatgcccctggcagctgttggctacctggatgggaccttggccatctatgacctggctacgcagactcttaggcatcagtgtcagcaccagtcgggcatcgtgcagctgctgtgggaggcaggcactgccgtggtatatacctgcagcctggatggcatcgtgcgcctctgggacgcccggaccggccgcctgcttactgactaccggggccacacggctgagatcctggactttgccctcagcaaagatgcctccctggtggtgaccacgtcaggagaccacaaagcgaaagtattttgtgtccaaaggcctgaccgttaatggctgcagcccctgcctgtgtgtctggtgttgaggggacgaagggacccctgcccctgtctgccagcagaggcagtagggcacagagggaagaggagggtggggccctggatgactttccagcctcttcaactgacttgctcccctctccttttcttctctttagagacccagcccagggccctcccacccttgcccagacctggtgggcccttcagagggaggggtggacctgtttctctttcactttcatttgctggtgtgagccatggggtgtgtatttgtatgtggggagtaggtgtttgaggttcccgttctttcccttcccaagtctctgggggtggaaaggaggaagagatactagttaaagattttaaaaatgtaaataaaatatacttcccagaaaaaaaaaaa

SEQ ID NO: 407761 - DNA, 1365 bp, Homo sapiens
aacgtaggctagtacgaggctggggtgtgaatcggccgaggccataaagactctgtgacttgtgctggtttcagccatgactccactctagtggccacaggggacatgagtggcctcttgaaagtgtggcaggtggacactaaggaggaggtctggtcctttgaagcgggagacctggagtggatggagtggcatcctcgggcacctgtcctgttggcgggcacagctgacggcaacacctggatgtggaaagtcccgaatggtgactgcaagaccttccagggtcccaactgcccagccacctgtggccgagtcctccctgatgggaagagagctgtggtaggctatgaagatgggaccatcaggatttgggacctgaagcagggaagccctatccatgtactgaaagggactgagggtcaccagggcccactcacctgtgttgctgccaaccaggatggcagcttgatcctaactggctctgtggactgccaggccaagctggtcagtgccaccaccggcaaggtggtgggtgtttttagacctgagactgtggcctcccagcccagcctgggagaaggggaggagagtgagtccaactcggtggagtccttgggcttctgcagtgtgatgcccctggcagctgttggctacctggatgggaccttggccatctatgacctggctacgcagactcttaggcatcagtgtcagcaccagtcgggcatcgtgcagctgctgtgggaggcaggcactgccgtggtatatacctgcagcctggatggcatcgtgcgcctctgggacgcccggaccggccgcctgcttactgactaccggggccacacggctgagatcctggactttgccctcagcaaagatgcctccctggtggtgaccacgtcaggagaccacaaagcgaaagtattttgtgtccaaaggcctgaccgttaatggctgcagcccctgcctgtgtgtctggtgttgaggggacgaagggacccctgcccctgtctgccagcagaggcagtagggcacagagggaagaggagggtggggccctggatgactttccagcctcttcaactgacttgctcccctctccttttcttctctttagagacccagcccagggccctcccacccttgcccagacctggtgggcccttcagagggaggggtggacctgtttctctttcactttcatttgctggtgtgagccatggggtgtgtatttgtatgtggggagtaggtgtttgaggttcccgttctttcccttcccaagtctctgggggtggaaaggaggaagagatactagttaaagattttaaaaatgtaaataaaatatacttcccagaaaaaaaaaaa

SEQ ID NO: 407762 - DNA, 1003 bp, Homo sapiens
aggggctcgagttccgcgtcgtcgcgcagagctgactctgggaggcgtttgggcccagagaagtggatccgccgcttgcgccgcatggagtccgaatcggaaagcggggctgctgctgacacccccccactggagaccctaagcttccatggtgatgaagagattatcgaggtggtagaacttgatcccggtccgccggacccagatgacctggcccaggagatggaagatgtggactttgaggaagaagaggaggaagagggcaacgaagagggctgggttctagaaccccaggaaggggtggtcggcagcatggagggccccgacgatagcgaggtcacctttgcattgcactcagcatctgtgttttgtgtgagcctggaccccaagaccaataccttggcagtgaccgggggtgaagatgacaaagccttcgtatggcggctcagcgatggggagctgctctttgagtgtgcaggccataaagactctgtgacttgtgctggtttcagccatgactccactctagtggccacaggggacatgagtggcctcttgaaagtgtggcaggtggacactaaggaggaggtctggtcctttgaagcgggagacctggagtggatggagtggcatcctcgggcacctgtcctgttggcgggcacagctgacggcaacacctggatgtggaaagtcccgaatggtgactgcaagaccttccagggtcccaactgcccagccacctgtggccgagtcctccctgatgggaagagagctgtggtaggctatgaagatgggaccatcaggatttgggacctgaagcactgtttctctttcactttcatttgctggtgtgagccatggggtgtgtatttgtatgtggggagtaggtgtttgaggttcccgttctttcccttcccaagtctctgggggtggaaaggaggaagagatactagttaaagattttaaaaatgtaaataaaatatacttcccagaaaaaaaaaaa

SEQ ID NO: 407763 - DNA, 1002 bp, Homo sapiens
gagatttaggctaggtacgaggctgggtgttagactctgggaggcgtttgggcccagagaagtggatccgccgcttgcgccgcatggagtccgaatcggaaagcggggctgctgctgacacccccccactggagaccctaagcttccatggtgatgaagagattatcgaggtggtagaacttgatcccggtccgccggacccagatgacctggcccaggagatggaagatgtggactttgaggaagaagaggaggaagagggcaacgaagagggctgggttctagaaccccaggaaggggtggtcggcagcatggagggccccgacgatagcgaggtcacctttgcattgcactcagcatctgtgttttgtgtgagcctggaccccaagaccaataccttggcagtgaccgggggtgaagatgacaaagccttcgtatggcggctcagcgatggggagctgctctttgagtgtgcaggccataaagactctgtgacttgtgctggtttcagccatgactccactctagtggccacaggggacatgagtggcctcttgaaagtgtggcaggtggacactaaggaggaggtctggtcctttgaagcgggagacctggagtggatggagtggcatcctcgggcacctgtcctgttggcgggcacagctgacggcaacacctggatgtggaaagtcccgaatggtgactgcaagaccttccagggtcccaactgcccagccacctgtggccgagtcctccctgatgggaagagagctgtggtaggctatgaagatgggaccatcaggatttgggacctgaagcactgtttctctttcactttcatttgctggtgtgagccatggggtgtgtatttgtatgtggggagtaggtgtttgaggttcccgttctttcccttcccaagtctctgggggtggaaaggaggaagagatactagttaaagattttaaaaatgtaaataaaatatacttcccagaaaaaaaaaaa

SEQ ID NO: 407764 - DNA, 444 bp, Homo sapiens
ccgccgtaccagttgcccagttcgtccctttccacctttacagtgaatgactctgggaggcgtttgggcccagagaagtggatccgccgcttgcgccgcatggagtccgaatcggaaagcggggctgctgctgacacccccccactggagaccctaagcttccatggtgatgaagagattatcgaggtggtagaacttgatcccggtccgccggacccagccttgcccagacctggtgggcccttcagagggaggggtggacctgtttctctttcactttcatttgctggtgtgagccatggggtgtgtatttgtatgtggggagtaggtgtttgaggttcccgttctttcccttcccaagtctctgggggtggaaaggaggaagagatactagttaaagattttaaaaatgtaaataaaatatacttcccagaaaaaaaaaaa

SEQ ID NO: 407765 - DNA, 520 bp, Homo sapiens
ccgccgtaccagttgcccagttcgtccctttccacctttacagtgaatgactctgggaggcgtttgggcccagagaagtggatccgccgcttgcgccgcatggagtccgaatcggaaagcggggctgctgctgacacccccccactggagaccctaagcttccatggtgatgaagagattatcgaggtggtagaacttgatcccggtccgccggacccagatgacctggcccaggagatggaagatgtggactttgaggaagaagaggaggaagagggcaacgaagagggctgggttctagaaccccaggaaggggtggtcggcagcatggagggccccgacgatagcgaggtcacctttgcattgcactcaggtaggtctttgaggcgatccacctcaaatcagtttaggtgggcgtgtaagcattaaacatcagccatggacagaacgttatgggggacacagagatgggcaagatgctggccttgcgctggaggagcccacaggtgggaaagtgtgg

SEQ ID NO: 407766 - DNA, 1803 bp, Homo sapiens
aggggctcgagttccgcgtcgtcgcgcagagctgactctgggaggcgtttgggcccagagaagtggatccgccgcttgcgccgcatggagtccgaatcggaaagcggggctgctgctgacacccccccactggagaccctaagcttccatggtgatgaagagattatcgaggtggtagaacttgatcccggtccgccggacccagatgacctggcccaggagatggaagatgtggactttgaggaagaagaggaggaagagggcaacgaagagggctgggttctagaaccccaggaaggggtggtcggcagcatggagggccccgacgatagcgaggtcacctttgcattgcactcagcatctgtgttttgtgtgagcctggaccccaagaccaataccttggcagtgaccgggggtgaagatgacaaagccttcgtatggcggctcagcgatggggagctgctctttgagtgtgcaggccataaagactctgtgacttgtgctggtttcagccatgactccactctagtggccacaggggacatgagtggcctcttgaaagtgtggcaggtggacactaaggaggaggtctggtcctttgaagcgggagacctggagtggatggagtggcatcctcgggcacctgtcctgttggcgggcacagctgacggcaacacctggatgtggaaagtcccgaatggtgactgcaagaccttccagggtcccaactgcccagccacctgtggccgagtcctccctgatgggaagagagctgtggtaggctatgaagatgggaccatcaggatttgggacctgaagcagggaagccctatccatgtactgaaagggactgagggtcaccagggcccactcacctgtgttgctgccaaccaggatggcagcttgatcctaactggctctgtggactgccaggccaagctggtcagtgccaccaccggcaaggtggtgggtgtttttagacctgagactgtggcctcccagcccagcctgggagaaggggaggagagtgagtccaactcggtggagtccttgggcttctgcagtgtgatgcccctggcagctgttggctacctggatgggaccttggccatctatgacctggctacgcagactcttaggcatcagtgtcagcaccagtcgggcatcgtgcagctgctgtgggaggcaggcactgccgtggtatatacctgcagcctggatggcatcgtgcgcctctgggacgcccggaccggccgcctgcttactgactaccggggccacacggctgagatcctggactttgccctcagcaaagatgcctccctggtggtgaccacgtcaggagaccacaaagcgaaagtattttgtgtccaaaggcctgaccgttaatggctgcagcccctgcctgtgtgtctggtgttgaggggacgaagggacccctgcccctgtctgccagcagaggcagtagggcacagagggaagaggagggtggggccctggatgactttccagcctcttcaactgacttgctcccctctccttttcttctctttagagacccagcccagggccctcccacccttgcccagacctggtgggcccttcagagggaggggtggacctgtttctctttcactttcatttgctggtgtgagccatggggtgtgtatttgtatgtggggagtaggtgtttgaggttcccgttctttcccttcccaagtctctgggggtggaaaggaggaagagatactagttaaagattttaaaaatgtaaataaaatatacttcccagaaaaaaaaaaa

SEQ ID NO: 407767 - DNA, 1921 bp, Homo sapiens
aggggctcgagttccgcgtcgtcgcgcagagctgactctgggaggcgtttgggcccagagaagtggatccgccgcttgcgccgcatggagtccgaatcggaaagcggggctgctgctgacacccccccactggagaccctaagcttccatggtgatgaagagattatcgaggtggtagaacttgatcccggtccgccggacccagatgacctggcccaggagatggaagatgtggactttgaggaagaagaggaggaagagggcaacgaagagggctgggttctagaaccccaggaaggggtggtcggcagcatggagggccccgacgatagcgaggtcacctttgcattgcactcagcatctgtgttttgtgtgagcctggaccccaagaccaataccttggcagtgaccgggggtgaagatgacaaagccttcgtatggcggctcagcgatggggagctgctctttgagtgtgcaggccataaagactctgtgacttgtgctggtttcagccatgactccactctagtggccacaggggacatgagtggcctcttgaaagtgtggcaggtggacactaaggaggaggtctggtcctttgaagcgggagacctggagtggatggagtggcatcctcgggcacctgtcctgttggcgggcacagctgacggcaacacctggatgtggaaagtcccgaatggtgactgcaagaccttccagggtcccaactgcccagccacctgtggccgagtcctccctgatgggaagagagctgtggtaggctatgaagatgggaccatcaggatttgggacctgaagcagggaagccctatccatgtactgaaagggactgagggtcaccagggcccactcacctgtgttgctgccaaccaggatggcagcttgatcctaactggctctgtggactgccaggccaagctggtcagtgccaccaccggcaaggtggtgggtgtttttagacctgagactgtggcctcccagcccagcctgggagaaggggaggagagtgagtccaactcggtggagtccttgggcttctgcagtgtgtgagtgaggatggggaaaggggtttgtgggaggggcctgggctgggggcccgggaggacggcagggcgtgtgagtccaggccctcatgagtcttcatggtacgctcctctggccagggatgcccctggcagctgttggctacctggatgggaccttggccatctatgacctggctacgcagactcttaggcatcagtgtcagcaccagtcgggcatcgtgcagctgctgtgggaggcaggcactgccgtggtatatacctgcagcctggatggcatcgtgcgcctctgggacgcccggaccggccgcctgcttactgactaccggggccacacggctgagatcctggactttgccctcagcaaagatgcctccctggtggtgaccacgtcaggagaccacaaagcgaaagtattttgtgtccaaaggcctgaccgttaatggctgcagcccctgcctgtgtgtctggtgttgaggggacgaagggacccctgcccctgtctgccagcagaggcagtagggcacagagggaagaggagggtggggccctggatgactttccagcctcttcaactgacttgctcccctctccttttcttctctttagagacccagcccagggccctcccacccttgcccagacctggtgggcccttcagagggaggggtggacctgtttctctttcactttcatttgctggtgtgagccatggggtgtgtatttgtatgtggggagtaggtgtttgaggttcccgttctttcccttcccaagtctctgggggtggaaaggaggaagagatactagttaaagattttaaaaatgtaaataaaatatacttcccagaaaaaaaaaaa

SEQ ID NO: 407768 - DNA, 1744 bp, Homo sapiens
aggggctcgagttccgcgtcgtcgcgcagagctgactctgggaggcgtttgggcccagagaagtggatccgccgcttgcgccgcatggagtccgaatcggaaagcggggctgctgctgacacccccccactggagaccctaagcttccatggtgatgaagagattatcgaggtggtagaacttgatcccggtccgccggacccagatgacctggcccaggagatggaagatgtggactttgaggaagaagaggaggaagagggcaacgaagagggctgggttctagaaccccaggaaggggtggtcggcagcatggagggccccgacgatagcgaggtcacctttgcattgcactcagcatctgtgttttgtgtgagcctggaccccaagaccaataccttggcagtgaccgggggtgaagatgacaaagccttcgtatggcggctcagcgatggggagctgctctttgagtgtgcaggccataaagactctgtgacttgtgctggtttcagccatgactccactctagtggccacaggggacatgagtggcctcttgaaagtgtggcaggtggacactaaggaggaggtctggtcctttgaagcgggagacctggagtggatggagtggcatcctcgggcacctgtcctgttggcgggcacagctgacggcaacacctggatgtggaaagtcccgaatggtgactgcaagaccttccagggtcccaactgcccagccacctgtggccgagtcctccctgatgggaagagagctgtggtaggctatgaagatgggaccatcaggatttgggacctgaagcagggaagccctatccatgtactgaaagggactgagggtcaccagggcccactcacctgtgttgctgccaaccaggatggcagcttgatcctaactggctctgtggactgccaggccaagctggtcagtgccaccaccggcaaggtggtgggtgtttttagacctgagactgtggcctcccagcccagcgatgcccctggcagctgttggctacctggatgggaccttggccatctatgacctggctacgcagactcttaggcatcagtgtcagcaccagtcgggcatcgtgcagctgctgtgggaggcaggcactgccgtggtatatacctgcagcctggatggcatcgtgcgcctctgggacgcccggaccggccgcctgcttactgactaccggggccacacggctgagatcctggactttgccctcagcaaagatgcctccctggtggtgaccacgtcaggagaccacaaagcgaaagtattttgtgtccaaaggcctgaccgttaatggctgcagcccctgcctgtgtgtctggtgttgaggggacgaagggacccctgcccctgtctgccagcagaggcagtagggcacagagggaagaggagggtggggccctggatgactttccagcctcttcaactgacttgctcccctctccttttcttctctttagagacccagcccagggccctcccacccttgcccagacctggtgggcccttcagagggaggggtggacctgtttctctttcactttcatttgctggtgtgagccatggggtgtgtatttgtatgtggggagtaggtgtttgaggttcccgttctttcccttcccaagtctctgggggtggaaaggaggaagagatactagttaaagattttaaaaatgtaaataaaatatacttcccagaaaaaaaaaaa

SEQ ID NO: 407769 - DNA, 1764 bp, Homo sapiens
aggggctcgagttccgcgtcgtcgcgcagagctgactctgggaggcgtttgggcccagagaagtggatccgccgcttgcgccgcatggagtccgaatcggaaagcggggctgctgctgacacccccccactggagaccctaagcttccatggtgatgaagagattatcgaggtggtagaacttgatcccggtccgccggacccagatgacctggcccaggagatggaagatgtggactttgaggaagaagaggaggaagagggcaacgaagagggctgggttctagaaccccaggaaggggtggtcggcagcatggagggccccgacgatagcgaggtcacctttgcattgcactcagcatctgtgttttgtgtgagcctggaccccaagaccaataccttggcagtgaccgggggtgaagatgacaaagccttcgtatggcggctcagcgatggggagctgctctttgagtgtgcaggccataaagactctgtgacttgtgctggtttcagccatgactccactctagtggccacaggggacatgagtggcctcttgaaagtgtggcaggtggacactaaggaggaggtctggtcctttgaagcgggagacctggagtggatggagtggcatcctcgggcacctgtcctgttggcgggcacagctgacggcaacacctggatgtggaaagtcccgaatggtgactgcaagaccttccagggtcccaactgcccagccacctgtggccgagtcctccctgatgggaagagagctgtggtaggctatgaagatgggaccatcaggatttgggacctgaagcagggaagccctatccatgtactgaaagggactgagggtcaccagggcccactcacctgtgttgctgccaaccaggatggcagcttgatcctaactggctctgtggactgccaggccaagctggtcagtgccaccaccggcaaggtggtgggtgtttttagacctgagactgtggcctcccagcccagcctgggagaaggggaggagagtgagtccaactcggtggagtccttgggcttctgcagtgtgatgcccctggcagctgttggctacctggatgggaccttggccatctatgacctggctacgcagactcttaggcatcagtgtcagcaccagtcgggcatcgtgcagctgctgtgggaggcaggcactgccgtggtatatacctgcagcctggatggcatcgtgcgcctctgggacgcccggaccggccgcctgcttactgactaccggggccacacggctgagatcctggactttgccctcagcaaagatgcctccctggtggtgaccacgtcaggagaccacaaagcgaaagtattttgtgtccaaaggcctgaccgttaatggctgcagcccctgcctgtgtgtctggtgttgaggggacgaagggacccctgcccctgtctgccagcagaggcagtagggcacagagggaagaggagttgctcccctctccttttcttctctttagagacccagcccagggccctcccacccttgcccagacctggtgggcccttcagagggaggggtggacctgtttctctttcactttcatttgctggtgtgagccatggggtgtgtatttgtatgtggggagtaggtgtttgaggttcccgttctttcccttcccaagtctctgggggtggaaaggaggaagagatactagttaaagattttaaaaatgtaaataaaatatacttcccagaaaaaaaaaaa

SEQ ID NO: 407770 - DNA, 1662 bp, Homo sapiens
aggggctcgagttccgcgtcgtcgcgcagagctgactctgggaggcgtttgggcccagagaagtggatccgccgcttgcgccgcatggagtccgaatcggaaagcggggctgctgctgacacccccccactggagaccctaagcttccatggtgatgaagagattatcgaggtggtagaacttgatcccggtccgccggacccagatgacctggcccaggagatggaagatgtggactttgaggaagaagaggaggaagagggcaacgaagagggctgggttctagaaccccaggaaggggtggtcggcagcatggagggccccgacgatagcgaggtcacctttgcattgcactcagcatctgtgttttgtgtgagcctggaccccaagaccaataccttggcagtgaccgggggtgaagatgacaaagccttcgtatggcggctcagcgatggggagctgctctttgagtgtgcaggccataaagactctgtgacttgtgctggtttcagccatgactccactctagtggccacaggggacatgagtggcctcttgaaagtgtggcaggtggacactaaggaggaggtctggtcctttgaagcgggagacctggagtggatggagtggcatcctcgggcacctgtcctgttggcgggcacagctgacggcaacacctggatgtggaaagtcccgaatggtgactgcaagaccttccagggtcccaactgcccagccacctgtggccgagtcctccctgatgggaagagagctgtggtaggctatgaagatgggaccatcaggatttgggacctgaagcagggaagccctatccatgtactgaaagggactgagggtcaccagggcccactcacctgtgttgctgccaaccaggatggcagcttgatcctaactggctctgtggactgccaggccaagctggtcagtgccaccaccggcaaggtggtgggtgtttttagacctgagactgtggcctcccagcccagcctgggagaaggggaggagagtgagtccaactcggtggagtccttgggcttctgcagtgtgatgcccctggcagctgttggctacctggatgggaccttggccatctatgacctggctacgcagactcttaggcatcagtgtcagcaccagtcgggcatcgtgcagctgctgtgggaggcaggcactgccgtggtatatacctgcagcctggatggcatcgtgcgcctctgggacgcccggaccggccgcctgcttactgactaccggggccacacggctgagatcctggactttgccctcagcaaagatgcctccctggtggtgaccacgtcaggagaccacaaagcgaaagtattttgtgtccaaaggcctgaccgttaatggctgcagcccctgcctgtgtgtcagacccagcccagggccctcccacccttgcccagacctggtgggcccttcagagggaggggtggacctgtttctctttcactttcatttgctggtgtgagccatggggtgtgtatttgtatgtggggagtaggtgtttgaggttcccgttctttcccttcccaagtctctgggggtggaaaggaggaagagatactagttaaagattttaaaaatgtaaataaaatatacttcccagaaaaaaaaaaa

SEQ ID NO: 407771 - DNA, 1650 bp, Homo sapiens
ctggccagccgtggcctcccgtcctgtgtcccgcgcgcccccgcggaccccgatgacctggcccaggagatggaagatgtggactttgaggaagaagaggaggaagagggcaacgaagagggctgggttctagaaccccaggaaggggtggtcggcagcatggagggccccgacgatagcgaggtcacctttgcattgcactcagcatctgtgttttgtgtgagcctggaccccaagaccaataccttggcagtgaccgggggtgaagatgacaaagccttcgtatggcggctcagcgatggggagctgctctttgagtgtgcaggccataaagactctgtgacttgtgctggtttcagccatgactccactctagtggccacaggggacatgagtggcctcttgaaagtgtggcaggtggacactaaggaggaggtctggtcctttgaagcgggagacctggagtggatggagtggcatcctcgggcacctgtcctgttggcgggcacagctgacggcaacacctggatgtggaaagtcccgaatggtgactgcaagaccttccagggtcccaactgcccagccacctgtggccgagtcctccctgatgggaagagagctgtggtaggctatgaagatgggaccatcaggatttgggacctgaagcagggaagccctatccatgtactgaaagggactgagggtcaccagggcccactcacctgtgttgctgccaaccaggatggcagcttgatcctaactggctctgtggactgccaggccaagctggtcagtgccaccaccggcaaggtggtgggtgtttttagacctgagactgtggcctcccagcccagcctgggagaaggggaggagagtgagtccaactcggtggagtccttgggcttctgcagtgtgatgcccctggcagctgttggctacctggatgggaccttggccatctatgacctggctacgcagactcttaggcatcagtgtcagcaccagtcgggcatcgtgcagctgctgtgggaggcaggcactgccgtggtatatacctgcagcctggatggcatcgtgcgcctctgggacgcccggaccggccgcctgcttactgactaccggggccacacggctgagatcctggactttgccctcagcaaagatgcctccctggtggtgaccacgtcaggagaccacaaagcgaaagtattttgtgtccaaaggcctgaccgttaatggctgcagcccctgcctgtgtgtctggtgttgaggggacgaagggacccctgcccctgtctgccagcagaggcagtagggcacagagggaagaggagggtggggccctggatgactttccagcctcttcaactgacttgctcccctctccttttcttctctttagagacccagcccagggccctcccacccttgcccagacctggtgggcccttcagagggaggggtggacctgtttctctttcactttcatttgctggtgtgagccatggggtgtgtatttgtatgtggggagtaggtgtttgaggttcccgttctttcccttcccaagtctctgggggtggaaaggaggaagagatactagttaaagattttaaaaatgtaaataaaatatacttcccagaaaaaaaaaaa

SEQ ID NO: 407772 - DNA, 1712 bp, Homo sapiens
ccgccgtaccagttgcccagttcgtccctttccacctttacagtgaatgactctgggaggcgtttgggcccagagaagtggatccgccgcttgcgccgcatggagtccgaatcggaaagcggggctgctgctgacacccccccactggagaccctaagcttccatggtgatgaagagattatcgaggtggtagaacttgatcccggtccgccggacccagcatggagggccccgacgatagcgaggtcacctttgcattgcactcagcatctgtgttttgtgtgagcctggaccccaagaccaataccttggcagtgaccgggggtgaagatgacaaagccttcgtatggcggctcagcgatggggagctgctctttgagtgtgcaggccataaagactctgtgacttgtgctggtttcagccatgactccactctagtggccacaggggacatgagtggcctcttgaaagtgtggcaggtggacactaaggaggaggtctggtcctttgaagcgggagacctggagtggatggagtggcatcctcgggcacctgtcctgttggcgggcacagctgacggcaacacctggatgtggaaagtcccgaatggtgactgcaagaccttccagggtcccaactgcccagccacctgtggccgagtcctccctgatgggaagagagctgtggtaggctatgaagatgggaccatcaggatttgggacctgaagcagggaagccctatccatgtactgaaagggactgagggtcaccagggcccactcacctgtgttgctgccaaccaggatggcagcttgatcctaactggctctgtggactgccaggccaagctggtcagtgccaccaccggcaaggtggtgggtgtttttagacctgagactgtggcctcccagcccagcctgggagaaggggaggagagtgagtccaactcggtggagtccttgggcttctgcagtgtgatgcccctggcagctgttggctacctggatgggaccttggccatctatgacctggctacgcagactcttaggcatcagtgtcagcaccagtcgggcatcgtgcagctgctgtgggaggcaggcactgccgtggtatatacctgcagcctggatggcatcgtgcgcctctgggacgcccggaccggccgcctgcttactgactaccggggccacacggctgagatcctggactttgccctcagcaaagatgcctccctggtggtgaccacgtcaggagaccacaaagcgaaagtattttgtgtccaaaggcctgaccgttaatggctgcagcccctgcctgtgtgtctggtgttgaggggacgaagggacccctgcccctgtctgccagcagaggcagtagggcacagagggaagaggagggtggggccctggatgactttccagcctcttcaactgacttgctcccctctccttttcttctctttagagacccagcccagggccctcccacccttgcccagacctggtgggcccttcagagggaggggtggacctgtttctctttcactttcatttgctggtgtgagccatggggtgtgtatttgtatgtggggagtaggtgtttgaggttcccgttctttcccttcccaagtctctgggggtggaaaggaggaagagatactagttaaagattttaaaaatgtaaataaaatatacttcccagaaaaaaaaaaa

SEQ ID NO: 407773 - DNA, 1188 bp, Homo sapiens
  misc_feature (27)..(27): n is a, c, g, or t
cggacgcgtgggtcgacccacgcgtcngctgtcctgttggcgggcacagctgacggcaacacctggatgtggaaagtcccgaatggtgactgcaagaccttccagggtcccaactgcccagccacctgtggccgagtcctccctgatgggaagagagctgtggtaggctatgaagatgggaccatcaggatttgggacctgaagcagggaagccctatccatgtactgaaagggactgagggtcaccagggcccactcacctgtgttgctgccaaccaggatggcagcttgatcctaactggctctgtggactgccaggccaagctggtcagtgccaccaccggcaaggtggtgggtgtttttagacctgagactgtggcctcccagcccagcctgggagaaggggaggagagtgagtccaactcggtggagtccttgggcttctgcagtgtgatgcccctggcagctgttggctacctggatgggaccttggccatctatgacctggctacgcagactcttaggcatcagtgtcagcaccagtcgggcatcgtgcagctgctgtgggaggcaggcactgccgtggtatatacctgcagcctggatggcatcgtgcgcctctgggacgcccggaccggccgcctgcttactgactaccggggccacacggctgagatcctggactttgccctcagcaaagatgcctccctggtggtgaccacgtcaggagaccacaaagcgaaagtattttgtgtccaaaggcctgaccgttaatggctgcagcccctgcctgtgtgtctggtgttgaggggacgaagggacccctgcccctgtctgccagcagaggcagtagggcacagagggaagaggagggtggggccctggatgactttccagcctcttcaactgacttgctcccctctccttttcttctctttagagacccagcccagggccctcccacccttgcccagacctggtgggcccttcagagggaggggtggacctgtttctctttcactttcatttgctggtgtgagccatggggtgtgtatttgtatgtggggagtaggtgtttgaggttcccgttctttcccttcccaagtctctgggggtggaaaggaggaagagatactagttaaagattttaaaaatgtaaataaaatatacttcccagaaaaaaaaaaa

SEQ ID NO: 407774 - DNA, 1023 bp, Homo sapiens
aggggctcgagttccgcgtcgtcgcgcagagctgactctgggaggcgtttgggcccagagaagtggatccgccgcttgcgccgcatggagtccgaatcggaaagcggggctgctgctgacacccccccactggagaccctaagcttccatggtgatgaagagattatcgaggtggtagaacttgatcccggtccgccggacccagatgacctggcccaggagatggaagatgtggactttgaggaagaagaggaggaagagggcaacgaagagggctgggttctagaaccccaggaaggggtggtcggcagcatggagggccccgacgatagcgaggtcacctttgcattgcactcagcatctgtgttttgtgtgagcctggaccccaagaccaataccttggcagtgaccgggggtgaagatgacaaagccttcgtatggcggctcagcgatggggagctgctctttgagtgtgcaggccataaagactctgtgacttgtgctggtttcagccatgactccactctagtggccacaggggacatgagtggcctcttgaaagtgtggcaggtggacactaaggaggaggtctggtcctttgaagcgggagacctggagtggatggagtggcatcctcgggcacctgtcctgttggcgggcacagctgacggcaacacctggatgtggaaagtcccgaatggtgactgcaagaccttccagggtcccaactgcccagccacctgtggccgagtcctccctgatgggaagagagctgtggtaggctatgaagatgggaccatcaggatttgggacctgaagcacttcagagggaggggtggacctgtttctctttcactttcatttgctggtgtgagccatggggtgtgtatttgtatgtggggagtaggtgtttgaggttcccgttctttcccttcccaagtctctgggggtggaaaggaggaagagatactagttaaagattttaaaaatgtaaataaaatatacttcccagaaaaaaaaaaa

SEQ ID NO: 407775 - DNA, 537 bp, Homo sapiens
ccgccgtaccagttgcccagttcgtccctttccacctttacagtgaatgactctgggaggcgtttgggcccagagaagtggatccgccgcttgcgccgcatggagtccgaatcggaaagcggggctgctgctgacacccccccactggagaccctaagcttccatggtgatgaagagattatcgaggtggtagaacttgatcccggtccgccggacccagatgacctggcccaggagatggaagatgtggactttgaggaagaagaggaggaagagggcaacgaagagggctgggttctagaaccccaggaaggggtggtcggcagcatggagggccccgacgatagcgaggtcacctttgcattgcactcagcatttgctggtgtgagccatggggtgtgtatttgtatgtggggagtaggtgtttgaggttcccgttctttcccttcccaagtctctgggggtggaaaggaggaagagatactagttaaagattttaaaaatgtaaataaaatatacttcccagaaaaaaaaaaa

SEQ ID NO: 407776 - DNA, 853 bp, Homo sapiens
ccgccgtaccagttgcccagttcgtccctttccacctttacagtgaatgactctgggaggcgtttgggcccagagaagtggatccgccgcttgcgccgcatggagtccgaatcggaaagcggggctgctgctgacacccccccactggagaccctaagcttccatggtgatgaagagattatcgaggtggtagaacttgatcccggtccgccggacccagatgacctggcccaggagatggaagatgtggactttgaggaagaagaggaggaagagggcaacgaagaggaagaaatagaaatgatgaagttaatgggactttggcctccctttgactccacaaaagggtaagaaggtggatggctctgtacaatgcctatgccatacaatgtctctcagaagaggaagtacaggcagtacatgaatcgaaaaggtggattcaacagaccttgggatttcatggcattgagaattgaagtgttgaaggatgattttttttcccctcatctgggtcagagagtggatcggtatacggcattcaactggcattcaaaaaaccaggatctcaagttctcctatcctgggtacggtaaggcaaaatcttaatccactggatcatatggccggtttacctttacccttgggcaacaaccaggacggaaaagggttaaaactatttaccatttagaagctattcagggcaactattcactcgcgggccagggggttaacccccatttcacttggcccatattccgttggaagccggataaagtaacgtaccggaaggctcataggactcctaacatattgaaagcattgggaggaagtatccataaagagattgaccctg

SEQ ID NO: 407777 - DNA, 853 bp, Homo sapiens
tgtcttttcatgtcacagccagtttttatccatggaggagggtatatagagaaaaggatctcatgtattgctctacttttttcttctagatacctgttaacttcttacgctttcatgatacatttatctagttctgttattcaagttaaagtattatacagttaagtctatggcagagtcagattcttttatgtgtctaactgttgcgaagtatagacttcttatatcttatatggtgaccattaacatataacgagcatgctagcatattgttgtctttgagagcaccgtatcaactttttgatctgtagaatgacagaagccacattcgatactctgcgactctggttaataatcctgctgtgtgctttgcggttggccatgatgcgtagtcacctgcaagcttatttaaatttagcccaaaaatgtgtggatcagatgaagaaagaagcggggcgaataagcacggttgagctacagaaaatggtaagttttataccctagtcaaaatgaaaaatagcaaaaaccgcactgtaaaaaaaaaaaaaaattggtttcctttagtagatagtatttcaacccatcatattcttattataaataaacagaacaatcttaagttgacagatatcaaagagaccttgatctgattttggtgccaagtgaggtcttaattcctcttcctgccttaagtgcttggtgtcatacagtgggtggtacaaagctgttttatgcctaatattgctaaatgggacccttctaattgatttgaaagacattataacatattgtccagactttaagacttaaagagtaggaaatactacttttagtggctaaatttattcatttt

SEQ ID NO: 407778 - DNA, 1546 bp, Homo sapiens
tagtgcagttaattaaaaatatatcagactttttgctttaatgtgtacctttactgatgaggccagatagtctctagtcaggttaattttttacagatctagaaggattattattttactttatttttaacataaaatgatgtactgtgccactaaacatattgttaatttcaaatataggaagatttttttttaataaaaagcttggtaattagttactcttcaaattgtatttgtgtctttgattttctaggtaatcattcctggggtatttatccagaatctatctctaccttaccagtggataatagtctactgtccaattctgtttactctgaattaccatcagctgaagggaaaatgaaggtaactgttacacaaataacagtggcactgagcagcttaaaaaatatttttactcctcttctttttcgaggacttctgtcttttctgacctggtggattgctgcttgcctcttttctacaagcctttttgggcttttctatcaccagtatctgactgtggcatgaatctcagttaacaaaaaagcatatccaaatcaccctttaaattaaaatatctgtgcccttaaagggctgatgaaaaccagaagaaagcaaatacaatgggaaaaaaaaaacatatcagaatgtctggtattaaatgtttcctctgtattctcagggtgaattaatgtagtaatatttaaaattacaaaatagatggttaactgttacactgtggcattggaattttaactcttggtatttactggtatgagagggctatctacaagggtaatatttctgattaccctggtttacagaaacctccagcagtctttgaaacatctcacatgactctagttattgattgcttttaatggttttatggtactgttgatagtcatagtggctgcctatagaacaatcttcaaactgagccatgctttaggggagggaaaggggctaaagtctcttctgttggtaatttattagttactcttgaaacagtaaaatccaacagaaaggaagagatagctactgtatattacagtaaagaaagctgcatagttattttaaatttaatggagatgaatatggttaaaatatataactactgctgcttgagaatagcaagagtattgttttaaaacatattccacccaacttgagagttcttttaaaatgattggccatatgaacatttgtaatcttgccattaggtttggacctgccatattttgttttattctgtgatcctaactagttccttttaataggctaaaatatttatcaatactgatcagactttaaagaaattactttgtaaacctgctgactacctgtatgtattgtatatatattatatattaaatatataatatattgagattataaaagatgaaaatattgaatccttataatattttaagttgcagaatgtatgttaaaaagtgacttgaatgagatgtatttgtatctagaaattttatttctttttggaatgagattaaaatacattttgaaagttcaaaaaaaaaag

SEQ ID NO: 407779 - DNA, 1779 bp, Homo sapiens
tgtcttttcatgtcacagccagtttttatccatggaggagggtatatagagaaaaggatctcatgtattgctctacttttttcttctagatacctgttaacttcttacgctttcatgatacatttatctagttctgttattcaagttaaagtattatacagttaagtctatggcagagtcagattcttttatgtgtctaactgttgcgaagtatagacttcttatatcttatatggtgaccattaacatataacgagcatgctagcatattgttgtctttgagagcaccgtatcaactttttgatctgtagaatgacagaagccacattcgatactctgcgactctggttaataatcctgctgtgtgctttgcggttggccatgatgcgtagtcacctgcaagcttatttaaatttagcccaaaaatgtgtggatcagatgaagaaagaagcggggcgaataagcacggttgagctacagaaaatggtaatcattcctggggtatttatccagaatctatctctaccttaccagtggataatagtctactgtccaattctgtttactctgaattaccatcagctgaagggaaaatgaaggtaactgttacacaaataacagtggcactgagcagcttaaaaaatatttttactcctcttctttttcgaggacttctgtcttttctgacctggtggattgctgcttgcctcttttctacaagcctttttgggcttttctatcaccagtatctgactgtggcatgaatctcagttaacaaaaaagcatatccaaatcaccctttaaattaaaatatctgtgcccttaaagggctgatgaaaaccagaagaaagcaaatacaatgggaaaaaaaaaacatatcagaatgtctggtattaaatgtttcctctgtattctcagggtgaattaatgtagtaatatttaaaattacaaaatagatggttaactgttacactgtggcattggaattttaactcttggtatttactggtatgagagggctatctacaagggtaatatttctgattaccctggtttacagaaacctccagcagtctttgaaacatctcacatgactctagttattgattgcttttaatggttttatggtactgttgatagtcatagtggctgcctatagaacaatcttcaaactgagccatgctttaggggagggaaaggggctaaagtctcttctgttggtaatttattagttactcttgaaacagtaaaatccaacagaaaggaagagatagctactgtatattacagtaaagaaagctgcatagttattttaaatttaatggagatgaatatggttaaaatatataactactgctgcttgagaatagcaagagtattgttttaaaacatattccacccaacttgagagttcttttaaaatgattggccatatgaacatttgtaatcttgccattaggtttggacctgccatattttgttttattctgtgatcctaactagttccttttaataggctaaaatatttatcaatactgatcagactttaaagaaattactttgtaaacctgctgactacctgtatgtattgtatatatattatatattaaatatataatatattgagattataaaagatgaaaatattgaatccttataatattttaagttgcagaatgtatgttaaaaagtgacttgaatgagatgtatttgtatctagaaattttatttctttttggaatgagattaaaatacattttgaaagttcaaaaaaaaaag

SEQ ID NO: 407780 - DNA, 532 bp, Homo sapiens
gtagattattggtagcagtacatataaaagaagagcatattttagggcaggcgcagtagctcatgcctgtaatcccatcactttgggaggccgaggtgggtggatcacctgagttcaagagttcgagaccagcctggccaccatggtgaaaccctgtctctataatttttttttgtatttttagtagagacggggtttcaccatgttagccaggatggtctcggtctcctgaccttgtgatctgcccgccttggactcccaaagtgctgggattacaggcgtgagccatagttcctggcctgaccttgtctttcttaactttgggttcttccaataggggaggaggcggcagcaaagacatcttcacatcatcttgtatctaatgcccatttacttatgtgtgtctcccaaacagctatgaaatacacaagggcaggggattacctcggtatctccagatgagtgaaatgccatgcacatcttgatggttagtaaatatttattgaatggcaaatacttaaaatctgtgtaa

SEQ ID NO: 407781 - DNA, 2687 bp, Homo sapiens
gagtttcggtcttgttgcccaagctggagtgcaaaggcgtgatctcggctcaccgcaacctccacctcccgggttcaagcaattctcctgccttagcctcctgagtagctgggattacagacgcatgccaccacgcccggctcattttttgtatttttggtagagacagggtttcaccatgttggccaggctggtctcaaactcgtgatccgcccatctcagcctcccaaagtgttgagattacaggcatgagccaccgtacccggcctctttttttgttgtgtttgtgttttttgtcttagatttttttcttaatcaagtttttccagaagagagtagctttaggaagagaataaacacatacttttaaggtattatctcagactttaggcgcattatgatcatatcagtagcacccatgtactgaataagtgaactcaaagaaaagttatgttgggcaactacctcaaagttttgttatctctgcttgcaatttttgttcagtcattgcacaagtgcttgagggcttactgcatgtgaggctctgtagactaagtattaatgaactttcttttttgtccttgcagtagcaggtacagctttgatctcagttttctgccaaatgaatggttctgtgttttgtgctcattcgtttacagagatccctctgaaccaccttggaaccagaaggtgtgtggtctgagaacgataaatgggctgctctctgcctctctcacagcagttctgcccctccttgggaccactcgttttctgcattcctggcccatcttctatatatctctggtccagattccagaggaaacctgtttgacttgaatagatgccattgcccttattgggccttgcctcaggagttcctctgtgtatctctggtccagattccggaggaaacctgtttgacttgagtagatgccattgcccttattgggccttgcctcaggagttgctggttagcctatgaaggggttccctttgggttgatgacattgctcccatccagaaagtggctacttctaccctcctactcccaccactctgcatgcaggagctgttatcatcaaaagggaatgtccactgtctgctctgtaccagagaagtgctaggcttcataaatattggtaatcgatacctgaatgggatgaaaattggcaggtcctgggatggatggcctggttcatctgcatcagaactggaaaaacaaaatcacaccaaattgcagacttttttggaagagcgtgttagacaaggtttgtggattgtttgatttttaccaagaaagaaagctttctcctaagagggtaagatttctacttgagtgagctctaagaggagtcccagtttgcaagagatattattacagttctcatctgtgcggaccagaaagttttccaaattcatgcatttcagttatctaacagatatttactgagcatttaccatgttcagtaaccagggccctgggaatataataggagaaggcagatgagatccttgccttcaccaagcttatgtttttctattttaagtaaaatttgccatgacaaaatttctatcagcggaagagccagtaactcttattgtaataggttttacccagttttagaaaaggaaagtagctaaactcttggttccttggtgtgtgtttttgtttgttcatttctagtacttgtctatgtctttggggtaatttttgatttagaattttgtagaaattactcggcacagtgtagttgaggtgaatataggcaagaaggcttaggaagcctacaacaaaggaatctgacaccaacttttgagatttattcagtccagccaagagaatatatttatggtcaaactagatcttggattacagctccaaagacccttgggctgacagagcaggttctcatttctcagctctttcccttatcacttgcagtgaactctgcccccaggagcagagtatccagttctgtgtccaagcactctatgaatctttacccttgttgaagaaatactcagagacagaagcatttagaaaaggaaaagtttacctgcaaagagagcaagagaatgactggcttgcctaataaaaaacgtaagtatttgaaggaaaaaattaaaaactgccaaggtttctgagtttgcattagactgttcacggtgaaaaacagtaactgcctcatgtaattattgtattcataaaggttatggcaaatcttcagatgtagtacaggaaaaaccaaggataaaatttcttagggagtccaggtttatgggaaacattcaaggttttattgttttttagatcatcaacagttagatgaccctatcatttttgttttgtctcagggtgcaacgtctttcttttctgatggtgattgatatagtttggctgtgtccccacccaaatctcatcttgaattcccatgtgttgttggagggacctggtgggaggtaactaaatcatgggggcaagtctttcccgtgctgttcttgtgatagtgaggaagtctcacgagatcttttggttattataagagggagttttcctgcacaagccctcattttgcctgctgccatctatataagatgtgatttgctgctccttgccttccgccatgattgtgaagcctccccagccatgtggaactgtaagtccaataaacctcttttgtaaatta

SEQ ID NO: 407782 - DNA, 3083 bp, Homo sapiens
gagtttcggtcttgttgcccaagctggagtgcaaaggcgtgatctcggctcaccgcaacctccacctcccgggttcaagcaattctcctgccttagcctcctgagtagctgggattacagacgcatgccaccacgcccggctcattttttgtatttttggtagagacagggtttcaccatgttggccaggctggtctcaaactcgtgatccgcccatctcagcctcccaaagtgttgagattacaggcatgagccaccgtacccggcctctttttttgttgtgtttgtgttttttgtcttagatttttttcttaatcaagtttttccagaagagagtagctttaggaagagaataaacacatacttttaaggtattatctcagactttaggcgcattatgatcatatcagtagcacccatgtactgaataagtgaactcaaagaaaagttatgttgggcaactacctcaaagttttgttatctctgcttgcaatttttgttcagtcattgcacaagtgcttgagggcttactgcatgtgaggctctgtagactaagtattaatgaactttcttttttgtccttgcagtagcaggtacagctttgatctcagttttctgccaaatgaatggttctgtgttttgtgctcattcgtttacagagatccctctgaaccaccttggaaccagaaggtgtgtggtctgagaacgataaatgggctgctctctgcctctctcacagcagttctgcccctccttgggaccactcgttttctgcattcctggcccatcttctatatatctctggtccagattccagaggaaacctgtttgacttgaatagatgccattgcccttattgggccttgcctcaggagttcctctgtgtatctctggtccagattccggaggaaacctgtttgacttgagtagatgccattgcccttattgggccttgcctcaggagttgctggttagcctatgaaggggttccctttgggttgatgacattgctcccatccagaaagtggctacttctaccctcctactcccaccactctgcatgcaggagctgttatcatcaaaagggaatgtccactgtctgctctgtaccagagaagtgctaggcttcataaatattggtaatcgatacctgaatgggatgaaaattggcaggtcctgggatggatggcctggttcatctgcatcagaactggaaaaacaaaatcacaccaaattgcagacttttttggaagagcgtgttagacaaggtttgtggattgtttgatttttaccaagaaagaaagctttctcctaagagggtaagatttctacttgagtgagctctaagaggagtcccagtttgcaagagatattattacagttctcatctgtgcggaccagaaagttttccaaattcatgcatttcagttatctaacagatatttactgagcatttaccatgttcagtaaccagggccctgggaatataataggagaaggcagatgagatccttgccttcaccaagcttatgtttttctattttaagtaaaatttgccatgacaaaatttctatcagcggaagagccagtaactcttattgtaataggttttacccagttttagaaaaggaaagtagctaaactcttggttccttggtgtgtgtttttgtttgttcatttctagtacttgtctatgtctttggggtaatttttgatttagaattttgtagaaattactcggcacagtgtagttgaggtgaatataggcaagaaggcttaggaagcctacaacaaaggaatctgacaccaacttttgagatttattcagtccagccaagagaatatatttatggtcaaactagatcttggattacagctccaaagacccttgggctgacagagcaggttctcatttctcagctctttcccttatcacttgcagtgaactctgcccccaggagcagagtatccagttctgtgtccaagcactctatgaatctttacccttgttgaagaaatactcagagacagaagcatttagaaaaggaaaagtttacctgcaaagagagcaagagaatgactggcttgcctaataaaaaacgtaagtatttgaaggaaaaaattaaaaactgccaaggtttctgagtttgcattagactgttcacggtgaaaaacagtaactgcctcatgtaattattgtattcataaaggttatggcaaatcttcagatgtagtacaggaaaaaccaaggataaaatttcttagggagtccaggtttatgggaaacattcaaggttttattgttttttagatcatcaacagttagatgaccctatcatttttgttttgtctcagggtgcaacgtctttcttttctgatggtgattgatatagtttggctgtgtccccacccaaatctcatcttgaattcccatgtgttgttggagggacctggtgggaggtaactaaatcatgggggcaagtctttcccgtgctgttcttgtgatagtgaggaagtctcacgagatcttttggttattataagagggagttttcctgcacaagccctcattttgcctgctgccatctatataagatgtgatttgctgctccttgccttccgccatgattgtgaagcctccccagccatgtggaactgtaagtccaataaacctcttttgtaaattacctaatctcaggtctgtctttatcaacagcatgaaaacagactaatagaatgatataggaagttcttagtcttactgaagcaagggaaagtgacattttgcttctacaccctccagaattcataagctccagaaggaaagaggacccaagggaaaaacgtgattgcaaaatgtgttcttgtcctctgcccaagtgattaacctttgctccagtggttttcaaacctggctgctgttagaatcacctggcagtgtttaaaaatgactgatgcccagcattttaacttaaataccaatttggtctggagtggagcctgagtatggatatttaaaaaagtaactcctcctccccaatcccccgtaattgtaatgtgcagccaagattgagaaccactgc

SEQ ID NO: 407783 - DNA, 2433 bp, Homo sapiens
gagtttcggtcttgttgcccaagctggagtgcaaaggcgtgatctcggctcaccgcaacctccacctcccgggttcaagcaattctcctgccttagcctcctgagtagctgggattacagacgcatgccaccacgcccggctcattttttgtatttttggtagagacagggtttcaccatgttggccaggctggtctcaaactcgtgatccgcccatctcagcctcccaaagtgttgagattacaggcatgagccaccgtacccggcctctttttttgttgtgtttgtgttttttgtcttagatttttttcttaatcaagtttttccagaagagagtagctttaggaagagaataaacacatacttttaaggtattatctcagactttaggcgcattatgatcatatcagtagcacccatgtactgaataagtgaactcaaagaaaagttatgttgggcaactacctcaaagttttgttatctctgcttgcaatttttgttcagtcattgcacaagtgcttgagggcttactgcatgtgaggctctgtagactaagtattaatgaactttcttttttgtccttgcagtagcaggtacagctttgatctcagttttctgccaaatgaatggttctgtgttttgtgctcattcgtttacagagatccctctgaaccaccttggaaccagaaggtgtgtggtctgagaacgataaatgggctgctctctgcctctctcacagcagttctgcccctccttgggaccactcgttttctgcattcctggcccatcttctatatatctctggtccagattccagaggaaacctgtttgacttgaatagatgccattgcccttattgggccttgcctcaggagttcctctgtgtatctctggtccagattccggaggaaacctgtttgacttgagtagatgccattgcccttattgggccttgcctcaggagttgctggttagcctatgaaggggttccctttgggttgatgacattgctcccatccagaaagtggctacttctaccctcctactcccaccactctgcatgcaggagctgttatcatcaaaagggaatgtccactgtctgctctgtaccagagaagtgctaggcttcataaatattggtaatcgatacctgaatgggatgaaaattggcaggtcctgggatggatggcctggttcatctgcatcagaactggaaaaacaaaatcacaccaaattgcagacttttttggaagagcgtgttagacaaggtttgtggattgtttgatttttaccaagaaagaaagctttctcctaagagggtaagatttctacttgagtgagctctaagaggagtcccagtttgcaagagatattattacagttctcatctgtgcggaccagaaagttttccaaattcatgcatttcagttatctaacagatatttactgagcatttaccatgttcagtaaccagggccctgggaatataataggagaaggcagatgagatccttgccttcaccaagcttatgtttttctattttaagtaaaatttgccatgacaaaatttctatcagcggaagagccagtaactcttattgtaataggttttacccagttttagaaaaggaaagtagctaaactcttggttccttggtgtgtgtttttgtttgttcatttctagtacttgtctatgtctttggggtaatttttgatttagaattttgtagaaattactcggcacagtgtagttgaggtgaatataggcaagaaggcttaggaagcctacaacaaaggaatctgacaccaacttttgagatttattcagtccagccaagagaatatatttatggtcaaactagatcttggattacagctccaaagacccttgggctgacagagcaggttctcatttctcagctctttcccttatcacttgcagtgaactctgcccccaggagcagagtatccagttctgtgtccaagcactctatgaatctttacccttgttgaagaaatactcagagacagaagcatttagaaaaggaaaagtttacctgcaaagagagcaagagaatgactggcttgcctaataaaaaacggtgcaacgtctttcttttctgatggtgattgatatagtttggctgtgtccccacccaaatctcatcttgaattcccatgtgttgttggagggacctggtgggaggtaactaaatcatgggggcaagtctttcccgtgctgttcttgtgatagtgaggaagtctcacgagatcttttggttattataagagggagttttcctgcacaagccctcattttgcctgctgccatctatataagatgtgatttgctgctccttgccttccgccatgattgtgaagcctccccagccatgtggaactgtaagtccaataaacctcttttgtaaatta

SEQ ID NO: 407784 - DNA, 2379 bp, Homo sapiens
gagtttcggtcttgttgcccaagctggagtgcaaaggcgtgatctcggctcaccgcaacctccacctcccgggttcaagcaattctcctgccttagcctcctgagtagctgggattacagacgcatgccaccacgcccggctcattttttgtatttttggtagagacagggtttcaccatgttggccaggctggtctcaaactcgtgatccgcccatctcagcctcccaaagtgttgagattacaggcatgagccaccgtacccggcctctttttttgttgtgtttgtgttttttgtcttagatttttttcttaatcaagtttttccagaagagagtagctttaggaagagaataaacacatacttttaaggtattatctcagactttaggcgcattatgatcatatcagtagcacccatgtactgaataagtgaactcaaagaaaagttatgttgggcaactacctcaaagttttgttatctctgcttgcaatttttgttcagtcattgcacaagtgcttgagggcttactgcatgtgaggctctgtagactaagtattaatgaactttcttttttgtccttgcagtagcaggtacagctttgatctcagttttctgccaaatgaatggttctgtgttttgtgctcattcgtttacagagatccctctgaaccaccttggaaccagaaggtgtgtggtctgagaacgataaatgggctgctctctgcctctctcacagcagttctgcccctccttgggaccactcgttttctgcattcctggcccatcttctatatatctctggtccagattccagaggaaacctgtttgacttgaatagatgccattgcccttattgggccttgcctcaggagttcctctgtgtatctctggtccagattccggaggaaacctgtttgacttgagtagatgccattgcccttattgggccttgcctcaggagttgctggttagcctatgaaggggttccctttgggttgatgacattgctcccatccagaaagtggctacttctaccctcctactcccaccactctgcatgcaggagctgttatcatcaaaagggaatgtccactgtctgctctgtaccagagaagtgctaggcttcataaatattggtaatcgatacctgaatgggatgaaaattggcaggtcctgggatggatggcctggttcatctgcatcagaactggaaaaacaaaatcacaccaaattgcagacttttttggaagagcgtgttagacaaggtttgtggattgtttgatttttaccaagaaagaaagctttctcctaagagggtaagatttctacttgagtgagctctaagaggagtcccagtttgcaagagatattattacagttctcatctgtgcggaccagaaagttttccaaattcatgcatttcagttatctaacagatatttactgagcatttaccatgttcagtaaccagggccctgggaatataataggagaaggcagatgagatccttgccttcaccaagcttatgtttttctattttaagtaaaatttgccatgacaaaatttctatcagcggaagagccagtaactcttattgtaataggttttacccagttttagaaaaggaaagtagctaaactcttggttccttggtgtgtgtttttgtttgttcatttctagtacttgtctatgtctttggggtaatttttgatttagaattttgtagaaattactcggcacagtgtagttgaggtgaatataggcaagaaggcttaggaagcctacaacaaaggaatctgacaccaacttttgagatttattcagtccagccaagagaatatatttatggtcaaactagatcttggattacagctccaaagacccttgggctgacagagcaggttctcatttctcagctctttcccttatcacttgcagtgaactctgcccccaggagcagagtatccagttctgtgtccaagcactctatgaatctttacccttgttgaagaaatactcagagacagaagcatttagaaaaggaaaagtttacctgcaaagactgatggtgattgatatagtttggctgtgtccccacccaaatctcatcttgaattcccatgtgttgttggagggacctggtgggaggtaactaaatcatgggggcaagtctttcccgtgctgttcttgtgatagtgaggaagtctcacgagatcttttggttattataagagggagttttcctgcacaagccctcattttgcctgctgccatctatataagatgtgatttgctgctccttgccttccgccatgattgtgaagcctccccagccatgtggaactgtaagtccaataaacctcttttgtaaatta

SEQ ID NO: 407785 - DNA, 2390 bp, Homo sapiens
gagtttcggtcttgttgcccaagctggagtgcaaaggcgtgatctcggctcaccgcaacctccacctcccgggttcaagcaattctcctgccttagcctcctgagtagctgggattacagacgcatgccaccacgcccggctcattttttgtatttttggtagagacagggtttcaccatgttggccaggctggtctcaaactcgtgatccgcccatctcagcctcccaaagtgttgagattacaggcatgagccaccgtacccggcctctttttttgttgtgtttgtgttttttgtcttagatttttttcttaatcaagtttttccagaagagagtagctttaggaagagaataaacacatacttttaaggtattatctcagactttaggcgcattatgatcatatcagtagcacccatgtactgaataagtgaactcaaagaaaagttatgttgggcaactacctcaaagttttgttatctctgcttgcaatttttgttcagtcattgcacaagtgcttgagggcttactgcatgtgaggctctgtagactaagtattaatgaactttcttttttgtccttgcagtagcaggtacagctttgatctcagttttctgccaaatgaatggttctgtgttttgtgctcattcgtttacagagatccctctgaaccaccttggaaccagaaggtgtgtggtctgagaacgataaatgggctgctctctgcctctctcacagcagttctgcccctccttgggaccactcgttttctgcattcctggcccatcttctatatatctctggtccagattccagaggaaacctgtttgacttgaatagatgccattgcccttattgggccttgcctcaggagttcctctgtgtatctctggtccagattccggaggaaacctgtttgacttgagtagatgccattgcccttattgggccttgcctcaggagttgctggttagcctatgaaggggttccctttgggttgatgacattgctcccatccagaaagtggctacttctaccctcctactcccaccactctgcatgcaggagctgttatcatcaaaagggaatgtccactgtctgctctgtaccagagaagtgctaggcttcataaatattggtaatcgatacctgaatgggatgaaaattggcaggtcctgggatggatggcctggttcatctgcatcagaactggaaaaacaaaatcacaccaaattgcagacttttttggaagagcgtgttagacaaggtttgtggattgtttgatttttaccaagaaagaaagctttctcctaagagggtaagatttctacttgagtgagctctaagaggagtcccagtttgcaagagatattattacagttctcatctgtgcggaccagaaagttttccaaattcatgcatttcagttatctaacagatatttactgagcatttaccatgttcagtaaccagggccctgggaatataataggagaaggcagatgagatccttgccttcaccaagcttatgtttttctattttaagtaaaatttgccatgacaaaatttctatcagcggaagagccagtaactcttattgtaataggttttacccagttttagaaaaggaaagtagctaaactcttggttccttggtgtgtgtttttgtttgttcatttctagtacttgtctatgtctttggggtaatttttgatttagaattttgtagaaattactcggcacagtgtagttgaggtgaatataggcaagaaggcttaggaagcctacaacaaaggaatctgacaccaacttttgagatttattcagtccagccaagagaatatatttatggtcaaactagatcttggattacagctccaaagacccttgggctgacagagcaggttctcatttctcagctctttcccttatcacttgcagtgaactctgcccccaggagcagagtatccagttctgtgtccaagcactctatgaatctttacccttgttgaagaaatactcagagacagaagcatttagaaaaggaaaagtttacctgcaaagagagcaagagaatgactggcttgcctaataaaaaacctatgaaatacacaagggcaggggattacctcggtatctccagatgagtgaaatgccatgcacatcttgatgggctgattactggacaaatgggatcacataaagctaaaaagcttctgcacagtaaaggaaataatcaacaaagtgaagagacaacccatagaatgggagaaattatttgcaaactacccatctaacatgggattaataaccagaatatgtaaggaactcaaacaactcagtaggaaaaaaacaaataattcgattaaaaatgcacaaaaggtctgaa

SEQ ID NO: 407786 - DNA, 778 bp, Homo sapiens
cttctacattttggctgttgttaatacgctgctgtgaatgtgggtgtacaactgtgtctttgagatcttgttttcagttcttttgagatatatacccataagtggaattgctggatcttatggtaattctatttttaatattttgttgtgtttgtgttttttgtcttagatttttttcttaatcaagtttttccagaagagagtagctttaggaagagaataaacacatacttttaaggtattatctcagactttaggcgcattatgatcatatcagtagcacccatgtactgaataagtgaactcaaagaaaagttatgttgggcaactacctcaaagttttgttatctctgcttgcaatttttgttcagtcattgcacaagtgcttgagggcttactgcatgtgaggctctgtagactaagtattaatgaactttcttttttgtccttgcagtagcaggtacagctttgatctcagttttctgccaaatgaatggttctgtgttttgtgctcattcgtttacagagatccctctgaaccaccttggaaccagaaggtgtgtggtctgagaacgataaatgggctgctctctgcctctctcacagcagttctgcccctccttgggaccactcgttttctgcattcctggcccatcttctatatatctctggtccagattccagaggaaacctgtttgacttgaatagatgccattgcccttattgggccttgcctcaggagttcctctgtgtatctctggtccagattccggaggaa

SEQ ID NO: 407787 - DNA, 281 bp, Homo sapiens
attttgttttaaaattatatatatataattaatacaaaattcgaagaacatataaaatctgctagttgttcattgcttccatgatagcattactaggatctttaactttctatatttttctgtttgaatttttactacaaacatttatatacattattttgtaataaataagataaaaagaataaaataggtaaattcctttctattaactaatttctagcatcactgacattgatgtactctcattttgtaagtttccataataaagctatttgaattct

SEQ ID NO: 407788 - DNA, 441 bp, Homo sapiens
actaaacccaaactgaatatatccttaatttaaaatccctttagccacatcccaaaattccctgggccactaaatgccacatgatatggatggatgctgatggaggggaagtcagtatagaaagggatcctggttttacttttacaaattttacaaaaacatatgacaaggtgaatacattgtttaagcaccataattaatctcttcatgcccaattacccacacttgtgtagaccatacacatttaaaaatgactaagtggtcctgaatctttttatacagcttcttgaagggaaacaaagcaatgatttcttaaatcattaatccctatttacaatgaacctgaatagattgacaaatttatccaaaagaaaaagaaagaaaagaaaagaaagaaagaaagaaagaaagaaagaaagaaagaaagaaagaaagaaagag

SEQ ID NO: 407789 - DNA, 776 bp, Homo sapiens
agccagaaagattaaagctctccctgctgaaatctcctttccctccagcaggaaaccagtgtagttatgttgtttgtacttgccaggatacacttccatttcatatttgcaagtacacataaaggtatccttcatcagcagcacagtgcttcctttcctctgaatctgccatcagctcaggcagatttctaagcagcaaatcagcctttgccagaacactgcaggacaccagtgcagcgcccagcctgcgaccatgagaaaccccagccacatctccagcacacaagaacttcaaaatgcctaagccgcagcagtcaagcattcctagaggacctttctccatcaggatcttgcttcaagtgccagaaatctggccactgggccaaggaatgcccacagcccgggattcctcctaagctgtgtcccatctgtgtgggaccccactgaaaatcagactgtccagctcacctggcagccactcccagagcccctggaactctggcccaaggctctctgattgacttcttcccagatcttctgggcttagtggctgaagactgacactgcccgatcacctgagaagcctcctggaccatcacagatgctttaggtaactcttacagtagagggctctaggggatggtagagtcacaggatggaagaactctgtgtccttgaatcattgcatggaagagaactggaagttgcccaggaacaccagccttggacagttatgtgaacaagaaataaacttcttttacagtgtcaaaaaaaat

SEQ ID NO: 407790 - DNA, 634 bp, Homo sapiens
agccagaaagattaaagctctccctgctgaaatctcctttccctccagcaggaaaccagtgtagttatgttgtttgtacttgccaggatacacttccatttcatatttgcaagtacacataaaggtatccttcatcagcagcacagtgcttcctttcctctgaatctgccatcagctcaggcagatttctaagcagcaaatcagcctttgccagaacactgcaggacaccagtgcagcgcccagcctgcgaccatgagctcgcctgcacccaggtgattaaaaagctttattgctcacacaaagcctgtttggtggtctcttcacatggacgcgagtgacatttggtgccgtgactcggatcggggaacctcccttgggagatcaatcccctgtcctcctgctctttgttccaagagaaagatccacctacgacctctgctcctcagaccaaccagcccaaggaacatctcaccaattttaaatcgggctctaggggatggtagagtcacaggatggaagaactctgtgtccttgaatcattgcatggaagagaactggaagttgcccaggaacaccagccttggacagttatgtgaacaagaaataaacttcttttacagtgtcaaaaaaaat

SEQ ID NO: 407791 - DNA, 405 bp, Homo sapiens
agccagaaagattaaagctctccctgctgaaatctcctttccctccagcaggaaaccagtgtagttatgttgtttgtacttgccaggatacacttccatttcatatttgcaagtacacataaaggtatccttcatcagcagcacagtgcttcctttcctctgaatctgccatcagctcaggcagatttctaagcagcaaatcagcctttgccagaacactgcaggacaccagtgcagcgcccagcctgcgaccatgaggctctaggggatggtagagtcacaggatggaagaactctgtgtccttgaatcattgcatggaagagaactggaagttgcccaggaacaccagccttggacagttatgtgaacaagaaataaacttcttttacagtgtcaaaaaaaat

SEQ ID NO: 407792 - DNA, 1632 bp, Homo sapiens
agccagaaagattaaagctctccctgctgaaatctcctttccctccagcaggaaaccagtgtagttatgttgtttgtacttgccaggatacacttccatttcatatttgcaagtacacataaaggtatccttcatcagcagcacagtgcttcctttcctctgaatctgccatcagctcaggcagatttctaagcagcaaatcagcctttgccagaacactgcaggacaccagtgcagcgcccagcctgcgaccatgaggcattttaaaatctgtggcgcttccagactcatatcaacattccctgatggaagcctttagcaatcctaaccaggaagtggccagagcctggagccagagacgaacgtccctcataggaggggttgctggaggaggaggggcaaatctatttcattctgtccttgcaggcacattttcatcagttaatgatgcaaaccaggctgaaacgttcttaacaagcatgtgtgtttctgtttttcatttgaaagtcaggagcatgaggctatattcatcatagaggcagggtttctctgtgtcagagctcagcattggcagctctagcaaaggacaggctgcatttagctggttcttttctaaggagccacagtcaggcactaaaccagcatctacacctctgaggcccctaaaagcctccagtgaagctgggcttgatcagacctcaaaaagatctccctttgcattttgctcttagttctcagtgatctttaaaaaataataataataaaaagattagaatcatgaaagatttttctcaggatatgaatactataggcacactaaagaaactttggaaaaatgccagcaagtataagcgaaaaaaaatcatactgccccttatatcacccactgaaattaaaatatttaaacattatgcttctgtgtacacctgtatacgctatatgtcaggcctctgagcccaagctaagccatcatataccctgtgacctgcacgtataaatccggatgacctgaagtaactgaagaatcacaaaagaagtgaaaatggcctgtccctgccttaactgatgacattaccttgtgaaattccttctcccagctcttcctggctcaaaagctcccccactgagcaccttgtgccccccacccctgccagccagagaacatccgcctttgactgtaattttccactatctacccaaatcttataaaaacagcccatcccatctcccttcactgactctctttttggactcagctcgcctgcacccaggtgattaaaaagctttattgctcacacaaagcctgtttggtggtctcttcacatggacgcgagtgacatttggtgccgtgactcggatcggggaacctcccttgggagatcaatcccctgtcctcctgctctttgttccaagagaaagatccacctacgacctctgctcctcagaccaaccagcccaaggaacatctcaccaattttaaatcgggctctaggggatggtagagtcacaggatggaagaactctgtgtccttgaatcattgcatggaagagaactggaagttgcccaggaacaccagccttggacagttatgtgaacaagaaataaacttcttttacagtgtcaaaaaaaat

SEQ ID NO: 407793 - DNA, 588 bp, Homo sapiens
agccagaaagattaaagctctccctgctgaaatctcctttccctccagcaggaaaccagtgtagttatgttgtttgtacttgccaggatacacttccatttcatatttgcaagtacacataaaggtatccttcatcagcagcacagtgcttcctttcctctgaatctgccatcagctcaggcagatttctaagcagcaaatcagcctttgccagaacactgcaggacaccagtgcagcgcccagcctgcgaccatgagcctgtttggtggtctcttcacatggacgcgagtgacatttggtgccgtgactcggatcggggaacctcccttgggagatcaatcccctgtcctcctgctctttgttccaagagaaagatccacctacgacctctgctcctcagaccaaccagcccaaggaacatctcaccaattttaaatcgggctctaggggatggtagagtcacaggatggaagaactctgtgtccttgaatcattgcatggaagagaactggaagttgcccaggaacaccagccttggacagttatgtgaacaagaaataaacttcttttacagtgtcaaaaaaaat

SEQ ID NO: 407794 - DNA, 538 bp, Homo sapiens
  misc_feature (16)..(16): n is a, c, g, or t
gaatggcttggtgctntgtagttatgctgcctggggggaaaaaagagtacagaatattcggtgagaactgaaggttattataatccagaaagagtgatggagtataaagacaacgtcttttcaaatagactttgcaagactttctgccttttcagtggtaaaggctaagcagtggtttgctggctttgccctctgtgggttacagaaaggcctttgcttataaatccatggagctgaaggtcacatgaagggcttgcctgcactagcttatttactctaggatcagaatcaagacctcagttaatctcagttacactagtgtggcatatttcccacctccacccatatccacccactagttctggccccagattgtctctgagctggccctgcccactggtcagaacagattggcaaatgatcattccttaggacagccctggcttgtacaacaggcaggaatgaggtcagaagaaaggctattgtccccatatccttggtagatggaggcttatgttaccttctcatgttgctttaa

SEQ ID NO: 407795 - DNA, 576 bp, Homo sapiens
acaggcaggtgcccaggcaactctcccaggcaaccatggttggcaggtcccaatttctactgagatcaccccacgtaggtcacatggcgagggtcccacaccccagcctcaccacttccaacgagccaaacgcttcccatttccagcccgacgatggtactaacttccctgcccctccttggagatccccaaccccaaataacctctcctgatctccagggtctcttggtgacaatacctgcctgcctgccttagctaagggggtcagttgcttctatcagtctcaatgccccagaaactgagcgaaaacccaagtattcatggcctactgaacgcaaagtctgagtctgaccctgggtattctattccttggtttttagaatgcccccagacaaagatgagggctgaaggctcagaaaggccgggtcaggccaggtgaggtggctcacgtctgaaatcacagcacttttggaggccgaggcaggaggatcctttgagtccacctcccaaagtgctgggattataggcgtgagccaccgcaccgggccttgatttcacatttgaactctcccacat

SEQ ID NO: 407796 - DNA, 463 bp, Homo sapiens
gggattttaggcttcttggggtgggaaactgagaaggtaaatatatggagaaaacgaatggagtaaggcttgttggcagagtcctctgctgctgtccctaggctaagagtctagagttgtctccagtagaggagaagttctatcctatctttaggcagaaagtggggaggggagagagagagcttttcctcagtttgctgctgccttttatttttatttttaagcaaccctattaactgagctgcttcttaattgctttcagctcaaaaataatttttatatcaaagaagcatattttaggtgacatattctagttcccttcatttcctagtcagacttttaacaaactgtttagttgattaaattgtaaacattctaactagaatatttaattttccctatagacttcatagccttcagacttttttttttttttttttgagacagggtctaactctgtcac

SEQ ID NO: 407797 - DNA, 554 bp, Homo sapiens
cgcctgcgcggacgtcgatgggtttgtgggcgcagggcgcgaggcgcgaggcggtagctgggctagtcctgttccctggcgtctgggcctttctgctctccgcaaggagctgggtcgcgacctgtcactgccagccgtgcgctcgccctctgcgccccgtctcgtggtcactgccgccctccctcccgccacacctgtgatgatcgctatggagccgcgcctcaggtggcattactataaacctaagaggagaggcgcccgttcgaataagggcaaattatttagtattttgtcttcaatgttcctggcagcttaaagtaccaactgggacacttgtcactagtttgagaagtgcagccatagtgacctcttttgaaagatgaatcaatgaattaagtcatttctgagaaaccaaggaggcctgttgaaggaggctggccctcctgtggcaggtaacccaacctccactgcccttggcaacaggacaaggctaatattttcccaagaagggccttttcatggaatgatctttccaacccgttgactacaacaag

SEQ ID NO: 407798 - DNA, 713 bp, Homo sapiens
cgcctgcgcggacgtcgatgggtttgtgggcgcagggcgcgaggcgcgaggcggtagctgggctagtcctgttccctggcgtctgggcctttctgctctccgcaaggagctgggtcgcgacctgtcactgccagccgtgcgctcgccctctgcgccccgtctcgtggtcactgccgccctccctcccgccacacctgtgatgatcgctatggagccgcgcctcaggtggcattactataaacctaagaggagaggcgcccgttcgaataagggcaaattatttagtattttgtcttcaatgttcctggcagcttaaagtaccaactgggacacttgtcactagtttgagaagtgcagccataggtgagttctctccaccccaactttcttagtcatcctgccctgaacaaatcagctcaagccagtcccccgccagtgccactttccacttgtctccattgaaaccttcaccctccttcaaggcccaccaccagcccttcgcagatgcccacctccccagcctctacagccctttgtttccatcagtccctctccctggctcagtctctgctttcataaggagccggctctctgttcacccagatttaacttgctcagaggcagaaacttaggcttctttgtatgctcccaatgcttagttccatactgggaacaaagtaggtgtccggtatttttttactggtttcccttta

SEQ ID NO: 407799 - DNA, 1577 bp, Homo sapiens
ggcggagctgcgggcctccgacggcgggaggacagcgctgcgaggaggcgcccgggacagtcatggagcgccgcctgggagtgagggcctgggtgaaggagaaccggggctccttccagcccccggtctgcaacaagctcatgcaccaggagcagctcaaagtcatgttcgtcggaggccccaacaccaggaaggactatcacatcgaagagggtgaagaggtattttaccagctggagggagacatggttctccgagtcctggagcaagggaaacaccgggatgtggtcattcggcagggagagatattcctcctgcctgccagggtgccccactcaccacagaggtttgccaacaccgtggggctggtggttgagcgaaggcggctggagaccgagctagatgggctcaggtactatgtgggcgacaccatggacgttctgtttgagaagtggttctactgcaaggacctcggcacgcagttggcccccatcatccaggagtgagcccccagcccagcccctgcctcttgctttcctggggctctgcatcagcacctgatgccctgggagaaagtctcccctcccagggtggagatcctggcccagagagcccactgccaggccggggggaggggggagcagcagccccgctgggagggaaaggatggcagacacacagctgtgtgagagccccatgagtgtgtgtgggcacctgcacctgaccgtgagtgtggtgtatgtgtgtgtcgctggccactccgatgggagtgctcgccactcctgctcctccctgttcgtccttgcaggttcttcagctctgagcagtacagaacaggaaagcccatccctgaccagctgctcaaggagccaccattccctctgagcacacgatccatcatggagcccatgtccctggatgcctggctggacagccaccacagggagctgcaggcaggcacaccactcagcctgtttggggacacctatgagacccaggtgatcgcctatgggcaaggcagcagcgaaggcctgagacagaatgtggacgtgtggctgtggcagctggagggctcctcggtggtgacaatggggggacggcgcctgagcctggcccctgatgacagcctcctggtgctagctgggacctcgtatgcctgggagcgaacacaaggctctgtggccctgtctgtgacccaggaccctgcctgcaagaagcccctggggtgaccctcttgccatggcctgaagcagccacaggtgtgccaagcaccctcgagtgccatccctgccaaacaactctcccagcccccactacctctctgtgtactgccgctgtgtcccccacagacctgcacattgttgtcacccaccctcctgcccttctcagcccagatgccatgcccctgggcgggcagcagctccccatcttctctggcagactcagcccactgccttgccagtcttgccaggtggtctacccccggccccgctcctgcccattcctctgtccctgcagactcagtgcagcacttccacaccaagaaggccctcaataaaggcttcctgaggaacgca

SEQ ID NO: 407800 - DNA, 1117 bp, Homo sapiens
actctagacgatccctgagacggtacccaacaccaggaaggactatcacatcgaagagggtgaagaggtattttaccagctggagggagacatggttctccgagtcctggagcaagggaaacaccgggatgtggtcattcggcagggagagatattcctcctgcctgccagggtgccccactcaccacagaggtttgccaacaccgtggggctggtggttgagcgaaggcggctggagaccgagctagatgggctcaggtactatgtgggcgacaccatggacgttctgtttgagaagtggttctactgcaaggacctcggcacgcagttggcccccatcatccaggagttcttcagctctgagcagtacagaacaggaaagcccatccctgaccagctgctcaaggagccaccattccctctgagcacacgatccatcatggagcccatgtccctggatgcctggctggacagccaccacagggagctgcaggcaggcacaccactcagcctgtttggggacacctatgagacccaggtgatcgcctatgggcaaggcagcagcgaaggcctgagacagaatgtggacgtgtggctgtggcagctggagggctcctcggtggtgacaatggggggacggcgcctgagcctggcccctgatgacagcctcctggtgctagctgggacctcgtatgcctgggagcgaacacaaggctctgtggccctgtctgtgacccaggaccctgcctgcaagaagcccctggggtgaccctcttgccatggcctgaagcagccacaggtgtgccaagcaccctcgagtgccatccctgccaaacaactctcccagcccccactacctctctgtgtactgccgctgtgtcccccacagacctgcacattgttgtcacccaccctcctgcccttctcagcccagatgccatgcccctgggcgggcagcagctccccatcttctctggcagactcagcccactgccttgccagtcttgccaggtggtctacccccggccccgctcctgcccattcctctgtccctgcagactcagtgcagcacttccacaccaagaaggccctcaataaaggcttcctgaggaacgca

SEQ ID NO: 407801 - DNA, 1646 bp, Homo sapiens
ggcggagctgcgggcctccgacggcgggaggacagcgctgcgaggaggcgcccgggacagtcatggagcgccgcctgggagtgagggcctgggtgaaggagaaccggggctccttccagcccccggtctgcaacaagctcatgcaccaggagcagctcaaagtcatgttcgtcggaggccccaacaccaggaaggactatcacatcgaagagggtgaagaggtattttaccagctggagggagacatggttctccgagtcctggagcaagggaaacaccgggatgtggtcattcggcagggagagatattcctcctgcctgccagggtgccccactcaccacagaggtttgccaacaccgtggggctggtggttgagcgaaggcggctggagaccgagctagatgggctcaggtactatgtgggcgacaccatggacgttctgtttgagaagtggttctactgcaaggacctcggcacgcagttggcccccatcatccaggagttcttcagctctgagcagtacagaacaggaaagcccatccctgaccagctgctcaaggagccaccattccctctgagcacacgatccatcatggagcccatgtccctggatgcctggctggacagccaccacagggagctgcaggcaggcacaccactcagcctgtttggggacacctatgagacccaggtgatcgcctatgggcaaggcagcagcgaaggcctgagacagaatgtggacgtgtggctgtggcagctggagggctcctcggtggtgacaatggggggacggcgcctgagcctggcccctgatgacagcctcctggtgctagctgggacctcgtatgcctgggagcgaacacaaggctctgtggccctgtctgtgacccaggaccctgcctgcaagaagcccctggggtgaccctcttgccatggcctgaagcagccacaggtgtgccaagcaccctcgagtgccatccctgccaaacaactctcccagcccccactacctctctgtgtactgccgctgtgtcccccacagacctgcacattgttgtcacccaccctcctgcccttctcagcccagatgccatgcccctgggcgggcagcagctccccatcttctctggcagactcagcccactgccttgccagtcttgccaggtggtctacccccggccccgctcctgcccattcctctgtccctgcagactcagtgcagcacttccacaccaagaaggccctcaataaaggcttcctgaggaacgcaaaaaaaaaagaaaaaaaacacagaaaccagacgagaacacacagagagaaaagaacaaaaacagggtgacgggccaataagaaaacccccaggaggggcgcaaggaagagagcgtcaccaccagattgatagagacgcgagaggggcggcaccgaataagaagggggggacccataatataaagcaaagccgaagcgagcgggagaatggtatacagcaccgcttcggcagcagaagaaataacaagacgaagagaggcgactttgtggagaagaagcccaatactctagtggggggcgacaacaaatgggggggacctcacaacaaagagatataccagcgcggggggagaaatacaagagtagaggaggatcg

SEQ ID NO: 407802 - DNA, 1378 bp, Homo sapiens
ggcggagctgcgggcctccgacggcgggaggacagcgctgcgaggaggcgcccgggacagtcatggagcgccgcctgggagtgagggcctgggtgaaggagaaccggggctccttccagcccccggtctgcaacaagctcatgcaccaggagcagctcaaagtcatgttcgtcggaggccccaacaccaggaaggactatcacatcgaagagggtgaagaggtattttaccagctggagggagacatggttctccgagtcctggagcaagggaaacaccgggatgtggtcattcggcagggagagatattcctcctgcctgccagggtgccccactcaccacagaggtttgccaacaccgtggggctggtggttgagcgaaggcggctggagaccgagctagatgggctcaggtactatgtgggcgacaccatggacgttctgtttgagaagtggttctactgcaaggacctcggcacgcagttggcccccatcatccaggagttcttcagctctgagcagtacagaacaggaaagcccatccctgaccagctgctcaaggagccaccattccctctgagcacacgatccatcatggagcccatgtccctggatgcctggctggacagccaccacagggagctgcaggcaggcacaccactcagcctgtttggggacacctatgagacccaggtgatcgcctatgggcaaggcagcagcgaaggcctgagacagaatgtggacgtgtggctgtggcagctggagggctcctcggtggtgacaatggggggacggcgcctgagcctggcccctgatgacagcctcctggtgctagctgggacctcgtatgcctgggagcgaacacaaggctctgtggccctgtctgtgacccaggaccctgcctgcaagaagcccctggggtgaccctcttgccatggcctgaagcagccacaggtgtgccaagcaccctcgagtgccatccctgccaaacaactctcccagcccccactacctctctgtgtactgccgctgtgtcccccacagacctgcacattgttgtcacccaccctcctgcccttctcagcccagatgccatgcccctgggcgggcagcagctccccatcttctctggcagactcagcccactgccttgccagtcttgccaggtggtctacccccggccccgctcctgcccattcctctgtccctgcagactcagtgcagcacttccacaccaagaaggccctcaataaaggcttcctgaggaacgcacacctgggggtctgccgcaggcagtcatcactggccttcccatgtgccccccaggaccatgtggtgtgtctggggcatcagggcaccaggtgaccatggacgtgttg

SEQ ID NO: 407803 - DNA, 1271 bp, Homo sapiens
ggcggagctgcgggcctccgacggcgggaggacagcgctgcgaggaggcgcccgggacagtcatggagcgccgcctgggagtgagggcctgggtgaaggagaaccggggctccttccagcccccggtctgcaacaagctcatgcaccaggagcagctcaaagtcatgttcgtcggaggccccaacaccaggaaggactatcacatcgaagagggtgaagaggtattttaccagctggagggagacatggttctccgagtcctggagcaagggaaacaccgggatgtggtcattcggcagggagagatattcctcctgcctgccagggtgccccactcaccacagaggtttgccaacaccgtggggctggtggttgagcgaaggcggctggagaccgagctagatgggctcaggtactatgtgggcgacaccatggacgttctgtttgagaagtggttctactgcaaggacctcggcacgcagttggcccccatcatccaggagttcttcagctctgagcagtacagaacaggaaagcccatccctgaccagctgctcaaggagccaccattccctctgagcacacgatccatcatggagcccatgtccctggatgcctggctggacagccaccacagggagctgcaggcaggcacaccactcagcctgtttggggacacctatgagacccaggtgatcgcctatgggcaaggcagcagcgaaggcctgagacagaatgtggacgtgtggctgtggcagctggagggctcctcggtggtgacaatggggggacggcgcctgagcctggcccctgatgacagcctcctggtgctagctgggacctcgtatgcctgggagcgaacacaaggctctgtggccctgtctgtgacccaggaccctgcctgcaagaagcccctggggtgaccctcttgccatggcctgaagcagccacaggtgtgccaagcaccctcgagtgccatccctgccaaacaactctcccagcccccactacctctctgtgtactgccgctgtgtcccccacagacctgcacattgttgtcacccaccctcctgcccttctcagcccagatgccatgcccctgggcgggcagcagctccccatcttctctggcagactcagcccactgccttgccagtcttgccaggtggtctacccccggccccgctcctgcccattcctctgtccctgcagactcagtgcagcacttccacaccaagaaggccctcaataaaggcttcctgaggaacgca

SEQ ID NO: 407804 - DNA, 867 bp, Homo sapiens
actagtccacggttggctattggttgaatgagtaggctgatggtttcgataataactagtatggggataaggggtgtaggtgtgccttgtggtaagaagtgggctagggcatttttaatcttagagcgaaagcccatccctgaccagctgctcaaggagccaccattccctctgagcacacgatccatcatggagcccatgtccctggatgcctggctggacagccaccacagggagctgcaggcaggcacaccactcagcctgtttggggacacctatgagacccaggtgatcgcctatgggcaaggcagcagcgaaggcctgagacagaatgtggacgtgtggctgtggcagctggagggctcctcggtggtgacaatggggggacggcgcctgagcctggcccctgatgacagcctcctggtgctagctgggacctcgtatgcctgggagcgaacacaaggctctgtggccctgtctgtgacccaggaccctgcctgcaagaagcccctggggtgaccctcttgccatggcctgaagcagccacaggtgtgccaagcaccctcgagtgccatccctgccaaacaactctcccagcccccactacctctctgtgtactgccgctgtgtcccccacagacctgcacattgttgtcacccaccctcctgcccttctcagcccagatgccatgcccctgggcgggcagcagctccccatcttctctggcagactcagcccactgccttgccagtcttgccaggtggtctacccccggccccgctcctgcccattcctctgtccctgcagactcagtgcagcacttccacaccaagaaggccctcaataaaggcttcctgaggaacgca

SEQ ID NO: 407805 - DNA, 1217 bp, Homo sapiens
ggcggagctgcgggcctccgacggcgggaggacagcgctgcgaggaggcgcccgggacagtcatggagcgccgcctgggagtgagggcctgggtgaaggagaaccggggctccttccagcccccggtctgcaacaagctcatgcaccaggagcagctcaaagtcatgttcgtcggaggccccaacaccaggaaggactatcacatcgaagagggtgaagaggtattttaccagctggagggagacatggttctccgagtcctggagcaagggaaacaccgggatgtggtcattcggcagggagagatattcctcctgcctgccagggtgccccactcaccacagaggtttgccaacaccgtggggctggtggttgagcgaaggcggctggagaccgagctagatgggctcaggttcttcagctctgagcagtacagaacaggaaagcccatccctggtgatcgcctatgggcaaggcagcagcgaaggcctgagacagaatgtggacgtgtggctgtggcagctggcaagtggggcccagggacagggttgcagaaccccctgccagagggcatcagcccgctcctcggccctgggctcccacacggggcccactcttggggccttggggcccaggcagactcagacattcacccaggtgatgaggcccaacagtctccatttgattctcctgctcctcttctccaggagggctcctcggtggtgacaatggggggacggcgcctgagcctggcccctgatgacagcctcctggtgctagctgggacctcgtatgcctgggagcgaacacaaggctctgtggccctgtctgtgacccaggaccctgcctgcaagaagcccctggggtgaccctcttgccatggcctgaagcagccacaggtgtgccaagcaccctcgagtgccatccctgccaaacaactctcccagcccccactacctctctgtgtactgccgctgtgtcccccacagacctgcacattgttgtcacccaccctcctgcccttctcagcccagatgccatgcccctgggcgggcagcagctccccatcttctctggcagactcagcccactgccttgccagtcttgccaggtggtctacccccggccccgctcctgcccattcctctgtccctgcagactcagtgcagcacttccacaccaagaaggccctcaataaaggcttcctgaggaacgca

SEQ ID NO: 407806 - DNA, 1119 bp, Homo sapiens
ggcggagctgcgggcctccgacggcgggaggacagcgctgcgaggaggcgcccgggacagtcatggagcgccgcctgggagtgagggcctgggtgaaggagaaccggggctccttccagcccccggtctgcaacaagctcatgcaccaggagcagctcaaagtcatgttcgtcggaggccccaacaccaggaaggactatcacatcgaagagggtgaagaggtattttaccagctggagggagacatggttctccgagtcctggagcaagggaaacaccgggatgtggtcattcggcagggagagatattcctcctgcctgccagggtgccccactcaccacagaggtttgccaacaccgtggggctggtggttgagcgaaggcggctggagaccgagctagatgggctcaggtactatgtgggcgacaccatggacgttctgtttgagaagtggttctactgcaaggacctcggcacgcagttggcccccatcatccaggagttcttcagctctgagcagtacagaacaggaaagcccatccctgaccagctgctcaaggagccaccattccctctgagcacacgatccatcatggagcccatgtccctggatgcctggctggacagccaccacagggagctgcaggcaggcacaccactcagcctgtttggggacacctatgagacccaggtgatcgcctatgggcaaggcagcagcgaaggcctgagacagaatgtggacgtgtggctgtggcagctggagggctcctcggtggtgacaatggggggacggcgcctgagcctggcccctgatgacagcctcctggtgctagctgggacctcgtatgcctgggagcgaacacaaggctctgtggccctgtctgtgacccaggaccctgcctgcaagaagcccctggggtgaccctcttgccatggcctgaagcagccacagactcagtgcagcacttccacaccaagaaggccctcaataaaggcttcctgaggaacgcacacctgggggtctgccgcaggcagtcatcactggccttcccatgtgccccccaggaccatgtggtgtgtctggggcatcagggcaccaggtgaccatggacgtgttg

SEQ ID NO: 407807 - DNA, 1231 bp, Homo sapiens
agatgagggaggtggcaacagtgacaactgaacccagagctgttagacaccaaactaggaaagcagctctggagcccgagctgagctgagctccatggaagagtgaggaggaggtgtccataagagaagccctgagaccagacagaggaggaggacatgcctgtgaggaaagtggtctttccagaaactcagaagggaggaggtgatgtgtatgacagggctgggattgggatggagaatgtgaatttgggagagacggcagatgaaatcaggggtgtgggggaaacaacatttggtggaaagagttgacatgaggacatgtttgtgacatacgtactaataaacatggaattctagggtcttaagagtgttcaggggaacaggcttcgcctagctaagtgctcatgggcctccttttcacttgcggttctgcatttccttttacttatttttttcccaactctatcgaggtgtgattgacaaatgaaattgtaacaaaggtgtacaaagtgctgaattgatacatgtatgtattgtgacatgattaccacacaagttagtgaacacatctgtcacctcaccttgttgcttgtgtgtgtagtgagagcagttgagacctactgttagcacatttcaggtgtacagtattgttgactctagtcaccttgccgtccattagagccccagaacttacctagtcaagtagagaggttgggctctgccttttaacgagtcttaaccactaggagggcatttctgcatttcagaacagaattgcatattagctgatgctttcgtgttgcatcatagagcagcacttctcaccgcactccttggaaccctcagggcagggtttgcttcagagggcaggtgagaccaaaagagctggccgttagctgcagcgtttgcctttcacttgtgtaagctgtcccttaaaaaggaagagccgcctggcgcggtggctcatgcctgtaatcccagcactttgggaggccgaggtgggcagatcacaaggtcgagagagcgagaccatcctggccaaccaatatggtaaaaccccatctctactaaaaatacaaaaatcagctgggcgtagtggtgtgtgcctgtagtcccagctactggggaggctgagacaggagaatcacttgaacccgggaggcggaggttgcggtgagccaagattgcgccactgcactccagcctgggtgacagagtgagactccttcta

SEQ ID NO: 407808 - DNA, 380 bp, Homo sapiens
aacaaattatacttgaaaccacagggtttaatacaaagcagcataaaagtaagtattaaatttgtggcacagcctgcaagttgtgctaaacaattagaaggagagggagaaggagaaataatttgaacaaggcatagtttttaggaaaatacatgaattataaaatcttttaaaagtgtttgcctgttttcagtgagctaattaccttatctcaattaagtaatttgaagctatttagcactataaagagagaagaatataagaccaaaataataataaaatatatggaagttattgaaatgtgataacaaatagcaaatattaaagttaatccaaccatatctgtgaccatattaagtgtgaggaaattaaactttagc

SEQ ID NO: 407809 - DNA, 283 bp, Homo sapiens
taaaacaatattcatgttagaacacgttaaaactctatttcttccgtgcaaagtttagaactttaaaggtaattctgaaaatttgtttatgggggaaaatttttatttatttatttatttttttgagccgagatcgtgccactgcactctttttagcctgggcaacaacagtgaactccatctcaaaataaataaataaataaataaaataataatactttttttttccatttaaaattttctcagtttctcctaggtgtgcagtgcgctctcattgtcaggg

SEQ ID NO: 407810 - DNA, 604 bp, Homo sapiens
cattgttaatcaaaatctaagtgtcatgatgtcccttgtcaccaggaagtctcactcccaggtagtgctgtcccatgttgatgagggaggaggaaatgtctcagtgaggaattttaagagttcccaaaagctgacttaggatggcatcacagagtggcagaaatgagacctcagttaagtcattgatttatgtaagtcattgcttgttgaatcatccctagtctttggaatcccatgattttagtttcctccaaagtaaaacaatgagagatacataacattaagaatttgtattgcagaaatataatgcacacattgactacaatcaaaaagtgaatttacatgtcagaatgaaaaaagaacctattcattagggagccaacaacaaaatcttgaaaaaaattaaaacctggttcttctttacagactggttgtagccaggaaataattcaggatttagtccaagtggtagacaaataagaaaactcaaaaacaatggtcaggctagaatctaataacaggtgtgttatagttttcttatgaaacgtgatttttctgtctctagtctcccttttatttttttaaaatacataattatatatat

SEQ ID NO: 407811 - DNA, 1269 bp, Homo sapiens
cctcaagtgatccacctttctcggcctcccaaagtgctgggattacaggcgtgagccactccgcctggccttctgtgcccttctctttgggattcatcccatactcactggactgcacaggcctcttttcctggttctctggccagaaacacaaggtttcttacagagttttagccagcttttctactgcactactgggcaggtctggaattggtgcaaagccaggagagcaaaagggtgaaaaaaaaaataggaaacttatcccctgtaccagtcttgtctgcaagttttgactccccttcgtgccacctgcttttgtttggttttcagagtcctcaagtagctgctttcatatttgatgcagagttttcactgtaattatcaggagacacagcctgtcttggcttacctcaccatgccagaactccctggaatgctctctttttgatcacaggcgggcctttccccccatcagatgctcttaagagccctctgtcaatgcaggttttgggttattaggcacctgtgaaggtgtgggtttcttgggaaggaactgtctgaggaactctaaggtccttagagagaagtgtcatggatctcttctccctcctgttataaaagacagaaacccaatcccagctggcttaagaaggaaagaacacttgctggcgtctgaccaggagggcaggagtgttgccagggattcttctcatctctgggcattgcttccctgtgctgagttcatctcaggcagtcccctccaggggctgacaaggtgactcaccttggccttcatccctccagtttaacaaccccagaggacagcaggtagcttttcttcagtagttccagcaaacgtcccaaagctcacactggaccagtgagggtcacgtgcttatctctgaatcagttcctgaggctaagggcatggaatatgctgcttggccagcctggatcagatgctcagcccagggccagcgggggtagggatgtcagttcacctggacctcaggggctgacaagggggatactaaagtatgcattctcggccaggcgcggtggcacatgcctgtaatccctgcactttgggaggcccaggcaggcagatcacttgaggtcaggagtttgagaccagcctggccaacatggtgaaaccccatctctactaaaaatacaaaaattagccaggtgtggtggtgcacacttgtaatgccagctacttggaaggcttaggcaggagaattgcttgattccatctcaaaaaaaaaa

SEQ ID NO: 407812 - DNA, 335 bp, Homo sapiens
tcaaacttgcatctatacccaacctatggttgtaattgaccggacaagtatagtttacatgtgaatgttggttggtatttttgtttacattagtgagaaagatgaaagtgaaattacccaagatgtgttgaaacttcatgcattcatcagcgatgtgagtggctttgttgaattggataatagttttggaatactggaagagtatttcttcaacattttttgtgctattcacagtgtgacagctatagacatgatatattttaaagtttcatctgtagtattgtcatattttccatgtctttcttaagtctaggcaataaacaaaacaataaaca

SEQ ID NO: 407813 - DNA, 575 bp, Homo sapiens
ttactggatttctttttctcctgattttcggcctcagctcctagagtggcctcagctaggtaaccaacgggagtcgacttatctatgccaggcctgcagtttcacatctgtgacgggatgggacaaatgacaccgtggtattcgatgacagctcccaggtatttcaaggttggcccttactcattcagggggtatgtttgagtgccacggtgtgcccagactctgctaggcaccagagagacaagatacgagtgacgtggttctcctcccactgctgacggaggaattaacacaaaagcagacaacactctagaactggagagaggtccagattgcgacaggagccacaccagagtgtgcaggcttcatggaggacagaagcgacttttgtgccgggacttaaaaagataaggaggccaggtgtggtggctcatgcctgcaatcccagcactgtagaaggcagaggccggcagatcacttgagcccaggagttggagaccagactggggaacatggcaagaccccatctctacaaaaaaattaaaaaatttggcctggtgtggtggctcatgcct

SEQ ID NO: 407814 - DNA, 803 bp, Homo sapiens
tggccgcttccgcgacatagaggaggtgagccaggggctgctcagcctgctgggcgccaaccgcgcggaggcgcagcagcgacggctgctggggcgccacgagcaggtggtggagcggctgctggaaacgcaagacggtgccgagaagcagctgcgagagatcctcaccatggagaaggaagtggcccagagccttctcaatgcgaaggagcaggtgcaccagggaggcgtggagctgcagcagctggaagctgggcttcaggaggctggggaggaggacacccgtctgaaggccagcctccttcagctcaccagagagctggaagagctcaaggagattgaggcggatctggagcgacaggagaaggaggtcgacgaggacacgacagtcacaatcccctcggccgtgtacgtggctcaactttaccaccaagttagtaaaattgagtgggattatgagtgtgagccagggatggtcaaaggcatccatcatggccccagtgtggcccagcccatccacctggacagcacccagctctccaggaaattcatcagcgactacctctggagtctggtggacaccgagtggtagccaggagcctcgtggctgcgtcttgcacccagcgggcatctgccgtggtcagatccatttcaaatgaaatgtggggacatagatctttttttttttttttttgagacagagtttcactcttgttgtccagtctggagtgcaatggcacaatctcagctcacagcaacctctgcctcctgggttcaagcgattctcctgcctcagcctccaa

SEQ ID NO: 407815 - DNA, 872 bp, Homo sapiens
tggccgcttccgcgacatagaggaggtgagccaggggctgctcagcctgctgggcgccaaccgcgcggaggcgcagcagcgacggctgctggggcgccacgagcaggtggtggagcggctgctggaaacgcaagacggtgccgagaagcagctgcgagagatcctcaccatggagaaggaagtggcccagagccttctcaatgcgaaggagcaggtgcaccagggaggcgtggagctgcagcagctggaagctgggcttcaggaggctggggaggaggacacccgtctgaaggccagcctccttcagctcaccagagagctggaagagctcaaggagattgaggcggatctggagcgacaggagaaggaggtcgacgaggacacgacagtcacaatcccctcggccgtgtacgtggctcaactttaccaccaagttagtaaaattgagtgggattatgagtgtgagccagggatggtcaaaggcaggggtatgtttgagtgccacggtgtgcccagactctgctaggcaccagagagacaagatacgagtgacgtggttctcctcccactgctgacggaggaattaacacaaaagcagacaacactctagaactggagagaggtccagattgcgacaggagccacaccagagtgtgcaggcttcatggaggacagaagcgacttttgtgccgggacttaaaaagataaggaggccaggtgtggtggctcatgcctgcaatcccagcactgtagaaggcagaggccggcagatcacttgagcccaggagttggagaccagactggggaacatggcaagaccccatctctacaaaaaaattaaaaaatttggcctggtgtggtggctcatgcct

SEQ ID NO: 407816 - DNA, 974 bp, Homo sapiens
ttactggatttctttttctcctgattttcggcctcagctcctagagtggcctcagctaggtaaccaacgggagtcgacttatctatgccaggcctgcagtttcacatctgtgacgggatgggacaaatgacaccgtggtattcgatgacagctcccaggtatttcaaggttggcccttactcattcagggggtatgtttgagtgccacggtgtgcccagactctgctaggcaccagagagacaagatacgagtgacgtggttctcctcccactgctgacggaggaattaacacaaaagcagacaacactctagaactggagagaggtccagattgcgacaggagccacaccagagtgtgcaggcttcatggaggacagaagcgacttttgtgccgggacttaaaaagataaggaggccaggtgtggtggctcatgcctgcaatcccagcactgtagaaggcagaggccggcagatcacttgagcccaggagttggagaccagactggggaacatggcaagaccccatctctacaaaaaaattaaaaaatttggcctggtgtggtggctcatgcctgtgatcctagcactttgggagttaaaatacaacacttcccagctgcccttatagttaaggtctggccagtgaaatgtatgtggaaatgttacatgacacttctagaaggattcttaaaagacaaatacaccctttcttcccccttcctatttcctggaatgtgggtgtgatggctggagccctggcagccatactgccacgtgtacagacgagtgccgtcctttagggatgacaggagcctggttccctgatgatggcagagccagatatcagcacaaacttatttaaatgggagagagaaggggagaaccaatctcaacttctaccttgtgtaagctgctggttttgggggttttctatgacagataccaaaataaaccctaactgaacatatactcc

SEQ ID NO: 407817 - DNA, 1271 bp, Homo sapiens
tggccgcttccgcgacatagaggaggtgagccaggggctgctcagcctgctgggcgccaaccgcgcggaggcgcagcagcgacggctgctggggcgccacgagcaggtggtggagcggctgctggaaacgcaagacggtgccgagaagcagctgcgagagatcctcaccatggagaaggaagtggcccagagccttctcaatgcgaaggagcaggtgcaccagggaggcgtggagctgcagcagctggaagctgggcttcaggaggctggggaggaggacacccgtctgaaggccagcctccttcagctcaccagagagctggaagagctcaaggagattgaggcggatctggagcgacaggagaaggaggtcgacgaggacacgacagtcacaatcccctcggccgtgtacgtggctcaactttaccaccaagttagtaaaattgagtgggattatgagtgtgagccagggatggtcaaaggcaggggtatgtttgagtgccacggtgtgcccagactctgctaggcaccagagagacaagatacgagtgacgtggttctcctcccactgctgacggaggaattaacacaaaagcagacaacactctagaactggagagaggtccagattgcgacaggagccacaccagagtgtgcaggcttcatggaggacagaagcgacttttgtgccgggacttaaaaagataaggaggccaggtgtggtggctcatgcctgcaatcccagcactgtagaaggcagaggccggcagatcacttgagcccaggagttggagaccagactggggaacatggcaagaccccatctctacaaaaaaattaaaaaatttggcctggtgtggtggctcatgcctgtgatcctagcactttgggagttaaaatacaacacttcccagctgcccttatagttaaggtctggccagtgaaatgtatgtggaaatgttacatgacacttctagaaggattcttaaaagacaaatacaccctttcttcccccttcctatttcctggaatgtgggtgtgatggctggagccctggcagccatactgccacgtgtacagacgagtgccgtcctttagggatgacaggagcctggttccctgatgatggcagagccagatatcagcacaaacttatttaaatgggagagagaaggggagaaccaatctcaacttctaccttgtgtaagctgctggttttgggggttttctatgacagataccaaaataaaccctaactgaacatatactcc

SEQ ID NO: 407818 - DNA, 900 bp, Homo sapiens
ctgaggcatgagaatcacttaaccactggaggtggaggttgcaatgagccgagatcgcaccactgtactccagcctggcctacagaatgaaactttgtctcaaaaaaaaaaagtaaaggcagtatccttttccccgtggggttgtgtgaggggctgtgtgtcccgggctttccttacatctgtgcctcagtccatcatggccccagtgtggcccagcccatccacctggacagcacccagctctccaggaaattcatcagcgactacctctggagtctggtggacaccgagtggtagccaggagcctcgtggctgcgtcttgcacccagcgggcatctgccgtggtcagatccatttcaaatgaaatgtggggacatagatctttttttttttttttttgagacagagtttcactcttgttgtccagtactggggaacatggcaagaccccatctctacaaaaaaattaaaaaatttggcctggtgtggtggctcatgcctgtgatcctagcactttgggagttaaaatacaacacttcccagctgcccttatagttaaggtctggccagtgaaatgtatgtggaaatgttacatgacacttctagaaggattcttaaaagacaaatacaccctttcttcccccttcctatttcctggaatgtgggtgtgatggctggagccctggcagccatactgccacgtgtacagacgagtgccgtcctttagggatgacaggagcctggttccctgatgatggcagagccagatatcagcacaaacttatttaaatgggagagagaaggggagaaccaatctcaacttctaccttgtgtaagctgctggttttgggggttttctatgacagataccaaaataaaccctaactgaacatatactcc

SEQ ID NO: 407819 - DNA, 546 bp, Homo sapiens
tggccgcttccgcgacatagaggaggtgagccaggggctgctcagcctgctgggcgccaaccgcgcggaggcgcagcagcgacggctgctggggcgccacgagcaggtggtggagcggctgctggaaacgcaagacggtgccgagaagcagctgcgaggtacgtggctcaactttaccaccaagttagtaaaattgagtgggattatgagtgtgagccagggatggtcaaaggcatccatcatggccccagtgtggcccagcccatccacctggacagcacccagctctccaggaaattcatcagcgactacctctggagtctggtggacaccgagtggtagccaggagcctcgtggctgcgtcttgcacccagcgggcatctgccgtggtcagatccatttcaaatgaaatgtggggacatagatctttttttttttttttttgagacagagtttcactcttgttgtccagtactggggaacatggcaagaccccatctctacaaaaaaattaaaaaatttggcctggtgtggtggctcatgcct

SEQ ID NO: 407820 - DNA, 1306 bp, Homo sapiens
tggccgcttccgcgacatagaggaggtgagccaggggctgctcagcctgctgggcgccaaccgcgcggaggcgcagcagcgacggctgctggggcgccacgagcaggtggtggagcggctgctggaaacgcaagacggtgccgagaagcagctgcgagagatcctcaccatggagaaggaagtggcccagagccttctcaatgcgaaggagcaggtgcaccagggaggcgtggagctgcagcagctggaagctgggcttcaggaggctggggaggaggacacccgtctgaaggccagcctccttcagctcaccagagagctggaagagctcaaggagattgaggcggatctggagcgacaggagaaggaggtcgacgaggacacgacagtcacaatcccctcggccgtgtacgtggctcaactttaccaccaagttagtaaaattgagtgggattatgagtgtgagccagggatggtcaaaggcatccatcatggccccagtgtggcccagcccatccacctggacagcacccagctctccaggaaattcatcagcgactacctctggagtctggtggacaccgagtggtagccaggagcctcgtggctgcgtcttgcacccagcgggcatctgccgtggtcagatccatttcaaatgaaatgtggggacatagatttttttttttttgagacggagtctcactctgtcgcccaggctggagtgcagtggtgcgatctcagctcactgcaagctccgcctcctcccgggttcacgccattctcctgcctcagcctcctgagtagctgggactacaggcacctgccaccatgcgcagctaattttttgtatttttagtagagacggggtttcaccatgttagacaggatggtctccatctcctgagttgtgatcctagcactttgggagttaaaatacaacacttcccagctgcccttatagttaaggtctggccagtgaaatgtatgtggaaatgttacatgacacttctagaaggattcttaaaagacaaatacaccctttcttcccccttcctatttcctggaatgtgggtgtgatggctggagccctggcagccatactgccacgtgtacagacgagtgccgtcctttagggatgacaggagcctggttccctgatgatggcagagccagatatcagcacaaacttatttaaatgggagagagaaggggagaaccaatctcaacttctaccttgtgtaagctgctggttttgggggttttctatgacagataccaaaataaaccctaactgaacatatactcc

SEQ ID NO: 407821 - DNA, 703 bp, Homo sapiens
tggccgcttccgcgacatagaggaggtgagccaggggctgctcagcctgctgggcgccaaccgcgcggaggcgcagcagcgacggctgctggggcgccacgagcaggtggtggagcggctgctggaaacgcaagacggtgccgagaagcagctgcgagagatcctcaccatggagaaggaagtggcccagagccttctcaatgcgaaggagcaggtgcaccagggaggcgtggagctgcagcagctggaagctgggcttcaggaggctggggaggaggacacccgtctgaaggccagcctccttcagctcaccagagagctggaagagctcaaggagattgaggcggatctggagcgacaggagaaggaggtcgacgaggacacgacagtcacaatcccctcggccgtgtacgtggctcaactttaccaccaagttagtaaaattgagtgggattatgagtgtgagccagggatggtcaaaggcagtatcctttttggggagccattttaacccttgtgcactgtaggtagggacataaaatggtgcatagcaggaccctgtaaaaattagccgggtgtggtggcgtgcatctgttgtcccagctacctgggaggctgaggtgggaggatcacttgaggccaggagtttgagaccagcctgggtatcagtgagaccccacgtctataataaatatagtaaagt

SEQ ID NO: 407822 - DNA, 399 bp, Homo sapiens
gatatatctaattggagttatggaagttgtataatattaatagtaagaactaagaagtggcaagattgaaagatagtgactgagatatttttgagaattgttatacaatacagtattttcaagaagctaaatgaaccatcaacagaaacataataaaaatgcagaagagagggagaaatttttgaacacagtcaaagagaaaagacagattatctacaaagaaattatagattgatgacttttccatagcagcagtgaagaaaaagagtgtattgtcttcagggcattgaggaaaataacctcaatactggaattctagaattctatgccaagtgaagctgcctttcaagaaaaagaacacaatgaagacagttcctgaaaaacaacaaaaacagaatt

SEQ ID NO: 407823 - DNA, 253 bp, Homo sapiens
agtagagacggggtttcaccgtgttagccaggatggtctccatctcctgacctcgtgatccacccaactcggcctcccaaagtgctgggattacaggcgtgagccactgcgcccagccgccagtcacatcttacatggatggcagcaggaaaagagagagcttgtgcagagaaactcccgtttttaaaaccatcagatctcatgagacccattcactatcccaagaacagcacaggaaagacccacccccatt

SEQ ID NO: 407824 - DNA, 188 bp, Homo sapiens
agaatttattctaaatgaggagatttttagctactcttaacacaaaaaaacaacaataaaagtaactatgtaagatgttggagacgttaatattcttcactatatgacctttttctctctatatgtatctcataacatcatgttgtataccttaaatatacataaaaattatttataaaatacttttt

SEQ ID NO: 407825 - DNA, 502 bp, Homo sapiens
ctttttcccaatatggacacctttttgtacttttttattctggtaacaatatgcagtttctgaggattctgtggatctccgtcatatttttcatgatctgcaagtgaaggctgaaacgctttatatggaattcttgacctggtaaatttgtgatgaatccaatctatgtaaacgagagacttcacaccttttgtcccagtctgtagttcattttgcctcttgagctactgacagcaaagtccctgccataagtgtggtggctgttctctttagagagagcgcctgctaaatattcagcatgaaccttcccaccagcagaagctgaggactcactgcttccattattacttacagatcacctttttgtatctgaaaaattttaccttaagtaattctctcttcctttcttccttttatttccctgaatggagtagggattagagaatggctagaaggggcagaggcttggagcttaataccttatggtgttttagcccattag

SEQ ID NO: 407826 - DNA, 287 bp, Homo sapiens
taaattcgcggccgcgtcgagcaaggtctcactatgttgcccaggctagtcttgaactcctgagctcaagcaatcctgtcgcctcgacttcccagtgttgggattacaggtgtgagccaccgtacttagcagatgttgtggccttgagtctcaagatgcagaatttcttcttccttaggggatctctgccttccactgattggataaggtctactcataattatagaggccgtctgttgtgctcaaagtctactgattaaacatgttaatcacagcaaaaaaaaaaa

SEQ ID NO: 407827 - DNA, 320 bp, Homo sapiens
ctaattttagtatatgtacccaaggtgagcactaatttaaaaaaaaaatagaggcaaggtctcactatgttgcccaggctagtcttgaactcctgagctcaagcaatcctgtcgcctcgacttcccagtgttgggattacaggtgtgagccaccgtacttagcagatgttgtggccttgagtctcaagatgcagaatttcttcttccttaggggatctctgccttccactgattggataaggtctactcataattatagaggccgtctgttgtgctcaaagtctactgattaaacatgttaatcacagcaaaaaaaaaaa

SEQ ID NO: 407828 - DNA, 415 bp, Homo sapiens
acctagctaatttttgtatttttagtagagatggggtttcaccttgttggtcgggctggtctcaaactcctgacctcaggttatccaaccgcctccagctacttgggaggctgaggtgtgaggattgcttgatctcgggagatcaagactgcagtgagccatgatcacctcactgccctccagcctgggtgacagagcaagaccctgtctcaaaataataaaataaaccagacaaaagatagggagaaggtctgtcctcctttccttcaagtccttgctcagatgtcagatgtcacctttttattcaggcttactctgattatcgtgtttaaaatggtaacccatgctcccttagacattcctgattctctttgctttgtttttttccataacacgtatcacttctcacatgcta

SEQ ID NO: 407829 - DNA, 317 bp, Homo sapiens
acaccatgcccggcctgggctcccaagtttttactttgctttcacgttccctggagtcttcagagggagcatggctctgttgacaccgtgatttctgacttttggcctccagaactgcgggacaatacatgtctgttgtttaaagccacccagtttgtgataattacagcagccctaggaagcaatatacttagtatggaaaaacaatgtgaaatttctcattagtaattttttatgtgaattaaatgattgatttgataatattcatttgggttaatacaaatatattggattaaataaaatatagtattaaaatg

SEQ ID NO: 407830 - DNA, 568 bp, Homo sapiens
catgtatacacacacacacacacacacacacacacacacatgcacatgtgtcagggatggctctcagagaaaccgtatttgatcagagagctaaaggaagtgaggttgtgagccacagggttatcttgaagaagagcattccaaggacaggggaaacttcctcaaagaccagtaagccagagtgttcttggtgcactcaagggacagggcagaggccagtgtggctgggtagatgggagagagctaggaagagaaaaatcacaggtgatgggattaacaggaaattagggactagatcatgtgaggcctgtatcttaatctaagtgagaagaaaagtcacaggagaacttgagtagaagagcaatatggcataaaaagtaacctttagacaatgtgatatgatgattaggagcacaaatactataggatttttgaagcatttttaaatagataacaataggacttgcccgataaaagaaatgctttaagtcacattttatagatatttgatggctttgcttttaaacgaagtcagtgatatttagtcaccttttaaataaaaaaaaaa

SEQ ID NO: 407831 - DNA, 1013 bp, Homo sapiens
aaggcaacccgtagctggtcctggagtaaagaaaatatgtctcataaaaccgcccaagaagttttctcaagataagaatttgtttcccttgactgaaacactaagaatatcttttttctgctttggggtactttcaaggggtcagcatacccaactcaaggaggtgcaagaaacaaacttaccacttaaatggtaatgctaagcggtcatgttctcaagcagagaaactctttcctaagtatctggaatctaaacatctctgttaaccctaaaaatcactatatgcataatccttactcactgtctaaacacagagcaaattcacttagaaacaacacctacatgaagggaacagttttataagaacacaggatcaccttacctgataagaagaattgctgttgtggttatatgttaagtagaactgtgttactacaaggaaaagtaaaggcacttgtacaaattcccggaatgctttcttgtgttttatatgtatgaaagaagaaaagaagcagaaaagggctaatggggaaatttttttaaattccagagatcctgaccaggcatcgaatcaagctgctatggatacacgaagcaggtttcaactgcccacagctgagttaataatcagtgtcttaatcaaagacctcggcttccaagcctgggatgaaccattttcccttggtagcgtgctgttaccagagcaactcctagaggagggacaacagctaaaacctaggctgaaactcaacaaatgagcttatctgcaagctttatcatcagactctcccccaaggcattacctttcacctaagccctgtgaccttaactgacagccctccctccaccccatgcaatgcagagctctcctggctacagaggaaaggtagaaaacctctcaaaagtcaggcttcccctgaccttgcaacctggatcactggtgggtaaaagaatacaaatgactaagatgggccaagagtccaggagtctagattgctacccccacccatcca

SEQ ID NO: 407832 - DNA, 421 bp, Homo sapiens
acatttggctgctcagaatttctaaacccaagggtagagcatgatctgggcatctccaaataggaaagttcttatatgagtactcctaatgtgtccacccaccaaatctattttattgctgatgcacgttttgccctggcctgcaccttgctgcctaggcctcttgagctcctggtcccgtagtctcacacatccagctatgtgtccgtcacaccccaggctcttgtccttgactatcttcagacacctctcagtttattcttcacagtttgctcttactcctctctttccttgttgctttgttttctggtcctgggtcacatcttcagtagctgcttttggtcactttggtgtgctgatccttgtattgacctttgggtcatggttttccacttaacttacaactcttctctgatttttt

SEQ ID NO: 407833 - DNA, 836 bp, Homo sapiens
aagctaatgggaattaatagatacaaagcattttagaactcctcctggtacaaagtaagtactttgtgggtattagctgctgctgttgatactaatattctgcaattcattttttttaaatggtaagtaagtgccactaaatcaatttcaggtcttcagtgagttccaaaacaaaatttgaaaaacaccatttagatggtggaaatcctctcggcttgcgagggtgggatgaggaacctggaggcattggagaggcaggtggcctctcataaatgactcgatatggcttgactctgctcctaaagatagtgggtagccattcaagagaatagcttgataaagtttacagtgtttagaaaattaaaagattcctctaaccacagtgtgtagagtgaactgaagggctagaccagagtgatgtcaggaactgtgaggcagcttttgtaaaaattgtggccagtgatggaggtagccgtagggacagagacatatagatgtatttctcaggtagactctaggggacttgcttatttgatttgatgttaaaaaaaaaaaaaaaaaaaagaaaggagaaagaacaataagaaagaattgccacagttttagcctggtcagctgggtggatagtcacacaccggctagtaaatactggaagaggatcctatttggaggacatgtgacatgttgcatctcataagcctgtgatatgtctacctggagggaactggagggtggaagagggggaagggctggcactgtagagatttggaaatcaaagacatgtcaggtggtgcttgcaaccatggcagtgtgagtgaacagatggtctgggaagt

SEQ ID NO: 407834 - DNA, 335 bp, Homo sapiens
gctactcaaaatatgattcctatactaccgctccaatcctatttaactgactctctgtttaacacaatccactggtgattcagatgaatgataaagtttggataccttcagggaacctgtcctgacctctcagaccagatcacatacactgtcttctccattagactacaaattcatgagggaagggacatctctgtctcattcttaataggctgtgaacactaagtatggtacctgacaaagtgtaaaggctgaataaatacttgcgtgggtgaatggacaaacctagattacatgaggttaaatcaggcagactgtggtggatgtggttgcta

SEQ ID NO: 407835 - DNA, 423 bp, Homo sapiens
cactgtaactgaatttgcatttcagtaccattccaatagggcacagagttgagaattgagtgcaaagatcatgaggaaggtcagggtattaccataatggtctaggcagagaaagtatacatctttaatagggcaagacaatggagttagacaccttcattcattcaacaaatctttatgtgggggcatatggcatgcccctaggctgctggggatgcagagtgcctgtctgaggattcagccactgaatggttgctagatggtcacgagtatgaggcgctttaaaaatttaatctcatgtgggaattacatgggggagattccaaggaaccacttgcgctggtgcgtccgcggccgtcgcgaggcgtccgtccttccccgagggcgagcgccgggcaggcagggactcgccacccgcagccc

SEQ ID NO: 407836 - DNA, 411 bp, Homo sapiens
aaaaaatatttattttatttttgtagagatgcgggtctcacaatgttgccaaggctaggttggtttttggcctcaagttatcctcctgccttggccttccaaagtgctgagattacaggtgtgagccactgtgcttctttgtctagtaagttttgatttgctactggatattgtaaatgtgatgatgttgggctctgggctttgtggtcttttgtaaagaatattgggttttggccaggtaccttggctcatgcctgtaactccagcactttgggaggccgaggcggacaggtcgcttgagcccacgaattcgagcctagcctaggtaacatggcaaaactctgtctctacaaagagtacaaaattgtcattgcatggtggcagaatagcttttactctagggaacttcac

SEQ ID NO: 407837 - DNA, 398 bp, Homo sapiens
aacaataataataatacagaacaattattaaaatatactgtaataaaagttatgtgaatgtggtctctctttgcttcccttctctctctcaaaatatcttaatattcttttactgcagttgacgcaagtaactgaaacgaggaaagcaaaacgacgattaaggagggagtgctggactcacaaatccctagagacagggcccatgccacaccatacaggggacacatggggaagcgccagggtcagtgaaggggagagggatgtggggaaacactgccaagagcctccatggtgttttccacaggaaggaaggtgcagcaggatgagcaggattaggataagtagctagtctgaatcattacagacggcgctaggaggtaggggctgtccctaattgt

SEQ ID NO: 407838 - DNA, 437 bp, Homo sapiens
ggtgctttaaaatctatccccaatgaaaggccgtgcaactggttccttgcagaactgctcttacccgactgtgctgttgtgggatcccagcagcctttactggggaccagaataaaaaacagcccatgaaactgcttcctggaaaagaatggtttagaagaacacattggtggaattccttcctggtatcagtactgaaaaaagtcaatgccacttctgaacaatgagattattccttacaggcagggcaagctatgtatctaatcatatatccttctctgaattggcagctctcaggcagagccaaatatccagtctacttctaccacatactgtgtgtctaagctcactagacctgtttgttctatttccctttcaccttactctccttacttgttcatttatcttacctgtttataagtctcattaaatccttt

SEQ ID NO: 407839 - DNA, 454 bp, Homo sapiens
acaggatttaaagctgtacagtcaaactccagtgcccacgcacttaatctcaacacctctttgctatctccctagcagtttatgaatgagaaaaccgagcccaggatgtctgactctctcctgaggtcacacatcaaggtgctgccacagccagatctagaacccaggttaactcttgtctcatctagggccttgtcttcttgaagaacatacttactgtggaaatacaggtgaaaattccgcatcaaacagagataccaaataacagctctaaatagacagtgatgcatttgctctctccttcttgttagtgtagtttaatttcctgagaagctttacacatacccctgagcttttctgtcacagctaattgtgcaacttccaagtagttgtcctgcctatgtttgttacttgggctcattaacataccctttaccgtagatgacactctcat

SEQ ID NO: 407840 - DNA, 335 bp, Homo sapiens
ggtcagagaagttcggaatttcttttgtgatctctcaatttgtgtggtagtaaagtgctcacagagtcacaacttagaaaacttgatttcttttctccattttattgtgagtttgaatgaccaacttaagtatttaatttctattatttataatgaagcacttttcaattcaggctgaatctcagaaaaaatgaatataaaaatgtaaatataattagaacaattgaaacatttttattgtgatagaatatatataacatgtaatgtaccattttaaccatctttaagtgtacagttcaatgacattaaatacattcttattgtggtgcaggtgc

SEQ ID NO: 407841 - DNA, 426 bp, Homo sapiens
gtagcaagagctagctgacacaattgcatatccaatatttgaattcaggtcctgaccttacctaagaccctataactgaaaggggagctggaaagtggtcctagtccatgttcctcaggagaaagaggaaaatagatttggtgaggttttagcccagtctctgccagcatgtgcccccctggttttacacccattcatcccagcttgagaaccacagtaatggtgatggatttaatgcatttaagcaaaagggtgcattgaatgcatttaagcaaagggatgttatggttatatttggctatttgaaatattactctggaggaagagtgaaaaatggattggctgaggtgagactgagaacaggaggcagtttgttttggcaatggactataatgaggggcagtaagattaaagaggaaaaaaaaa

SEQ ID NO: 407842 - DNA, 594 bp, Homo sapiens
atactcaggtgtgctgctctggagtctgcattcttaacaattatggtaagcagatcttgataaaataatgaaagctgtgaaaactacaaagtactatctaattctttcatcaagccttacctggaaactggccagttttttaattcaaagccctagtctttgcctacagaagtgttagggtccttaaggggccttaggctgctgtcctgttacccctagtctaacccctggcttgccttggtcattgctcccccactcagtcttgccagctcagggtaggggcacccaagtcctagcagctccctctcccagctcttgcacccaacaccctctgggttaagtcactgtccactgaaaaccctttcttctcttccttagtcttccctggctgtccagaagaacaagcctatcagcaagaaggaaatgattcagaggtccaaacggtaagaccaagaaaacaagagtttgtgtacaagtgttaaccaggccaccaagtggtcaggagctctggcttgcacccagaataaaggcattatgctcaaatttaaacattatgagaaagttgtgagagtcatttctcacttatggcactga

SEQ ID NO: 407843 - DNA, 1075 bp, Homo sapiens
tttcttttaactgtggattgattttgagattttgacttagattttagatagcttttctcagaagaaataaacgcaaaaacccgatattgttgtaacatcagtttcctgtgtcctctagaatcatttaaaacctggttggatcttccataatccagtggaattggatatgagatgtagctggagaagtttgttttgctacatatcagaatctccaattagtttcatttagaaaggaatatagccttataattttatgctgggttactgtggaaccaaatatcatagaaggatgtgtgatatttttatgtttttcaagaaggtagtatagatttaaaaggtgggatacatattacctgtcctaatgataggactagatttttttttttttttttttttggggagacagaatctcgctctgtcgcccaagctggagtgcagcagcgtgatctcggctcactgcaacttatgcctcccagtgattctcctgcctcagcctcccaagtagctgggactaccggcatgtgccaccacacccagctaatttttttgtatttttagaagagatggggtgtcaccatgttggtcagactggtcttgaactcctgacctcaaatgatccgtccgccttggcctcccaaagtgctgagattacaggcgtgagccaccatgcctggctagaactagactcttaatctcttcatcctaatgcatggcgtgtgttgatgttcacttaatgtctgtcaactgggtgtagttacaccagtagcggagaggctaatctttgaaagcctgaagtgttgtcttcatctttgcagggtttttagttgtgggtgcatatgggaatgattgtaagaccaacaaatgttttctgattccatatgggcttcttacatttttcaccttggaatctgggaacaattgaaacctaccatatgccttgaacagtagcagtaaagagccagtttctttaaactagacattatggtgctgcagctcatctcaaaactgatagcaggctactctggacacactacatatagagtagccctgctctgcaaggagcagtaataaatta

SEQ ID NO: 407844 - DNA, 250 bp, Homo sapiens
ggtgagaactaaccagtgtttgtgtattcttgatcttcaaaaattattcacgttttcaaatttttgcattttctgagaagtttttgtgagaaatattcacagacattttcaactatatgaagggatatgattttattaaccagtgaagaaggttaaggcaaaaataaatacttatttaaaatacaggcatctactgtatatctccggtgaccttaaagtacatttctattataataaaggtgaaaaatat

SEQ ID NO: 407845 - DNA, 627 bp, Homo sapiens
ttgaggaccccgtgcagaatacactcaaaaggcactcctccatgaagttttccaagattctctagaccatcaataccctttcccatcttggaattcctgaagttttctttgtatctgtcttctggccatctcacagtctctcatattgtagttaatgcctataaacctcacctgctagagttaagctaggcaatactatattatttatctttctttttctttttctttgagacggagttttgctgttgttgcccaggctggagtgcaagggcacgaatctcagctcactgcaatctccacctcctggcctcaagtgattctcctgcctcagcctcccaagtagctgggattacaggcatgcaccaccatgtccagctaatttttttttgtatttttagtagagacagggtttcatcatgttggtcaggctggtcttgaactcttgacctcaggtgatccacctgccctggcctcccaaagtgttgggattacaggcgtgagccaccacgctcggctttaattatatttctaagcaaagagcatcctactaatctttggggcaccacagtgcttggcaccattactagcatatatggcagatactcaataaatatttgtcatatgcaa

SEQ ID NO: 407846 - DNA, 254 bp, Homo sapiens
ctgctttatattcgctggcagctgcttagattgtgcccaccagattaagggtgggtctgccttccccagcccactgactccaatgttaatctcctttggcaacaccctcacagacacacccaggatcaatactttgcatccttcaatccagtcatgttcacactcattattaaccataacatttatctttctaaaatagaacaggaaaatatccatgattataaaaagagatgcctcattaaatgctattagaa

SEQ ID NO: 407847 - DNA, 1029 bp, Homo sapiens
  misc_feature (1)..(1): n is a, c, g, or t
  misc_feature (7)..(8): n is a, c, g, or t
  misc_feature (10)..(10): n is a, c, g, or t
  misc_feature (613)..(613): n is a, c, g, or t
nagttgnnangggaaagaaaatgatacctagagaagagcatcaaagtcagatctttttgtagtttgcttttttactttgtttttacttaacccatttatgcctaaggttgcaattttttgaatttttgcaatcagaccttggcgatgaccttgaacaacagggtataagtaactcccacatgcttagtgttccagtaatggaacacagaagaaacagcatacagcatttaaatgaagagagagaagatttttaaaaactaggagttgggcagcataattattaatataattattaataggtatcagtcacatgtccttttcaagtaccagagaccatgccaagcattttacagtcagaagctaatccctgtaataccttacagatataatagatatcgtcatctgtcaaatggtgatctgttttataaatgagggaactgaggcatgcaagagggggtagaatctagaaccctgataggagtagccgcagtaactcctccatgtttaaaggagggcagggtgccaggatgggtgtgggtgcaaatgtatttagttgaggcgcgagcatggcattaaagaacatgggcttgggaaaccgtaatggcagatttcngtttatagcccagctctgttagctttataaatcccagaaagtgacagtttctttcagcttgtttcctcttctttaaatggggataataataggattacaggatattagcatgatcattgtgattaatataagtaaacagtgcctgaacactgttggtgggaatatgaattagtacagctattatggaagttcctcaaaaaactaaaaatagaactaccatgtgatccagcaatcccactagtaggtatatatccaaaggaaaggaaatcagtatgtcaaagagatacctgtactccagtgtttattgctgcactattcataatagccagaatatggaatcaccctaagtgtccactaatagatgaatggataaagaaaatgtggtatatatacacaatggaatactattcagccat

SEQ ID NO: 407848 - DNA, 398 bp, Homo sapiens
gacctttgatatcatttggttcagcaaccttaatctgggtattaatttcctcctggatgcacatttttctaaagagaggatccacggctagcaacctattcttgaagggacgcttatccctccataggttaaaaatcacagttctaatctatccctttcttttacaagcaaggctgtaatctcaagagttaaacggtttatctttagtcccacagaaaaccagtcggtgttgaaactcaggcccctgactcctcatcttaatctcttacgaaggcctctcaccacgaaatgaataacactacaaaagtaggttcaaatacattacactcatgcttgacatgttcggttacaaaattattcctcctttctgggctagcctctgctgtctgagttctctt

SEQ ID NO: 407849 - DNA, 1011 bp, Homo sapiens
ccagggtccacagggagacccgttgtccctgctcccccaccaatttctcccaagagaaaggaggtctcagatgaggacccttttgcaaattgttgctctggaggctgaaaaatcaagctcgagctgcctgctggtcctgatttccttcctggccgttagtccctgcctttttcctctttgtcggttttcaaacgcaactgcccgcgccaccgggagctgcccctgacttcctccttccctcctggccccagctctcctgctcttgttcctgcccctgcctccctccctaatacactcaactgcttaaatgtcatttgtgaaacaacagaaggacgtgctgtttttgcagcatcttggggaacaatttttttgattcatttggtgttaagaacactcataagaaatgtattcagtgaccctcgccagcctcagtcactggtgtggttcccatttggtggttggtgagcaaaacattttccccccagaaatgtccactcttctagcactttcagcctttctccgtaggttcctttgtcttcaggtccttgggtacttgaagccctgcagttgctagttcattttccagctgggagagcgatcctgatccagctccttctcaggcctttgaaccaagttctttggcaactggccagggagggaatatggccatgtcaggcgtgcttttccggcccatgagataaaaggaatggctggaaacactattccttccgtgactcacagggccaacctggcatgtgcaaggaacccgtcagactgggtggggacctcccgtccaaatttacctgcgcagacacagcacctcttggaggagctaggaagtgggagttcccttagcacgtgatccatatcttccctccaggccctaccgtgcctgtcttgtagcatgacgatgtatattctcaccttagtagtccccttagcctgtaaagctctttagggcaggatctacatctgcgtaaccttcagggcccccagtgctgagaactgtgc

SEQ ID NO: 407850 - DNA, 426 bp, Homo sapiens
caaggtaactgggattttaggttaaaaaatgtacattatatatggatagggaagataagagaatgtatggcaaagacattttaaaagttatttcttctagttttcattgagataccatttatttttggctttgtaatttcttaaaatatgagcagatttccaacagcagatgttacctttataattccttcgaagagaaacctccttgtacaatcaagtataaagaaatttccagctagggaaaatagatgttgatatatggaaacatgcaatttatgtaagttggtgcagaagactttgtataaaactatgcccagtataagtcaagttataattaaggtgaaataaatgtgcacatatatgtatagcaatattatatattatatatgccatatttaaactataataaatggagcaataagaaac

SEQ ID NO: 407851 - DNA, 336 bp, Homo sapiens
aactacttttttcatgtaattatgaaaatttgaggcttttttttgagacggagttttgctcttgtcgcccaggccggagtgcagtggcacagtcccggctcactgcaacctccgcctcccaggttcaagtaattcttctgcctcagcctcatgagtagctgggactataggcgtgcgctaccacgcccaactaatttttgtagaaaaattacggctttttaaagatctactaattttaaccaatttgccattagtccattagttttttctttaaacttgcctacactactaaaaccagttctattgcctttatcagattctttgttctgtgagtta

SEQ ID NO: 407852 - DNA, 583 bp, Homo sapiens
attaaaagggcatctttcagtttttagaagtgggagttaatgggcaagctgggtccaaatgttctaggatggacccacgtgatgccgtgcagagtggtttggtcaacaggccaaagttaatgatccacagctggaagtacccaacaaggcccaaaaaggaagggtccttcttggtgtggggaaggggcacatcctgtattagctccttccatcgggctggcatggctcaagaattaggggttagggtgagtccaaggttagtgacttgggtttgggctacttgagcctttgtaggtaaaacctgatatccctggccatagaggaaatttagaagttgggtgatgtgttgatggatagatcaaaggagggactacacataaggaggtcattgatgtattgaaggaggctgctaggagcaaggggaagctcgattagttccttggtgagagcctgcccaaataggagggggctatcccggaacccctgtgggagtacagtctgttagttaggtagatgtgtgagtatctgggtctgaccaggtgaaagcaaaaagactttgggaagccagatccaagggaatagt

SEQ ID NO: 407853 - DNA, 414 bp, Homo sapiens
actcctaagtctctttgcaggaaggggaggaggggacattaaaatgtcatctttttgaccaagctgttaaaggtttccaaggtattcatctgcaagttaacatgcaattgaaggaaaatattttaaaggagaaaagatttcacaggtcggcgtatgtcttaaaaatgtaaaacaatcttttctaaagcatagagatgtaatcagccattctctttgactctacataagagtttcaaattgcattagatgttgattacttgtatttcagagtgtatagaaaccccagcaccatttcattttctccctctttgttatcagaatgtagtgtgtcctggtgtccagatttttacgggtttatcaagtaagagaggaatgtaaatggaatatttgtctggttttggtgaatacaattgt

SEQ ID NO: 407854 - DNA, 1011 bp, Homo sapiens
aaccgcaaagcctgccgggagcttggtgcgctatggcgacacccagcctgcggggtcgtctggcgcggtttgggaacccgcggaagcctgtgctgaagcccaataaacctctcattctagctaaccgcgtcggggagcggcgccgggagaagggcgaggcgacttgcatcacggagatgtcggtgatgatggcttgctggaagcagaatgaattccgcgacgatgcgtgcagaaaagagatccagggcttcctcgattgtgccgcgagggctcaggaagcccgaaagatgagatcaatacaggaaaccctgggagagtctgggagtttacttccaaataaattgaataagttgttacagaggtttcctaacaaaccttacctcagctgaaaatggacaagtattttcaatgactgaaatatagcttctgacaactatgcagaggcattttagagacattggcattgccatgccctctttggagggtagaagaggcaaaacacttttttcaccctttggaatcatagtatgggtagaagttatgatttatcttgaaataaaatcctctgaacaaaaaaacaaacacaaacaaaaaaaaaacaaaaccttgtgtgtgggcgccgcacccggggacccccgaaaaaaacgctctttcaaaaaccacttgcggttgtgggcgcaccgcggggacccaagagggtaacaggaaacccggggccaagagaggggttgcccccaggagagaaaaaacgcggggagccgaagtagacacaagccggggcggcggggaggtttccctcacccccaaatattaaaaaaaaagagcgcccgggggggaggagactaccagcagggcggggttcgttagagaaacaaaaacctccacagaaaaggggggagggtctccgagagaagggaccaaaaaccgagggggggggcactctacatcacaacgagggggagaggcccacaaagcagaaagcgccaccgaaaagaccaaataataacgccg

SEQ ID NO: 407855 - DNA, 1612 bp, Homo sapiens
aaccgcaaagcctgccgggagcttggtgcgctatggcgacacccagcctgcggggtcgtctggcgcggtttgggaacccgcggaagcctgtgctgaagcccaataaacctctcattctagctaaccgcgtcggggagcggcgccgggagaagggcggtgagcagtcggagtcaggacggccccggagcggaagccggagcatgagcaggggcgggtgggtaggagggcaggaaggtgggtcttcttgtgactgaaggtcccccggatctgcccctccagaggcgacttgcatcacggagatgtcggtgatgatggcttgctggaagcagaatgaattccgcgacgatgcgtgcagaaaagagatccagggcttcctcgattgtgccgcgagggctcaggtgaccgatggctcctggggtgctttctcaggaaaagaatgggggagatagaagtaatgattctccctgccttttgctaggaaaggccctttcattcatttgggaggtatattattcacgccaaagtgggaaaggttacagttttgaaggctgtgtgatcttgacggatttattcattgctctgaactttcgagttactgtacgtaaaatgaggctaaccaataccaccttaaagaatgttgtgagtgtcagatgaagtaatgaatgggaaaatcattttgaaaaatgtaaattgctgctcaagtagacattattgtgtgaaatagaactaaagagactaaaactaaataatgacaatagtttggtttcctgtctaggcttaattgctagctgagatagtagcttctgaacatagtctcatttgtaggtcccaacgcccttttgttgaaaagaggctgacatagatctctccaggctggttaacatcttcatgtgctttagggcattgtgagaactatgggcctacatcaggacaaacttgattgattgattggttttttgggtcagatcttaaaagtctggactagacaaactgtagagctgtcattcttgtatttgttttgtgttttcaggaagcccgaaagatgagatcaatacaggaaaccctgggagagtctgggagtttacttccaaataaattgaataagttgttacagaggtttcctaacaaaccttacctcagctgaaaatggacaagtattttcaatgactgaaatatagcttctgacaactatgcagaggcattttagagacattggcattgccatgccctctttggagggtagaagaggcaaaacacttttttcaccctttggaatcatagtatgggtagaagttatgatttatcttgaaataaaatcctctgaacagaacttggccttttgttgtgaattaggtactctcttcattcttgagcctcccctagaccctggaaattctttccttcctgatttgccctaggagcaggacaaataccgttgtattgtctttccctgcatttgaagtcttttacaccatttagtgcccttgcttttggatgcaataaggaagttgaagttgccttcgtctgtaaatacttagtgattgcctattttgtgcgtagtccctgcaaggtgctctctgaataataaagttaacaaactggtgacctagag

SEQ ID NO: 407856 - DNA, 606 bp, Homo sapiens
aaccgcaaagcctgccgggagcttggtgcgctatggcgacacccagcctgcggggtcgtctggcgcggtttgggaacccgcggaagcctgtgctgaagcccaataaacctctcattctagctaaccgcgtcggggagcggcgccgggagaagggcgaggcgacttgcatcacggagatgtcggtgatgatggcttgctggaagcagaatgaattccgcgacgatgcgtgcagaaaagagatccagggcttcctcgattgtgccgcgagggctcaggaagcccgaaagatgagatcaatacaggaaaccctgggagagtctgggagtttacttccaaataaattgaataagttgttacagaggtttcctaacaaaccttacctcagctgaaaatggacaagtattttcaatgactgaaatatagcttctgacaactatgcagaggcattttagagacattggcattgccatgccctctttggagggtagaagaggcaaaacacttttttcaccctttggaatcatagtatgggtagaagttatgatttatcttgaaataaaatcctctgaaccgcctgtgggagttaaaaaactataaaaaaaaaaa

SEQ ID NO: 407857 - DNA, 857 bp, Homo sapiens
aaccgcaaagcctgccgggagcttggtgcgctatggcgacacccagcctgcggggtcgtctggcgcggtttgggaacccgcggaagcctgtgctgaagcccaataaacctctcattctagctaaccgcgtcggggagcggcgccgggagaagggcgaggcgacttgcatcacggagatgtcggtgatgatggcttgctggaagcagaatgaattccgcgacgatgcgtgcagaaaagagatccagggcttcctcgattgtgccgcgagggctcaggaagcccgaaagatgagatcaatacaggaaaccctgggagagtctgggagtttacttccaaataaattgaataagttgttacagaggtttcctaacaaaccttacctcagctgaaaatggacaagtattttcaatgactgaaatatagcttctgacaactatgcagaggcattttagagacattggcattgccatgccctctttggagggtagaagaggcaaaacacttttttcaccctttggaatcatagtatgggtagaagttatgatttatcttgaaataaaatcctctgaacagaacttggccttttgttgtgaattaggtactctcttcattcttgagcctcccctagaccctggaaattctttccttcctgatttgccctaggagcaggacaaataccgttgtattgtctttccctgcatttgaagtcttttacaccatttagtgcccttgcttttggatgcaataaggaagttgaagttgccttcgtctgtaaatacttagtgattgcctattttgtgcgtagtccctgcaaggtgctctctgaataataaagttaacaaactggtgacctagag

SEQ ID NO: 407858 - DNA, 1489 bp, Homo sapiens
aaccgcaaagcctgccgggagcttggtgcgctatggcgacacccagcctgcggggtcgtctggcgcggtttgggaacccgcggaagcctgtgctgaagcccaataaacctctcattctagctaaccgcgtcggggagcggcgccgggagaagggcgaggcgacttgcatcacggagatgtcggtgatgatggcttgctggaagcagaatgaattccgcgacgatgcgtgcagaaaagagatccagggcttcctcgattgtgccgcgagggctcaggtgaccgatggctcctggggtgctttctcaggaaaagaatgggggagatagaagtaatgattctccctgccttttgctaggaaaggccctttcattcatttgggaggtatattattcacgccaaagtgggaaaggttacagttttgaaggctgtgtgatcttgacggatttattcattgctctgaactttcgagttactgtacgtaaaatgaggctaaccaataccaccttaaagaatgttgtgagtgtcagatgaagtaatgaatgggaaaatcattttgaaaaatgtaaattgctgctcaagtagacattattgtgtgaaatagaactaaagagactaaaactaaataatgacaatagtttggtttcctgtctaggcttaattgctagctgagatagtagcttctgaacatagtctcatttgtaggtcccaacgcccttttgttgaaaagaggctgacatagatctctccaggctggttaacatcttcatgtgctttagggcattgtgagaactatgggcctacatcaggacaaacttgattgattgattggttttttgggtcagatcttaaaagtctggactagacaaactgtagagctgtcattcttgtatttgttttgtgttttcaggaagcccgaaagatgagatcaatacaggaaaccctgggagagtctgggagtttacttccaaataaattgaataagttgttacagaggtttcctaacaaaccttacctcagctgaaaatggacaagtattttcaatgactgaaatatagcttctgacaactatgcagaggcattttagagacattggcattgccatgccctctttggagggtagaagaggcaaaacacttttttcaccctttggaatcatagtatgggtagaagttatgatttatcttgaaataaaatcctctgaacagaacttggccttttgttgtgaattaggtactctcttcattcttgagcctcccctagaccctggaaattctttccttcctgatttgccctaggagcaggacaaataccgttgtattgtctttccctgcatttgaagtcttttacaccatttagtgcccttgcttttggatgcaataaggaagttgaagttgccttcgtctgtaaatacttagtgattgcctattttgtgcgtagtccctgcaaggtgctctctgaataataaagttaacaaactggtgacctagag

SEQ ID NO: 407859 - DNA, 1310 bp, Homo sapiens
taagatacaaaggaatgcaaaattaaaaaatgatgccaggaaagtaaaacccagacaccatttcgttatcctgatatctcacatagggctctaataaggcaatgtggtgttgaacaaaagctcatggttcatttaacttcctgatagtttcatattcagattgaaatctgccaataaaaacatattgaaaatattattagataagattacccccagaaaaaaggcaaaggaaagtaacagctccaaagaaaacattcgatgtgtttaaacggtgttgaggcgccccttgctggcatatgtgtgtattatccaactctatctgcatttcttgacctttttttggtaaatttggtggtgcaaattagttctatattttatatttttatatatgtctcttttttggtgttgcttgaaatggtgtaaaatgtgattcattctccagtttcttccatgcgtcttaatttgtcagagttttcctcagttcccttttctctgtgaacttttcatctttccctgcctggtcactctgtccttttactgaccttggctttactttttaaacaattggttctacgtcctgtgaggtttgggttttgtgggacttggtgacagccctcctgtgactgcctttggtgttctttgcctgtgacttccctcagtggcttccagcagaggccccaggccacaagctgactcctctctgagattccagaaggcgacaggccttgcgtaccttaaatcatcctctttctccattaactctcaagtcgacgatttaagatatgtcaattttctcaacttccatagagcatcagaatgtgaattcaagaatcttagaactaatttagaaagaaaatactgagatgtgagaaggagaatgcatgttcaaaggcacaaattgaaattaaaatattgtagttaggcgagcacaggacttttgattacaccgagcggactcaagtctttgtatccaaagtattctatttgtaaatcatatttaatttctagaaatctgaaatattgaaatagcttctaaagaggtccataggaaatgtatgtcagggtagaataaaaattacacattctttcttattcagcattgtttaaatcatcatgattgaaacttctgtaacttcagtacaccatgcagccttctatgtggtatggatttctaacattggagttctctgcccaaaattttctgagggactttccctccctacctcaatctgaaagtctgtgggatgggggagccaaggctctgaacagctctttcatccatcttatgtgcaaggataaaaatctctagg

SEQ ID NO: 407860 - DNA, 2725 bp, Homo sapiens
taagttttcggcagtttccggggagactcggggactccgcgtctcgctctctgtgttccaatcgcccggtgcggtggtgcagggtctcgggctagtcatggcgtccccgtctcggagactgcagactaaaccagtcattacttgtttcaagagcgttctgctaatctacacttttattttctggatcactggcgttatccttcttgcagttggcatttggggcaaggtgagcctggagaattacttttctcttttaaatgagaaggccaccaatgtccccttcgtgctcattgctactggtaccgtcattattcttttgggcacctttggttgttttgctacctgccgagcttctgcatggatgctaaaactgtatgcaatgtttctgactctcgtttttttggtcgaactggtcgctgccatcgtaggatttgttttcagacatgagattaagaacagctttaagaataattatgagaaggctttgaagcagtataactctacaggagattatagaagccatgcagtagacaagatccaaaatacgttgcattgttgtggtgtcaccgattatagagattggacagatactaattattactcagaaaaaggatttcctaagagttgctgtaaacttgaagattgtactccacagagagatgcagacaaagtaaacaatgaaggttgttttataaaggtgatgaccattatagagtcagaaatgggagtcgttgcaggaatttcctttggagttgcttgcttccaactgattggaatctttctcgcctactgcctctctcgtgccataacaaataaccagtatgagatagtgtaacccaatgtatctgtgggcctattcctctctacctttaaggacatttagggtcccccctgtgaattagaaagttgcttggctggagaactgacaacactacttactgatagaccaaaaaactacaccagtaggttgattcaatcaagatgtatgtagacctaaaactacaccaataggctgattcaatcaagatccgtgctcgcagtgggctgattcaatcaagatgtatgtttgctatgttctaagtccaccttctatcccattcatgttagatcgttgaaaccctgtatccctctgaaacactggaagagctagtaaattgtaaatgaagtaatactgtgttcctcttgactgttatttttcttagtagggggcctttggaaggcactgtgaatttgctattttgatgtagtgttacaagatggaaaattgattcctctgactttgctattgatgtagtgtgatagaaaattcacccctctgaactggctccttcccagtcaaggttatctggtttgattgtataatttgcaccaagaagttaaaatgttttatgactctctgttctgctgacaggcagagagtcacattgtgtaatttaatttcagtcagtcaatagatggcatccctcatcagggttgccagatggtgataacagtgtaaggccttgggtctaaggcatccacgactggaagggactactgatgttctgtgatacatcaggtttcagcacacaacttacatttctttgcctccaaattgaggcatttattatgatgttcatactttccctcttgtttgaaagtttctaattattaaatggtgtcggaattgttgtattttccttaggaattcagtggaacttatcttcattaaatttagctggtaccaggttgatatgacttgtcaatattatggtcaactttaagtcttagttttcgtttgtgcctttgattaataagtataactcttatacaataaatactgctttcctctaaaaagatcgtgtttaaattaacttgtagaaaatctgctggaatggttgttgttttccactgagaaagctaagccctacatttctattcagagtactgtttttagatgtgaaatataagcctgcggccttaactctgtattaaaaaaaatgtttttgtttaaaaaaaactgttcccataggtgcagcaaaccaccatggcacatgtatacctatgtaacaaacctgcacattctgcacatgtatcccagaacttaatgtaaacaaaaaaatcttaaagtgcaaatattaaaaaaaactgttctctgtgaaaaaaattatattccatgttataaagtagcatatgactagtgttctcctagagatcagacttttttgattgtatagtttgcattaaaaagttgtacagggagggatgtaacctgtatcttcaggataatagggaaattaataaggaaaataataattactaaaatttgagttgaagtcagggaattatttctttggttttgagtctctttatacatccattagtagaacctgtctagtctgattgccacagtccttgaattgatggtaagggggagtcagttacagttagaaaaaaacctgggcaaaaactactagttaaatgatcatgaattttgagtatgtgttttaaaatgcttggagttattgcagaaaaatgatattctccattagaacatttgatgtgtgacttttgacataggataaggtgataagaaaattaagttgaaaaatagtgactcaagtacagcaaatcagatttttggctactgagattaaagaagcaaatatttaaaggattatcagcaattttcaaatacatatttttcactgcagtggttttgaagaatgttttaaggttatattta

SEQ ID NO: 407861 - DNA, 1836 bp, Homo sapiens
taagttttcggcagtttccggggagactcggggactccgcgtctcgctctctgtgttccaatcgcccggtgcggtggtgcagggtctcgggctagtcatggcgtccccgtctcggagactgcagactaaaccagtcattacttgtttcaagagcgttctgctaatctacacttttattttctggatcactggcgttatccttcttgcagttggcatttggggcaaggtgagcctggagaattacttttctcttttaaatgagaaggccaccaatgtccccttcgtgctcattgctactggtaccgtcattattcttttgggcacctttggttgttttgctacctgccgagcttctgcatggatgctaaaactgtatgcaatgtttctgactctcgtttttttggtcgaactggtcgctgccatcgtaggatttgttttcagacatgagattaagaacagctttaagaataattatgagaaggctttgaagcagtataactctacaggagattatagaagccatgcagtagacaagatccaaaatacgttgcattgttgtggtgtcaccgattatagagattggacagatactaattattactcagaaaaaggatttcctaagagttgctgtaaacttgaagattgtactccacagagagatgcagacaaagtaaacaatgaaggttgttttataaaggtgatgaccattatagagtcagaaatgggagtcgttgcaggaatttcctttggagttgcttgcttccaactgattggaatctttctcgcctactgcctctctcgtgccataacaaataaccagtatgagatagtgtaacccaatgtatctgtgggcctattcctctctacctttaaggacatttagggtcccccctgtgaattagaaagttgcttggctggagaactgacaacactacttactgatagaccaaaaaactacaccagtaggttgattcaatcaagatgtatgtagacctaaaactacaccaataggctgattcaatcaagatccgtgctcgcagtgggctgattcaatcaagatgtatgtttgctatgttctaagtccaccttctatcccattcatgttagatcgttgaaaccctgtatccctctgaaacactggaagagctagtaaattgtaaatgaagtaatactgtgttcctcttgactgttatttttcttagtagggggcctttggaaggcactgtgaatttgctattttgatgtagtgttacaagatggaaaattgattcctctgactttgctattgatgtagtgtgatagaaaattcacccctctgaactggctccttcccagtcaaggttatctggtttgattgtataatttgcaccaagaagttaaaatgttttatgactctctgttctgctgacaggcagagagtcacattgtgtaatttaatttcagtcagtcaatagatggcatccctcatcagggttgccagatggtgataacagtgtaaggccttgggtctaaggcatccacgactggaagggactactgatgttctgtgatacatcaggtttcagcacacaacttacatttctttgcctccaaattgaggcatttattatgatgttcatactttccctcttgtttgaaagtttctaattattaaatggtgtcggaattgttgtattttccttaggaattcagtggaacttatcttcattaaatttagctggtaccaggttgatatgacttgtcaatattatggtcaactttaagtcttagttttcgtttgtgcctttgattaataagtataactcttatacaataaatactgctttcctctaaaaa

SEQ ID NO: 407862 - DNA, 2252 bp, Homo sapiens
taagttttcggcagtttccggggagactcggggactccgcgtctcgctctctgtgttccaatcgcccggtgcggtggtgcagggtctcgggctagtcatggcgtccccgtctcggagactgcagactaaaccagtcattacttgtttcaagagcgttctgctaatctacacttttattttctgggtgagagacgaaggcgcctggggccggcaggggatcccgggcttttagttgtggggggtgtgaccctgagcggcgggagctcaggtcgggaacggtgtggggttgggcggccatcgcgcctgggaccccgacgccggcgaccagtgactgggccccgaacaaagagctcaggcatctcgccggcgctggggtcggagtgcgggacgaaggcagccgagaggctgagctgggacccagacgtaccagcgttcgagttcgatacgggaggcgaggtggggccttaagcccccagagcacgcagacggtgaccctggacctttgcaaaggcaagcaaggcttgcccggcccctttgagggctcacttgcataatagtgtctttcttttcactgcttcgtaagagaggagtgtttcgcagatcactggcgttatccttcttgcagttggcatttggggcaaggtgagcctggagaattacttttctcttttaaatgagaaggccaccaatgtccccttcgtgctcattgctactggtaccgtcattattcttttgggcacctttggttgttttgctacctgccgagcttctgcatggatgctaaaactgtatgcaatgtttctgactctcgtttttttggtcgaactggtcgctgccatcgtaggatttgttttcagacatgagattaagaacagctttaagaataattatgagaaggctttgaagcagtataactctacaggagattatagaagccatgcagtagacaagatccaaaatacgttgcattgttgtggtgtcaccgattatagagattggacagatactaattattactcagaaaaaggatttcctaagagttgctgtaaacttgaagattgtactccacagagagatgcagacaaagtaaacaatgaaggttgttttataaaggtgatgaccattatagagtcagaaatgggagtcgttgcaggaatttcctttggagttgcttgcttccaactgattggaatctttctcgcctactgcctctctcgtgccataacaaataaccagtatgagatagtgtaacccaatgtatctgtgggcctattcctctctacctttaaggacatttagggtcccccctgtgaattagaaagttgcttggctggagaactgacaacactacttactgatagaccaaaaaactacaccagtaggttgattcaatcaagatgtatgtagacctaaaactacaccaataggctgattcaatcaagatccgtgctcgcagtgggctgattcaatcaagatgtatgtttgctatgttctaagtccaccttctatcccattcatgttagatcgttgaaaccctgtatccctctgaaacactggaagagctagtaaattgtaaatgaagtaatactgtgttcctcttgactgttatttttcttagtagggggcctttggaaggcactgtgaatttgctattttgatgtagtgttacaagatggaaaattgattcctctgactttgctattgatgtagtgtgatagaaaattcacccctctgaactggctccttcccagtcaaggttatctggtttgattgtataatttgcaccaagaagttaaaatgttttatgactctctgttctgctgacaggcagagagtcacattgtgtaatttaatttcagtcagtcaatagatggcatccctcatcagggttgccagatggtgataacagtgtaaggccttgggtctaaggcatccacgactggaagggactactgatgttctgtgatacatcaggtttcagcacacaacttacatttctttgcctccaaattgaggcatttattatgatgttcatactttccctcttgtttgaaagtttctaattattaaatggtgtcggaattgttgtattttccttaggaattcagtggaacttatcttcattaaatttagctggtaccaggttgatatgacttgtcaatattatggtcaactttaagtcttagttttcgtttgtgcctttgattaataagtataactcttatacaataaatactgctttcctctaaaaa

SEQ ID NO: 407863 - DNA, 1782 bp, Homo sapiens
taagttttcggcagtttccggggagactcggggactccgcgtctcgctctctgtgttccaatcgcccggtgcggtggtgcagggtctcgggctagtcatggcgtccccgtctcggagactgcagactaaaccagtcattacttgtttcaagagcgttctgctaatctacacttttattttctggatcactggcgttatccttcttgcagttggcatttggggcaaggtgagcctggagaattacttttctcttttaaatgagaaggccaccaatgtccccttcgtgctcattgctactggtaccgtcattattcttttgggcacctttggttgttttgctacctgccgagcttctgcatggatgctaaaactgtatgcaatgtttctgactctcgtttttttggtcgaactggtcgctgccatcgtaggatttgttttcagacatgagattaagaacagctttaagaataattatgagaaggctttgaagcagtataactctacaggagattatagaagccatgcagtagacaagatccaaaatacgttgcattgttgtggtgtcaccgattatagagattggacagatactaattattactcagatgcagacaaagtaaacaatgaaggttgttttataaaggtgatgaccattatagagtcagaaatgggagtcgttgcaggaatttcctttggagttgcttgcttccaactgattggaatctttctcgcctactgcctctctcgtgccataacaaataaccagtatgagatagtgtaacccaatgtatctgtgggcctattcctctctacctttaaggacatttagggtcccccctgtgaattagaaagttgcttggctggagaactgacaacactacttactgatagaccaaaaaactacaccagtaggttgattcaatcaagatgtatgtagacctaaaactacaccaataggctgattcaatcaagatccgtgctcgcagtgggctgattcaatcaagatgtatgtttgctatgttctaagtccaccttctatcccattcatgttagatcgttgaaaccctgtatccctctgaaacactggaagagctagtaaattgtaaatgaagtaatactgtgttcctcttgactgttatttttcttagtagggggcctttggaaggcactgtgaatttgctattttgatgtagtgttacaagatggaaaattgattcctctgactttgctattgatgtagtgtgatagaaaattcacccctctgaactggctccttcccagtcaaggttatctggtttgattgtataatttgcaccaagaagttaaaatgttttatgactctctgttctgctgacaggcagagagtcacattgtgtaatttaatttcagtcagtcaatagatggcatccctcatcagggttgccagatggtgataacagtgtaaggccttgggtctaaggcatccacgactggaagggactactgatgttctgtgatacatcaggtttcagcacacaacttacatttctttgcctccaaattgaggcatttattatgatgttcatactttccctcttgtttgaaagtttctaattattaaatggtgtcggaattgttgtattttccttaggaattcagtggaacttatcttcattaaatttagctggtaccaggttgatatgacttgtcaatattatggtcaactttaagtcttagttttcgtttgtgcctttgattaataagtataactcttatacaataaatactgctttcctctaaaaa

SEQ ID NO: 407864 - DNA, 1699 bp, Homo sapiens
  misc_feature (375)..(375): n is a, c, g, or t
agcatctcagggcaacggatgctactaaaatatccgatacttatctaatctcttaaacttccttgagatacttctagtttctctattttaatctatgaagagagtcgtcactccatcgccccccttaagattgttggtggcccttaagattgttgatggccaaccaacaatcttcagagagcaccattgaaatcctgagtgatgtgcgtctgatcaagactggacacaatgtgggacccagagaatccacgctgctaaacatgctctaaagatctccccctatctccttggggctggtcactccagcaggtgttcgacaagtggtatcatctacgaaccctgtacatgattgcatgttgcaagcaatcttcaggnatagaagccatgcagtagacaagatccaaaatacgttgcattgttgtggtgtcaccgattatagagattggacagatactaattattactcagaaaaaggatttcctaagagttgctgtaaacttgaagattgtactccacagagagatgcagacaaagtaaacaatgaaggttgttttataaaggtgatgaccattatagagtcagaaatgggagtcgttgcaggaatttcctttggagttgcttgcttccaactgattggaatctttctcgcctactgcctctctcgtgccataacaaataaccagtatgagatagtgtaacccaatgtatctgtgggcctattcctctctacctttaaggacatttagggtcccccctgtgaattagaaagttgcttggctggagaactgacaacactacttactgatagaccaaaaaactacaccagtaggttgattcaatcaagatgtatgtagacctaaaactacaccaataggctgattcaatcaagatccgtgctcgcagtgggctgattcaatcaagatgtatgtttgctatgttctaagtccaccttctatcccattcatgttagatcgttgaaaccctgtatccctctgaaacactggaagagctagtaaattgtaaatgaagtaatactgtgttcctcttgactgttatttttcttagtagggggcctttggaaggcactgtgaatttgctattttgatgtagtgttacaagatggaaaattgattcctctgactttgctattgatgtagtgtgatagaaaattcacccctctgaactggctccttcccagtcaaggttatctggtttgattgtataatttgcaccaagaagttaaaatgttttatgactctctgttctgctgacaggcagagagtcacattgtgtaatttaatttcagtcagtcaatagatggcatccctcatcagggttgccagatggtgataacagtgtaaggccttgggtctaaggcatccacgactggaagggactactgatgttctgtgatacatcaggtttcagcacacaacttacatttctttgcctccaaattgaggcatttattatgatgttcatactttccctcttgtttgaaagtttctaattattaaatggtgtcggaattgttgtattttccttaggaattcagtggaacttatcttcattaaatttagctggtaccaggttgatatgacttgtcaatattatggtcaactttaagtcttagttttcgtttgtgcctttgattaataagtataactcttatacaataaatactgctttcctctaaaaa

SEQ ID NO: 407865 - DNA, 1788 bp, Homo sapiens
taagttttcggcagtttccggggagactcggggactccgcgtctcgctctctgtgttccaatcgcccggtgcggtggtgcagggtctcgggctagtcatggcgtccccgtctcggagactgcagactaaaccagtcattacttgtttcaagagcgttctgctaatctacacttttattttctggatcactggcgttatccttcttgcagttggcatttggggcaaggtgagcctggagaattacttttctcttttaaatgagaaggccaccaatgtccccttcgtgctcattgctactggtaccgtcattattcttttgggcacctttggttgttttgctacctgccgagcttctgcatggatgctaaaactgtatgcaatgtttctgactctcgtttttttggtcgaactggtcgctgccatcgtaggatttgttttcagacatgagattaagaacagctttaagaataattatgagaaggctttgaagcagtataactctacaggagattatagaagccatgcagtagacaagatccaaaatacgttgcattgttgtggtgtcaccgattatagagattggacagatactaattattactcagaaaaaggatttcctaagagttgctgtaaaggttgttttataaaggtgatgaccattatagagtcagaaatgggagtcgttgcaggaatttcctttggagttgcttgcttccaactgattggaatctttctcgcctactgcctctctcgtgccataacaaataaccagtatgagatagtgtaacccaatgtatctgtgggcctattcctctctacctttaaggacatttagggtcccccctgtgaattagaaagttgcttggctggagaactgacaacactacttactgatagaccaaaaaactacaccagtaggttgattcaatcaagatgtatgtagacctaaaactacaccaataggctgattcaatcaagatccgtgctcgcagtgggctgattcaatcaagatgtatgtttgctatgttctaagtccaccttctatcccattcatgttagatcgttgaaaccctgtatccctctgaaacactggaagagctagtaaattgtaaatgaagtaatactgtgttcctcttgactgttatttttcttagtagggggcctttggaaggcactgtgaatttgctattttgatgtagtgttacaagatggaaaattgattcctctgactttgctattgatgtagtgtgatagaaaattcacccctctgaactggctccttcccagtcaaggttatctggtttgattgtataatttgcaccaagaagttaaaatgttttatgactctctgttctgctgacaggcagagagtcacattgtgtaatttaatttcagtcagtcaatagatggcatccctcatcagggttgccagatggtgataacagtgtaaggccttgggtctaaggcatccacgactggaagggactactgatgttctgtgatacatcaggtttcagcacacaacttacatttctttgcctccaaattgaggcatttattatgatgttcatactttccctcttgtttgaaagtttctaattattaaatggtgtcggaattgttgtattttccttaggaattcagtggaacttatcttcattaaatttagctggtaccaggttgatatgacttgtcaatattatggtcaactttaagtcttagttttcgtttgtgcctttgattaataagtataactcttatacaataaatactgctttcctctaaaaa

SEQ ID NO: 407866 - DNA, 1701 bp, Homo sapiens
taagttttcggcagtttccggggagactcggggactccgcgtctcgctctctgtgttccaatcgcccggtgcggtggtgcagggtctcgggctagtcatggcgtccccgtctcggagactgcagactaaaccagtcattacttgtttcaagagcgttctgctaatctacacttttattttctggatcactggcgttatccttcttgcagttggcatttggggcaaggtgagcctggagaattacttttctcttttaaatgagaaggccaccaatgtccccttcgtgctcattgctactggtaccgtcattattcttttgggcacctttggttgttttgctacctgccgagcttctgcatggatgctaaaactgtatgcaatgtttctgactctcgtttttttggtcgaactggtcgctgccatcgtaggatttgttttcagacatgagattaagaacagctttaagaataattatgagaaggctttgaagcagtataactctacaggagattatagaagccatgcagtagacaagatccaaaatacgggttgttttataaaggtgatgaccattatagagtcagaaatgggagtcgttgcaggaatttcctttggagttgcttgcttccaactgattggaatctttctcgcctactgcctctctcgtgccataacaaataaccagtatgagatagtgtaacccaatgtatctgtgggcctattcctctctacctttaaggacatttagggtcccccctgtgaattagaaagttgcttggctggagaactgacaacactacttactgatagaccaaaaaactacaccagtaggttgattcaatcaagatgtatgtagacctaaaactacaccaataggctgattcaatcaagatccgtgctcgcagtgggctgattcaatcaagatgtatgtttgctatgttctaagtccaccttctatcccattcatgttagatcgttgaaaccctgtatccctctgaaacactggaagagctagtaaattgtaaatgaagtaatactgtgttcctcttgactgttatttttcttagtagggggcctttggaaggcactgtgaatttgctattttgatgtagtgttacaagatggaaaattgattcctctgactttgctattgatgtagtgtgatagaaaattcacccctctgaactggctccttcccagtcaaggttatctggtttgattgtataatttgcaccaagaagttaaaatgttttatgactctctgttctgctgacaggcagagagtcacattgtgtaatttaatttcagtcagtcaatagatggcatccctcatcagggttgccagatggtgataacagtgtaaggccttgggtctaaggcatccacgactggaagggactactgatgttctgtgatacatcaggtttcagcacacaacttacatttctttgcctccaaattgaggcatttattatgatgttcatactttccctcttgtttgaaagtttctaattattaaatggtgtcggaattgttgtattttccttaggaattcagtggaacttatcttcattaaatttagctggtaccaggttgatatgacttgtcaatattatggtcaactttaagtcttagttttcgtttgtgcctttgattaataagtataactcttatacaataaatactgctttcctctaaaaa

SEQ ID NO: 407867 - DNA, 1591 bp, Homo sapiens
  misc_feature (375)..(375): n is a, c, g, or t
agcatctcagggcaacggatgctactaaaatatccgatacttatctaatctcttaaacttccttgagatacttctagtttctctattttaatctatgaagagagtcgtcactccatcgccccccttaagattgttggtggcccttaagattgttgatggccaaccaacaatcttcagagagcaccattgaaatcctgagtgatgtgcgtctgatcaagactggacacaatgtgggacccagagaatccacgctgctaaacatgctctaaagatctccccctatctccttggggctggtcactccagcaggtgttcgacaagtggtatcatctacgaaccctgtacatgattgcatgttgcaagcaatcttcaggnatagaagccatgcagtagacaagatccaaaatacgttgcattgttgtggtgtcaccgattatagagattggacagatactaattattactcagaaaaaggatttcctaagagttgctgtaaacttgaagattgtactccacagagagatgcagacaaagtaaacaatgaaggttgttttataaaggtgatgaccattatagagtcagaaatgggagtcgttgcaggaatttcctttggagttgcttgcttccaagacatttagggtcccccctgtgaattagaaagttgcttggctggagaactgacaacactacttactgatagaccaaaaaactacaccagtaggttgattcaatcaagatgtatgtagacctaaaactacaccaataggctgattcaatcaagatccgtgctcgcagtgggctgattcaatcaagatgtatgtttgctatgttctaagtccaccttctatcccattcatgttagatcgttgaaaccctgtatccctctgaaacactggaagagctagtaaattgtaaatgaagtaatactgtgttcctcttgactgttatttttcttagtagggggcctttggaaggcactgtgaatttgctattttgatgtagtgttacaagatggaaaattgattcctctgactttgctattgatgtagtgtgatagaaaattcacccctctgaactggctccttcccagtcaaggttatctggtttgattgtataatttgcaccaagaagttaaaatgttttatgactctctgttctgctgacaggcagagagtcacattgtgtaatttaatttcagtcagtcaatagatggcatccctcatcagggttgccagatggtgataacagtgtaaggccttgggtctaaggcatccacgactggaagggactactgatgttctgtgatacatcaggtttcagcacacaacttacatttctttgcctccaaattgaggcatttattatgatgttcatactttccctcttgtttgaaagtttctaattattaaatggtgtcggaattgttgtattttccttaggaattcagtggaacttatcttcattaaatttagctggtaccaggttgatatgacttgtcaatattatggtcaactttaagtcttagttttcgtttgtgcctttgattaataagtataactcttatacaataaatactgctttcctctaaaaa

SEQ ID NO: 407868 - DNA, 916 bp, Homo sapiens
taagttttcggcagtttccggggagactcggggactccgcgtctcgctctctgtgttccaatcgcccggtgcggtggtgcagggtctcgggctagtcatggcgtccccgtctcggagactgcagactaaaccagtcattacttgtttcaagagcgttctgctaatctacacttttattttctgggtgagagacgaaggcgcctggggccggcaggggatcccgggcttttagttgtggggggtgtgaccctgagcggcgggagctcaggtcgggaacggtgtggggttgggcggccatcgcgcctgggaccccgacgccggcgaccagtgactgggccccgaacaaagagctcaggcatctcgccggcgctggggtcggagtgcgggacgaaggcagccgagaggctgagctgggacccagacgtaccagcgttcgagttcgatacgggaggcgaggtggggccttaagcccccagagcacgcagacggtgaccctggacctttgcaaaggcaagcaaggcttgcccggcccctttgagggctcacttgcataatagtgtctttcttttcactgcttcgtaagagaggagtgtttcgcagatcactggcgttatccttcttgcagttggcatttggggcaaggtgagcctggagaattacttttctcttttaaatgagaaggccaccaatgtccccttcgtgctcattgctactggtaccgtcattattcttttgggcacctttggttgttttgctacctgccgagcttctgcatggatgctaaaactgttggaaggttctggctcgtttgggcgaacggtgctgcatcgaaggattggttcagactgggtttagaaccggtgagataatatggagaaagggttgagggtaacccagggaaaaaagcgggaaaatc

SEQ ID NO: 407869 - DNA, 1167 bp, Homo sapiens
taagttttcggcagtttccggggagactcggggactccgcgtctcgctctctgtgttccaatcgcccggtgcggtggtgcagggtctcgggctagtcatggcgtccccgtctcggagactgcagactaaaccagtcattacttgtttcaagagcgttctgctaatctacacttttattttctggatcactggcgttatccttcttgcagttggcatttggggcaaggtgagcctggagaattacttttctcttttaaatgagaaggccaccaatgtccccttcgtgctcattgctactggtaccgtcattattcttttgggcacctttggttgttttgctacctgccgagcttctgcatggatgctaaaactgtatgcaatgtttctgactctcgtttttttggtcgaactggtcgctgccatcgtaggatttgttttcagacatgagattaagaacagctttaagaataattatgagaaggctttgaagcagtataactctacaggagattatagaagccatgcagtagacaagatccaaaatacgttgcattgttgtggtgtcaccgattatagagattggacagatactaattattactcagaaaaaggatttcctaagagttgctgtaaacttgaagattgtactccacagagagatgcagacaaagtaaacaatgaaggttgttttataaaggtgatgaccattatagagtcagaaatgggagtcgttgcaggaatttcctttggagttgcttgcttccaactgattggaatctttctcgcctactgcctctctcgtgccataacaaataaccagtatgagatagtgtaacccaatgtatctgtgggcctattcctctctacctttaaggacatttagggtcccccctgtgaattagaaagttgcttggctggagaactgacaacactacttactgatagaccaaaaaactacaccagtaggttgattcaatcaagatgtatgtagacctaaaactacaccaataggctgattcaatcaagatccgtgctcgcagtgggctgattcaatcaagatgtatgtttgctatgttctaagtccaccttctatcccattcatgttagatcgttgaaaccctgtatccctctgaaacactggaagagctagtaaattgtaaatgaagt

SEQ ID NO: 407870 - DNA, 2015 bp, Homo sapiens
agcggagctcttcagtagtttctgaacatctagacggtaggatgtagaatagggcaccagggccagggaggcccaatctcagagcgctgcgggctctgctggtgatagaaacaatatggtgaagttataaggagaggggaggggtggggggcgggaaagattccttaggatagaaaaaaaacaatgaagaaagctccacttgaagacctatgaaatttccgacactagaacctttgtatatagttttcggtaaccttcggcagggggcgctctgaaattgttgccactttccggacagcctcccatactttaccctctacaaaattgtacagtgtttccggcccttctcagttgtggacgctcatcactggcgttatccttcttgcagttggcatttggggcaaggtgagcctggagaattacttttctcttttaaatgagaaggccaccaatgtccccttcgtgctcattgctactggtaccgtcattattcttttgggcacctttggttgttttgctacctgccgagcttctgcatggatgctaaaactgtatgcaatgtttctgactctcgtttttttggtcgaactggtcgctgccatcgtaggatttgttttcagacatgagattaagaacagctttaagaataattatgagaaggctttgaagcagtataactctacaggagattatagaagccatgcagtagacaagatccaaaatacgttgcattgttgtggtgtcaccgattatagagattggacagatactaattattactcagaaaaaggatttcctaagagttgctgtaaacttgaagattgtactccacagagagatgcagacaaagtaaacaatgaaggttgttttataaaggtgatgaccattatagagtcagaaatgggagtcgttgcaggaatttcctttggagttgcttgcttccaactgattggaatctttctcgcctactgcctctctcgtgccataacaaataaccagtatgagatagtgtaacccaatgtatctgtgggcctattcctctctacctttaaggacatttagggtcccccctgtgaattagaaagttgcttggctggagaactgacaacactacttactgatagaccaaaaaactacaccagtaggttgattcaatcaagatgtatgtagacctaaaactacaccaataggctgattcaatcaagatccgtgctcgcagtgggctgattcaatcaagatgtatgtttgctatgttctaagtccaccttctatcccattcatgttagatcgttgaaaccctgtatccctctgaaacactggaagagctagtaaattgtaaatgaagtaatactgtgttcctcttgactgttatttttcttagtagggggcctttggaaggcactgtgaatttgctattttgatgtagtgttacaagatggaaaattgattcctctgactttgctattgatgtagtgtgatagaaaattcacccctctgaactggctccttcccagtcaaggttatctggtttgattgtataatttgcaccaagaagttaaaatgttttatgactctctgttctgctgacaggcagagagtcacattgtgtaatttaatttcagtcagtcaatagatggcatccctcatcagggttgccagatggtgataacagtgtaaggccttgggtctaaggcatccacgactggaagggactactgatgttctgtgatacatcaggtttcagcacacaacttacatttctttgcctccaaattgaggcatttattatgatgttcatactttccctcttgtttgaaagtttctaattattaaatggtgtcggaattgttgtattttccttaggaattcagtggaacttatcttcattaaatttagctggtaccaggttgatatgacttgtcaatattatggtcaactttaagtcttagttttcgtttgtgcctttgattaataagtataactcttatacaataaatactgctttcctctaaaaa

SEQ ID NO: 407871 - DNA, 2205 bp, Homo sapiens
taagttttcggcagtttccggggagactcggggactccgcgtctcgctctctgtgttccaatcgcccggtgcggtggtgcagggtctcgggctagtcatggcgtccccgtctcggagactgcagactaaaccagtcattacttgtttcaagagcgttctgctaatctacacttttattttctggatcactggcgttatccttcttgcagttggcatttggggcaaggtgagcctggagaattacttttctcttttaaatgagaaggccaccaatgtccccttcgtgctcattgctactggtaccgtcattattcttttgggcacctttggttgttttgctacctgccgagcttctgcatggatgctaaaactgtatgcaatgtttctgactctcgtttttttggtcgaactggtcgctgccatcgtaggatttgttttcagacatgagattaagaacagctttaagaataattatgagaaggctttgaagcagtataactctacaggagattatagaagccatgcagtagacaagatccaaaatacgttgcattgttgtggtgtcaccgattatagagattggacagatactaattattactcagaaaaaggatttcctaagagttgctgtaaacttgaagattgtactccacagagagatgcagacaaagtaaacaatgaaggttgttttataaaggtgatgaccattatagagtcagaaatgggagtcgttgcaggaatttcctttggagttgcttgcttccaactgattggaatctttctcgcctactgcctctctcgtgccataacaaataaccagtatgagatagtgtaacccaatgtatctgtgggcctattcctctctacctttaaggacatttagggtcccccctgtgaattagaaagttgcttggctggagaactgacaacactacttactgatagaccaaaaaactacaccagtaggttgattcaatcaagatgtatgtagacctaaaactacaccaataggctgattcaatcaagatccgtgctcgcagtgggctgattcaatcaagatgtatgtttgctatgttctaagtccaccttctatcccattcatgttagatcgttgaaaccctgtatccctctgaaacactggaagagctagtaaattgtaaatgaagtaatactgtgttcctcttgactgttatttttcttagtagggggcctttggaaggcactgtgaatttgctattttgatgtagtgttacaagatggaaaattgattcctctgactttgctattgatgtagtgtgatagaaaattcacccctctgaactggctccttcccagtcaaggttatctggtttgattgtataatttgcaccaagaagttaaaatgttttatgactctctgttctgctgacaggcagagagtcacattgtgtaatttaatttcagtcagtcaatagatggcatccctcatcagggttgccagatggtgataacagtgtaaggccttgggtctaaggcatccacgactggaagggactactgatgttctgtgatacatcaggtttcagcacacaacttacatttctttgcctccaaattgaggcatttattatgatgttcatactttccctcttgtttgaaagtttctaattattaaatggtgtcggaattgttgtattttccttaggaattcagtggaacttatcttcattaaatttagctggtaccaggttgatatgacttgtcaatattatggtcaactttaagtcttagttttcgtttgtgcctttgattaataagtataactcttatacaataaatactgctttcctctaaaaaaaaaaaaaaaaaacaaaaaaaaaaaacaaaaaaacaaacacaaaaaaaaaacaaaaaaaaaacccacaaacaacaacacccaacaacacccccaccagcccgccccacccctcagagggggcgcccaacatcacgacgccgcatcactcttcacagagaagaacgggtccccctcaacgaggctcagactcaatagacgaacacccgcgcgcgctcacataaagcatgcagttgataacacacgtcggccgtcagtctgcgggaaaaccccccgtcgcggcgtgcaatgagccaccccacccagcaacgcggctggagtaacatcggggtgtcgacacctctgtggaatgcgggatttataccgggcac

SEQ ID NO: 407872 - DNA, 1531 bp, Homo sapiens
  misc_feature (207)..(207): n is a, c, g, or t
atcttctgggagtcgaatgaaattctgagtgatttgtagtggattatgattgaaaacaaggcgggagccagcgaggctcagcgcagttgaacatgctctaaagatctccccctatctccttggggctggtcactccagcaggtgttcgacaagtggtatcatctacgaaccctgtacatgattgcatgttgcaagcaatcttcaggnatagaagccatgcagtagacaagatccaaaatacgttgcattgttgtggtgtcaccgattatagagattggacagatactaattattactcagaaaaaggatttcctaagagttgctgtaaacttgaagattgtactccacagagagatgcagacaaagtaaacaatgaaggttgttttataaaggtgatgaccattatagagtcagaaatgggagtcgttgcaggaatttcctttggagttgcttgcttccaactgattggaatctttctcgcctactgcctctctcgtgccataacaaataaccagtatgagatagtgtaacccaatgtatctgtgggcctattcctctctacctttaaggacatttagggtcccccctgtgaattagaaagttgcttggctggagaactgacaacactacttactgatagaccaaaaaactacaccagtaggttgattcaatcaagatgtatgtagacctaaaactacaccaataggctgattcaatcaagatccgtgctcgcagtgggctgattcaatcaagatgtatgtttgctatgttctaagtccaccttctatcccattcatgttagatcgttgaaaccctgtatccctctgaaacactggaagagctagtaaattgtaaatgaagtaatactgtgttcctcttgactgttatttttcttagtagggggcctttggaaggcactgtgaatttgctattttgatgtagtgttacaagatggaaaattgattcctctgactttgctattgatgtagtgtgatagaaaattcacccctctgaactggctccttcccagtcaaggttatctggtttgattgtataatttgcaccaagaagttaaaatgttttatgactctctgttctgctgacaggcagagagtcacattgtgtaatttaatttcagtcagtcaatagatggcatccctcatcagggttgccagatggtgataacagtgtaaggccttgggtctaaggcatccacgactggaagggactactgatgttctgtgatacatcaggtttcagcacacaacttacatttctttgcctccaaattgaggcatttattatgatgttcatactttccctcttgtttgaaagtttctaattattaaatggtgtcggaattgttgtattttccttaggaattcagtggaacttatcttcattaaatttagctggtaccaggttgatatgacttgtcaatattatggtcaactttaagtcttagttttcgtttgtgcctttgattaataagtataactcttatacaataaatactgctttcctctaaaaa

SEQ ID NO: 407873 - DNA, 1961 bp, Homo sapiens
agcggagctcttcagtagtttctgaacatctagacggtaggatgtagaatagggcaccagggccagggaggcccaatctcagagcgctgcgggctctgctggtgatagaaacaatatggtgaagttataaggagaggggaggggtggggggcgggaaagattccttaggatagaaaaaaaacaatgaagaaagctccacttgaagacctatgaaatttccgacactagaacctttgtatatagttttcggtaaccttcggcagggggcgctctgaaattgttgccactttccggacagcctcccatactttaccctctacaaaattgtacagtgtttccggcccttctcagttgtggacgctcatcactggcgttatccttcttgcagttggcatttggggcaaggtgagcctggagaattacttttctcttttaaatgagaaggccaccaatgtccccttcgtgctcattgctactggtaccgtcattattcttttgggcacctttggttgttttgctacctgccgagcttctgcatggatgctaaaactgtatgcaatgtttctgactctcgtttttttggtcgaactggtcgctgccatcgtaggatttgttttcagacatgagattaagaacagctttaagaataattatgagaaggctttgaagcagtataactctacaggagattatagaagccatgcagtagacaagatccaaaatacgttgcattgttgtggtgtcaccgattatagagattggacagatactaattattactcagatgcagacaaagtaaacaatgaaggttgttttataaaggtgatgaccattatagagtcagaaatgggagtcgttgcaggaatttcctttggagttgcttgcttccaactgattggaatctttctcgcctactgcctctctcgtgccataacaaataaccagtatgagatagtgtaacccaatgtatctgtgggcctattcctctctacctttaaggacatttagggtcccccctgtgaattagaaagttgcttggctggagaactgacaacactacttactgatagaccaaaaaactacaccagtaggttgattcaatcaagatgtatgtagacctaaaactacaccaataggctgattcaatcaagatccgtgctcgcagtgggctgattcaatcaagatgtatgtttgctatgttctaagtccaccttctatcccattcatgttagatcgttgaaaccctgtatccctctgaaacactggaagagctagtaaattgtaaatgaagtaatactgtgttcctcttgactgttatttttcttagtagggggcctttggaaggcactgtgaatttgctattttgatgtagtgttacaagatggaaaattgattcctctgactttgctattgatgtagtgtgatagaaaattcacccctctgaactggctccttcccagtcaaggttatctggtttgattgtataatttgcaccaagaagttaaaatgttttatgactctctgttctgctgacaggcagagagtcacattgtgtaatttaatttcagtcagtcaatagatggcatccctcatcagggttgccagatggtgataacagtgtaaggccttgggtctaaggcatccacgactggaagggactactgatgttctgtgatacatcaggtttcagcacacaacttacatttctttgcctccaaattgaggcatttattatgatgttcatactttccctcttgtttgaaagtttctaattattaaatggtgtcggaattgttgtattttccttaggaattcagtggaacttatcttcattaaatttagctggtaccaggttgatatgacttgtcaatattatggtcaactttaagtcttagttttcgtttgtgcctttgattaataagtataactcttatacaataaatactgctttcctctaaaaa

SEQ ID NO: 407874 - DNA, 1728 bp, Homo sapiens
taagttttcggcagtttccggggagactcggggactccgcgtctcgctctctgtgttccaatcgcccggtgcggtggtgcagggtctcgggctagtcatggcgtccccgtctcggagactgcagactaaaccagtcattacttgtttcaagagcgttctgctaatctacacttttattttctggatcactggcgttatccttcttgcagttggcatttggggcaaggtgagcctggagaattacttttctcttttaaatgagaaggccaccaatgtccccttcgtgctcattgctactggtaccgtcattattcttttgggcacctttggttgttttgctacctgccgagcttctgcatggatgctaaaactgtatgcaatgtttctgactctcgtttttttggtcgaactggtcgctgccatcgtaggatttgttttcagacatgagattaagaacagctttaagaataattatgagaaggctttgaagcagtataactctacaggagattatagaagccatgcagtagacaagatccaaaatacgttgcattgttgtggtgtcaccgattatagagattggacagatactaattattactcagaaaaaggatttcctaagagttgctgtaaacttgaagattgtactccacagagagatgcagacaaagtaaacaatgaaggttgttttataaaggtgatgaccattatagagtcagaaatgggagtcgttgcaggaatttcctttggagttgcttgcttccaagacatttagggtcccccctgtgaattagaaagttgcttggctggagaactgacaacactacttactgatagaccaaaaaactacaccagtaggttgattcaatcaagatgtatgtagacctaaaactacaccaataggctgattcaatcaagatccgtgctcgcagtgggctgattcaatcaagatgtatgtttgctatgttctaagtccaccttctatcccattcatgttagatcgttgaaaccctgtatccctctgaaacactggaagagctagtaaattgtaaatgaagtaatactgtgttcctcttgactgttatttttcttagtagggggcctttggaaggcactgtgaatttgctattttgatgtagtgttacaagatggaaaattgattcctctgactttgctattgatgtagtgtgatagaaaattcacccctctgaactggctccttcccagtcaaggttatctggtttgattgtataatttgcaccaagaagttaaaatgttttatgactctctgttctgctgacaggcagagagtcacattgtgtaatttaatttcagtcagtcaatagatggcatccctcatcagggttgccagatggtgataacagtgtaaggccttgggtctaaggcatccacgactggaagggactactgatgttctgtgatacatcaggtttcagcacacaacttacatttctttgcctccaaattgaggcatttattatgatgttcatactttccctcttgtttgaaagtttctaattattaaatggtgtcggaattgttgtattttccttaggaattcagtggaacttatcttcattaaatttagctggtaccaggttgatatgacttgtcaatattatggtcaactttaagtcttagttttcgtttgtgcctttgattaataagtataactcttatacaataaatactgctttcctctaaaaa

SEQ ID NO: 407875 - DNA, 1812 bp, Homo sapiens
gaattgtttttcttatatatgcagcaatgtaattttacattgatctgcggggtggtttaaattttatttttacaaggcagtttttcagtcaaattatatatttgatacaatacgctaggatagaccggccacacgtcaggcagccgggacaccggagtgtccccaggaggcctttggggctggggtggcccgtggcttgttccctgcgcctctgggaactggatgagtccttcggcgggactgtgacccgctggacagttaaaaggatttttcatgggcattttcctacacataaggcagttccattaggaggagctttagaagtcgacataatccagacagtggacaatcccagtggcccagacaagccatacgacattttcctgtgacctctctctgacccatctctcacgctcatgagaaaaggaatgtacaataaatagaaacagaaacttcctcagtgctcatgcgcctcacttgcagaacgtgagtatttcatttatgtttgaagcccttccccaaagtgaccgaggagttgcactctagctgccgtgccagcagtctcgtctgctgtgacgcttctcggtgcggatgcagtgcacctgtgactttgtcatgggggtgcccctgttacacacacacacgctgactcttttttatgaggaaaatcttcgactcaaaataattgcactgattttttgacaacttctttttacgatgtcccacttcgcatctgctgtacttgtttgagatgattgtaaatagatttgtggtaggagaagtgacatgaatgcaacacgtggctctgttgtggagacactgcctcgtattcagtattatgtgttagagttgtgtggacttaactctgttccgccctttagcttcgtgtctgttgaccatttatgaaggacaagttcgcctcattttctttttcttctgaagggaagttctagatcggttactaggagaacatggtctcttggtgcctgatgatttagtcctaagcagactcgttgcagtcttgtgaacactgttgtggtctgtttgattcctcgtcgcttaccgtggctctccaaagcatggtctttgagttccacccagcctgggacagtccagacgggaggcatctgctccgcctgctactaggacgcaagggcctccttgcatctctgtggtcagagtcatcttaaagccatgaggttactgtcgtgtcaaagctgtcatttgtgcccgttattttgctggagtagcagcgtgtgctgtagcccccgtgtgtcactctgtggtcaggctaccctgtgtcacacccagcaagaagtttttcagccccagaccagtctgtgtgtgtgtccgagtcacaccagtgccattacggtgccctcgcttatgcttctttcagtatgttttgccatgttattgtctaaagtgaatgtattggcttagccaaatcactacagaaggtggttcctaaataccttttagtttaaaaaaaaatgcagataaaggctacctctgaattctcaatagattcatcatgtttgctcttaagtgtagctgtccacactgaaaacagccaatatgttgcctgaataaactgaattgtgaacatctatctgttcagttctggcttgaaaatgtgtgtgccatactgtgacccacgggcagcccctcctcctctactgtgtcaggtggaccagggtcacctctgttctgcgcagctttgagattctaggattctacggccatgcctagctggattgcagagttaagtttatgattatgaaataaaaactaaataacaaaaaaaaaaaa

SEQ ID NO: 407876 - DNA, 621 bp, Homo sapiens
cggtgctgctgttaagacgtgagtgcatttcacttggaagaacccattgtacaaagttcaaggctaagagttctgaattctggcgtcagcttcctcaggattttcttcagttgcaagtacctttccactgaaaatatgagcatgcccgcctggctagtaggcatctgtaagagtgtcgccaggcccgcgccagctgaggcctcagactagccaggcaagagccgtctgaccagttggctggcggtggttctggtggagcacgagggagcccgggtggtgccctgagcctcgagctgctctctgtcactgtcttgaatcagactcagaaatggcttcttcccagccctgcctacaagtttttctctggggtcctctttcaaggatgtccacggtaccttcctcctgaaacttgaggaagtcttttgtcttccagctgctcagggttctctggtccaagaccctgctttaaagagagtctttggcgtgctcagactccagcgctccgttcttcaaggaggttgacttgcctctcgggccccgtaggtaccaagagactgtttacctcccagaatgtttgggcttgaagttacattaaagtgaagttatttgaaagaaagaaaa

SEQ ID NO: 407877 - DNA, 469 bp, Homo sapiens
ctccccgtgatgcactggaatagggaaaggggatagtcagtactctccatcgaacttagaagaagatcccaaaccttctcagatataacaaggtcctaggagaagttggccctgcctacttctcccagtctacctcctctcaaacttcaacctctcatcactgccccagccattctgccctcctgttctttaatccccatgaggtcctttactcacacacattcttttctcagactgggaagtaaaaagaagtaggtccttgcagcagttgggactagagggtttgtagagttgcttggggtcaaaacagaggttaggggtgaagaggatttggaaggtgctgccactgctaagaggcccaggagtagcagcatacagggaaggtaaagaggtaaagattctggacctccaatcttctctgggccatgtgctccctcataactgtggtcctgggggtaaatgtgaggtt

SEQ ID NO: 407878 - DNA, 390 bp, Homo sapiens
cagagctcctgcctggataggttatttcctcctgaccacctgacaagggactggccccctgaggcttacactttgttgagacctgaaactgcagacagagcactaaacttagaagagactagggccccaactaagcttccccatggatagatacatagtcatcatagaaggcaatcaatcatagaatgtgacacctggaagggaccctaaagccaaatccttcattctacatttattgagactgaggcccagaaaggttaaattacttgacaatgtctaagagctaattactacagaaatcttcctctggggcactttattcttaatccagagagggttttcttttttttttttttgtaactgaagatggtgtaatacgatccattacat

SEQ ID NO: 407879 - DNA, 178 bp, Homo sapiens
gaaatcaagagcaaactgaacttctgagatatcaggtcaataactatggtttttttacaaatgcatctcaggaaagacaacttctagagtaggaagcaagttcatgaatgagaagtggatgctttcagaatcccatcttactcactttggatgagataaattaggattagcataaaca

SEQ ID NO: 407880 - DNA, 5568 bp, Homo sapiens
gttggccaggctggtcttgaactcctgagctcaagtgatccacccaccttggcgtcccaaagtgctgggattacaggcatgagccactgtgcccaggccccatttttatcttttacacagtattttaactatatattttccatgtttacatacacaaatacctgccattctgtgacagttgcctttagtattcagtacagtaacatacagtacaggtttgtagcctaggagtcctaagccataccgtgtaccctaggtatggtggctacaccacctaggtttgtgtaagtatacgctatgatattagcacaatggtgaaataacctagtgacccatttctcaagctcctcacgtggcaagcaatgcatgactgcatatgaaagctcttaaatagggattgtttctaaattaatctcaaaacagtcattatttactatttatggaattttttttaaaaaaaggagcaaaagtatcatttcagtgggaacttaacttggggctacagtgttttatttaacttttaccccaaagttgcaaagtgttttgaaatttttccctgtaaaataattattttaattcaatttaaataaaacccaccaaggagacttcaagctttaagaagtctagcttcctgtgaaatgtgagaggaagtcagcactcatttcagaaatctgattataataatagctccatccctaaatgaggtgaatcttggaatctcttccattttattttattttatttttttgagatggagtttctctcttgttgcccaggctgaagtgcaatgttgtgatctcggctcactgcaacctctgcctcccgggttcaagcgattctcctgctttggcctcctgagtagctgggattgcaggtgtgcaccaccgcgcctggctaattttgtatttttagtagaggcggagtttcgccatgttggtcaggctggtctcgaacttctgacctcagtgatccccccgcctcggcctcccaaagttctgggattatgggtgtgagccaccacacccggccccccttcaattttaaagccatcactatgcaccctatgtctatgccaggcactaaaataagatgaagcaccttcttggagtttacatgctggtaattatgccagacagtaataaaataggtaagaacggctgtgggggaagtcagctgggttctagttacagtcgcatttcaggaaatgatttaacatgctgactttaacaacctaagcctcttctccatgtgtgcacacagggtagatctctgaacacaggtgaccctagaagtgctgtaacttctaggggaatggctgtgttgagtcaaggcaggatgacagttcagcctcctcccaggctagtgcaaagggctcttcactcggattaaaaccttctctcccagaccgaattgccaactcccaacacccctcctacagaaaatttggagtcctcgcttattccctggcagcccctacctaatagggtggtgaattaattatcaaacatgcgacagtttagcgaaaatggcaacactttggaataaatgactgtaatgtacatcctggcgcccattttgcaggtcagttgctctccctggaaggaagagtgttctcggatttcaccttaaaggaggaaggctgccagaactgaactagcacttctgaatatcctgaggcgaggtccggtgacttccttgggaagctctgccgcgcccccatcccaccctaccccaccctaccccaccacagcaggcgctggagtcctgggaccaccaggatctgaggcccaaatccttcctcactaaggggaggagaggggtgctccggcagggcaggatgggaaggcgtgcttgggcgggattgtgacataagagtgccctggtgacatggagcagttctgtggcataaataaaggtgtcataaagacagggcgggactcatgcttacaaggggcacgagcgtctcggagctgccagaatgacttccgctcagtgcccggcactagcgtgtgtcatgtccccgctgcgtttctggggcccatggcccctccttatgtggcaactattgtggctactagtcaaggaggctcagcctctggagtgggtcaaggacccgctccagctgacctctaaccccctggggccgcctgagccctggtcttcccactcctcccatttcccacgggaatctccccatgcgcctactctcccagcagacccgtgggactttgatcacctggggccctctgcttcctcagagatgccagccccaccccaggaatcgactgaaaatttggttccattcctggacacctgggattcagctggagagctgcccctggagccagagcagttcttggcttcacagcaggatttaaaggacaagctgagtccacaggaaaggctccctgtttcgcccaagaagctgaagaaagatccagctcagcgttggagccttgctgagattattggaattatacaccaattatccacacctcagagtcagaaacagactttgcagaatgaatattccagtacagatacaccgtatcccggtagcctgcctccagaactccgggtgaagtcagatgagcctccagggccctctgagcaagttggaccttctcaattccatctagagcccgaaactcaaaatccagagacccttgaagacatccagtcctcttcactccagcaagaagccccagcacagcttccacagctccttgaggaagaaccttcttcaatgcagcaggaggccccagctctgcctccagagtcctctatggagagtctaactctaccgaatcatgaggtgtcagttcaacctccaggtgaggatcaagcttattatcacttgcccaacattacagttaaacctgcagatgtggaggttaccataacttcagaggctaccaatgagacagaatcttcccaagctcagcaggagaccccaattcagtttccagaggaggtggaaccttctgcaacccaacaggaggccccaattgagcctccagttcctcctatggagcatgaactttccatcagtgagcagcagcagccagttcagccttctgagacttctagggaggtcgaatcttctccgacccagcaggagaccccaggtcagcctccagaacatcatgaagtcacagtttcacctccaggtcaccatcaaactcatcatttagattcacccagtgtctctgtgaagcctccagacgtgcagctcaccatagcagcagagcctagtgcagaggtgggaacttctctagtccagcaggaggctacaactcggctctcagggtcaggtaatgatatagaacctcccgccatccagcacgggggcccacctctgctttcagagtcatcagaagaagctggacctttagcagttcaacaggagacttcatttcaatctccggaacctattaataatgagaacccctctccaacccagcaggaggctgcagctgagcatccacagaccgctgaggagggtgagtcttccctaacccatcaggaggccccagctcagactccagagttccctaatgtagttgtagctcaacctccagagcattcacacctgactcaagccacagttcaacctttggatctggggtttaccatcactccagaatccatgacagaggttgaactttctccaaccatgaaggagaccccaactcagcctcctaagaaagttgtaccccaacttcgagtatatcaaggggtaacaaatccaacaccaggtcaggatcaagctcagcatccagtgtcacccagcgttacagttcaacttttggacctgggacttaccatcactccagaacccactacggaggttggacattctacacccccgaagaggactatagtttctccaaagcatcctgaggtgacacttccacatccagaccaggttcagactcagcattcacacctgactcgagccacagttcaacctttggacctggggtttaccatcactccaaaatccatgacagaggttgaaccttctacagccctgatgactacagctcctcctccaggacaccctgaggtgacacttccaccttcagacaagggtcaggctcagcattcacacctgactcaagccaccgttcaacctctggacctggagcttaccataactacaaaacctactacagaggttaaaccgtctccaaccacggaggagacctcaactcagcctccagacctgggacttgccatcattccagaacccactacagagactggacattctacagccctggagaagactacagctcctcgtccagaccgggttcagactctgcatcgaagcctgactgaagtcacaggtccacctactgaactagaacctgctcaggattcactggtgcagtctgaaagttacacccaaaataaggctttaactgcaccagaggaacacaaggcctccacaagcaccaacatatgtgagctctgtacctgcggagatgagatgttgtcatgtattgatctcaacccagagcagaggctccgccaagtgcctgtgccagagcccaacacccacaatggcaccttcaccatcttgtaagaatcacttttcctcaattgtcctctgtgtcctgcctgacatggcagccttttcctggaggccttcctgggccttctttatctccccaagccatatggacaactgactttctgctttcacctttgcttgtcaactctcccttctcctcattctcttttaatgttaggccccttctccagtcttttccttttactctggtcttttactcgtttttgtatccatttttatttagccccatcacatcattgcttaaccgctgctctcctcccattttcgcttcaccctctttacagcagcctgtccctctcccgatctcagtgatgatgctctaagtggttaagagttgattccggagccaggctgcctgggtttgaacccagatctatttattagcttggtgacccagagcaagttattctgcctgtgactcaatttcctcacctttaaactggggatcatgctagttagcatttcataggattgttgtgaaatttaggtgagtgaatatatgaaacacttcatcagtgcttagcatatgtaggagagttggctgttcacatgattattcagtcctttagttttgtccagaactcatttttgtccctagctttctatatgtagaactagttttatgtcaaacccagggccaagtatgctactgtctccagaacacgaaaatgataggagggaagaggctgggtgtggtggctcacgcctgtaatcccagcactttgggaggccgaggcgggcggatcatgaggtcaggagatcaagaccatcctggctaacatggtgaaaccccatctctactaaaaatacagaaaaaaattagccaggcatggtggtgggtgcctggagtcccagctactcgggaggctgaggcaggagaatggcatgaacctgggaggcagagcttgcagtgagccgagattgcaccactgcactccagcctgggcgacagagcaagactccatctc

SEQ ID NO: 407881 - DNA, 4861 bp, Homo sapiens
gttggccaggctggtcttgaactcctgagctcaagtgatccacccaccttggcgtcccaaagtgctgggattacaggcatgagccactgtgcccaggccccatttttatcttttacacagtattttaactatatattttccatgtttacatacacaaatacctgccattctgtgacagttgcctttagtattcagtacagtaacatacagtacaggtttgtagcctaggagtcctaagccataccgtgtaccctaggtatggtggctacaccacctaggtttgtgtaagtatacgctatgatattagcacaatggtgaaataacctagtgacccatttctcaagctcctcacgtggcaagcaatgcatgactgcatatgaaagctcttaaatagggattgtttctaaattaatctcaaaacagtcattatttactatttatggaattttttttaaaaaaaggagcaaaagtatcatttcagtgggaacttaacttggggctacagtgttttatttaacttttaccccaaagttgcaaagtgttttgaaatttttccctgtaaaataattattttaattcaatttaaataaaacccaccaaggagacttcaagctttaagaagtctagcttcctgtgaaatgtgagaggaagtcagcactcatttcagaaatctgattataataatagctccatccctaaatgaggtgaatcttggaatctcttccattttattttattttatttttttgagatggagtttctctcttgttgcccaggctgaagtgcaatgttgtgatctcggctcactgcaacctctgcctcccgggttcaagcgattctcctgctttggcctcctgagtagctgggattgcaggtcagttgctctccctggaaggaagagtgttctcggatttcaccttaaaggaggaaggctgccagaactgaactagcacttctgaatatcctgaggcgaggtccggtgacttccttgggaagctctgccgcgcccccatcccaccctaccccaccctaccccaccacagcaggcgctggagtcctgggaccaccaggatctgaggcccaaatccttcctcactaaggggaggagaggggtgctccggcagggcaggatgggaaggcgtgcttgggcgggattgtgacataagagtgccctggtgacatggagcagttctgtggcataaataaaggtgtcataaagacagggcgggactcatgcttacaaggggcacgagcgtctcggagctgccagaatgacttccgctcagtgcccggcactagcgtgtgtcatgtccccgctgcgtttctggggcccatggcccctccttatgtggcaactattgtggctactagtcaaggaggctcagcctctggagtgggtcaaggacccgctccagctgacctctaaccccctggggccgcctgagccctggtcttcccactcctcccatttcccacgggaatctccccatgcgcctactctcccagcagacccgtgggactttgatcacctggggccctctgcttcctcagagatgccagccccaccccaggaatcgactgaaaatttggttccattcctggacacctgggattcagctggagagctgcccctggagccagagcagttcttggcttcacagcaggatttaaaggacaagctgagtccacaggaaaggctccctgtttcgcccaagaagctgaagaaagatccagctcagcgttggagccttgctgagattattggaattatacaccaattatccacacctcagagtcagaaacagactttgcagaatgaatattccagtacagatacaccgtatcccggtagcctgcctccagaactccgggtgaagtcagatgagcctccagggccctctgagcaagttggaccttctcaattccatctagagcccgaaactcaaaatccagagacccttgaagacatccagtcctcttcactccagcaagaagccccagcacagcttccacagctccttgaggaagaaccttcttcaatgcagcaggaggccccagctctgcctccagagtcctctatggagagtctaactctaccgaatcatgaggtgtcagttcaacctccaggtgaggatcaagcttattatcacttgcccaacattacagttaaacctgcagatgtggaggttaccataacttcagaggctaccaatgagacagaatcttcccaagctcagcaggagaccccaattcagtttccagaggaggtggaaccttctgcaacccaacaggaggccccaattgagcctccagttcctcctatggagcatgaactttccatcagtgagcagcagcagccagttcagccttctgagacttctagggaggtcgaatcttctccgacccagcaggagaccccaggtcagcctccagaacatcatgaagtcacagtttcacctccaggtcaccatcaaactcatcatttagattcacccagtgtctctgtgaagcctccagacgtgcagctcaccatagcagcagagcctagtgcagaggtgggaacttctctagtccagcaggaggctacaactcggctctcagggtcaggtaatgatatagaacctcccgccatccagcacgggggcccacctctgctttcagagtcatcagaagaagctggacctttagcagttcaacaggagacttcatttcaatctccggaacctattaataatgagaacccctctccaacccagcaggaggctgcagctgagcatccacagaccgctgaggagggtgagtcttccctaacccatcaggaggccccagctcagactccagagttccctaatgtagttgtagctcaacctccagagcattcacacctgactcaagccacagttcaacctttggatctggggtttaccatcactccagaatccatgacagaggttgaactttctccaaccatgaaggagaccccaactcagcctcctaagaaagttgtaccccaacttcgagtatatcaaggggtaacaaatccaacaccaggtcaggatcaagctcagcatccagtgtcacccagcgttacagttcaacttttggacctgggacttaccatcactccagaacccactacggaggttggacattctacacccccgaagaggactatagtttctccaaagcatcctgaggtgacacttccacatccagaccaggttcagactcagcattcacacctgactcgagccacagttcaacctttggacctggggtttaccatcactccaaaatccatgacagaggttgaaccttctacagccctgatgactacagctcctcctccaggacaccctgaggtgacacttccaccttcagacaagggtcaggctcagcattcacacctgactcaagccaccgttcaacctctggacctggagcttaccataactacaaaacctactacagaggttaaaccgtctccaaccacggaggagacctcaactcagcctccagacctgggacttgccatcattccagaacccactacagagactggacattctacagccctggagaagactacagctcctcgtccagaccgggttcagactctgcatcgaagcctgactgaagtcacaggtccacctactgaactagaacctgctcaggattcactggtgcagtctgaaagttacacccaaaataaggctttaactgcaccagaggaacacaaggcctccacaagcaccaacatatgtgagctctgtacctgcggagatgagatgttgtcatgtattgatctcaacccagagcagaggctccgccaagtgcctgtgccagagcccaacacccacaatggcaccttcaccatcttgtaagaatcacttttcctcaattgtcctctgtgtcctgcctgacatggcagccttttcctggaggccttcctgggccttctttatctccccaagccatatggacaactgactttctgctttcacctttgcttgtcaactctcccttctcctcattctcttttaatgttaggccccttctccagtcttttccttttactctggtcttttactcgtttttgtatccatttttatttagccccatcacatcattgcttaaccgctgctctcctcccattttcgcttcaccctctttacagcagcctgtccctctcccgatctcagtgatgatgctctaagtggttaagagttgattccggagccaggctgcctgggtttgaacccagatctatttattagcttggtgacccagagcaagttattctgcctgtgactcaatttcctcacctttaaactggggatcatgctagttagcatttcataggattgttgtgaaatttaggtgagtgaatatatgaaacacttcatcagtgcttagcatatgtaggagagttggctgttcacatgattattcagtcctttagttttgtccagaactcatttttgtccctagctttctatatgtagaactagttttatgtcaaacccagggccaagtatgctactgtctccagaacacgaaaatgataggagggaagaggctgggtgtggtggctcacgcctgtaatcccagcactttgggaggccgaggcgggcggatcatgaggtcaggagatcaagaccatcctggctaacatggtgaaaccccatctctactaaaaatacagaaaaaaattagccaggcatggtggtgggtgcctggagtcccagctactcgggaggctgaggcaggagaatggcatgaacctgggaggcagagcttgcagtgagccgagattgcaccactgcactccagcctgggcgacagagcaagactccatctc

SEQ ID NO: 407882 - DNA, 337 bp, Homo sapiens
  misc_feature (336)..(336): n is a, c, g, or t
attttatttaaagatcctagtgactgatgcacattgtgcccctgttgctacgataggagcggaggatgttggatctgagagatctcatgcttaacccttaagtgagaagtagcgtgtggtgtgggaaggtaacacagctctctcctgtaagcagaaatcaagcggtggtctactgagagccattttattacttccagagaaccctgaaggtgaaatgaaggttctggggcagggagggagcatgaagtacgaggaaaacttgaattccagatttttaatgcaaagtatttatcatttctaccagaaataaacgttttaagtttttacttgaatatna

SEQ ID NO: 407883 - DNA, 398 bp, Homo sapiens
tgggcagacagcaaccttttgcttgccaagactcaaaccttcttagctaacagaacctccccaccttagccgtcagcacattcatgatccaagtaagcccagttactctagccctgtcactgcatcttaaaccagctctgtctgtgagcaagttagttccaaaagtatattgatttttcctgaaaagatgggggctgattccagggcttgcctaacctcttagggatggtaataatgataataataaacacatagtccttacatcttgcccagggcactgttcacattaggcgcttacagcactctcagtagggtactatttaatatatctactttatagtgagaaaactgaatcaaagggagattaactacctctcccaaggtgacatactcaggtg

SEQ ID NO: 407884 - DNA, 385 bp, Homo sapiens
tggaatatgtctccattagaggaaaaaattttaaactgttgaaatacttttccccttcttctccttctagaataacaggtttttaaagacaggacctgatacttatatatccttgaatgtctaatgtcaaacagtacctgacatgtagtaggtatttgatgactattaagtgaatgagtcagtaattgaaaacagatggttcacacagaagtagaaagaggcgttagttgtccaggtgatttggaagggagcagtaatgcatagtgggtggttatgttggatggaggagtgagtattctatagcagctttgagcaaaaactaatcttagttatttagaatcttgagtgtaggagaaatttattttcctttttatttatttattaa

SEQ ID NO: 407885 - DNA, 465 bp, Homo sapiens
ttttattatttatttatttatttatttatttagagacagagctggctctgtcacccactgcactccaacctgggtgacaagagcgagactccgtctcaaaaaaaaaaaaagaaaaaaactgcaggcaaagttggatttgcggcctatgaataaaaccattactttaaaaagtaatacccccaaaaaagttacacctgaagtttcatcttcatgcctttgtgtaatattactataatggtgaaatgatgatttaaaaaaaacacatcagaactgacacatcctcttgggatgatggggtccttcagtcaccttgtgaggcccatgtacttattccgttgatacagcctgtgcttattaaacatgtggggggccctccttgtgtgaggctgcttgaatggccagtacccccattcttttgaatattcccaatggcagtcaatcttggcctttaagaataaatttaaa

SEQ ID NO: 407886 - DNA, 1467 bp, Homo sapiens
acaaagcagggaggctagggtggccccggggcggggtcccggacccccaccctaaggcggagtgacgcccgcagtcacttcacaaggcaaaaattgttacggggcaataaaaggcacaacagcggccaatgtctggcagtgggcacatgggggtgcgggggtgtaggtgccaagcgccatggcttagacccgagattggagtccggccgccccccgacagcagccgcctcctgccccccgtgcgccctaggcgccaccatgtcgggagacaaacttctgagcgaactcggttataagctgggccgcacaattggagagggcagctactccaaggtgaaggtggccacatccaagaagtacaagggtaccgtggccatcaaggtggtggaccggcggcgagcgcccccggacttcgtcaacaagttcctgccgcgagagctgtccatcctgcggggcgtgcgacacccgcacatcgtgcacgtcttcgagttcatcgaggtgtgcaacgggaaactgtacatcgtgatggaagcggccgccaccgacctgctgcaagccgtgcagcgcaacgggcgcatccccggagttcaggcgcgcgacctctttgcgcagatcgccggcgccgtgcgctacctgcacgatcatcacctggtgcaccgcgacctcaagtgcgaaaacgtgctgctgagcccggacgagcgccgcgtcaagctcaccgacttcggcttcggccgccaggcccatggctacccagacctgagcaccacctactgcggctcagccgcctacgcgtcacccgaggtgctcctgggcatcccctacgaccccaagaagtacgatgtgtggagcatgggcgtcgtgctctacgtcatggtcaccgggtgcatgcccttcgacgactcggacatcgccggcctgccccggcgccagaaacgcggcgtgctctatcccgaaggcctcgagctgtccgagcgctgcaaggccctgatcgccgagctgctgcagttcagcccgtccgccaggccctccgcgggccaggtagcgcgcaactgctggctgcgcgccggggactccggctagaagccgggtggttccagccattcctgcagccaagggcactgggccagggcggcgcacgcgcaagaggcgcgcttcgagggaatatgcgaagctgccgcgtgctgctgcacatgcgctttttcccttccgcttccctccctttcttcccacgggggagtccgcagttgcccttgttcggaatccacgttccccgcgatcccgggagctggaggcgcatgcgcatccgcgattccctgcgaccaggccccgagagggcgagaccagaggggacggaagcattgcgcctgcgcggaactctcagcctctgcgcggagggcgtcccttcccaaccagccgtgggtgccaggttcccggttggaacctgcaataaactcgctgttcctcgca

SEQ ID NO: 407887 - DNA, 927 bp, Homo sapiens
acaaagcagggaggctagggtggccccggggcggggtcccggacccccaccctaaggcggagtgacgcccgcagtcacttcacaaggcaaaaattgttacggggcaataaaaggcacaacagcggccaatgtctggcagtgggcacatgggggtgcgggggtgtaggtgccaagcgccatggcttagacccgagattggagtccggccgccccccgacagcagccgcctcctgccccccgtgcgccctaggcgccaccatgtcgggagacaaacttctgagcgaactcggttataagctgggccgcacaattggagagggcagctactccaaggtgaaggtggccacatccaagaagtacaagggtaccgtggccatcaaggtggtggaccggcggcgagcgcccccggacttcgtcaacaagttcctgccgcgagagctgtccatcctgcggggcgtgcgacacccgcacatcgtgcacgtcttcgagttcatcgaggtgtgcaacgggaaactgtacatcgtgatggaagcggccgccaccgacctgctgcaagccgtgcagcgcaacgggcgcatccccggagttcaggcgcgcgacctctttgcgcagatcgccggcgccgtgcgctacctgcacgatcatcacctggtgcaccgcgacctcaagtgcgaaaacgtgctgctgagcccggacgagcgccgcgtcaagctcaccgacttcggcttcggccgccaggcccatggctacccagacctgagcaccacctactgcggctcagccgcctacgcgtcacccgagtcatgcatttcttgagcacctactgtctgccaggccccagagctcatggcgaagagacttgggcccatccctgccgaaaacgagacaattgaaaagtcaagtaaaataaaagaatgacatggaaat

SEQ ID NO: 407888 - DNA, 1657 bp, Homo sapiens
acaaagcagggaggctagggtggccccggggcggggtcccggacccccaccctaaggcggagtgacgcccgcagtcacttcacaaggcaaaaattgttacggggcaataaaaggcacaacagcggccaatgtctggcagtgggcacatgggggtgcgggggtgtaggtgccaagcgccatggcttagacccgagattggagtccggccgccccccgacagcagccgcctcctgccccccgtgcgccctaggcgccaccatgtcgggagacaaacttctgagcgaactcggttataagctgggccgcacaattggagagggcagctactccaaggtgaaggtggccacatccaagaagtacaagggtaccgtggccatcaaggtggtggaccggcggcgagcgcccccggacttcgtcaacaagttcctgccgcgagagctgtccatcctgcggggcgtgcgacacccgcacatcgtgcacgtcttcgagttcatcgaggtgtgcaacgggaaactgtacatcgtgatggaagcggccgccaccgacctgctgcaagccgtgcagcgcaacgggcgcatccccggagttcaggcgcgcgacctctttgcgcagatcgccggcgccgtgcgctacctgcacgatcatcacctggtgcaccgcgacctcaagtgcgaaaacgtgctgctgagcccggacgagcgccgcgtcaagctcaccgacttcggcttcggccgccaggcccatggctacccagacctgagcaccacctactgcggctcagccgcctacgcgtcacccgaggtgctcctgggcatcccctacgaccccaagaagtacgatgtgtggagcatgggcgtcgtgctctacgtcatggtcaccgggtgcatgcccttcgacgactcggacatcgccggcctgccccggcgccagaaacgcggcgtgctctatcccgaaggcctcgagctgtccgagcgctgcaaggccctgatcgccgagctgctgcagttcagcccgtccgccaggccctccgcgggccaggtagcgcgcaactgctggctgcgcgccggggactccggctagaagccgggtggttccagccattcctgcagccaagggcactgggccagggcggcgcacgcgcaagaggcgcgcttcgagggaatatgcgaagctgccgcgtgctgctgcacatgcgctttttcccttccgcttccctccctttcttcccacgggggagtccgcagttgcccttgttcggaatccacgttccccgcgatcccgggagctggaggcgcatgcgcatccgcgattccctgcgaccaggccccgagagggcgagaccagaggggacggaagcattgcgcctgcgcggaactctcagcctctgcgcggagggcgtcccttcccaaccagccgtgggtgccaggttcccggttggaacctgcaataaactcgctgttcctcgcacctggctctaacggtggcccccatttgcggactagtggagaagcgatcgctccatccggggaagtcatgcatttcttgagcacctactgtctgccaggccccagagctcatggcgaagagacttgggcccatccctgccgaaaacgagacaattgaaaagtcaagtaaaataaaagaatgacatggaaat

SEQ ID NO: 407889 - DNA, 2005 bp, Homo sapiens
acaaagcagggaggctagggtggccccggggcggggtcccggacccccaccctaaggcggagtgacgcccgcagtcacttcacaaggcaaaaattgttacggggcaataaaaggcacaacagcggccaatgtctggcagtgggcacatgggggtgcgggggtgtaggtgccaagcgccatggcttagacccgagattggagtccggccgccccccgacagcagccgcctcctgccccccgtgcgccctaggcgccaccatgtcgggagacaaacttctgagcgaactcggttataagctgggccgcacaattggagagggcagctactccaaggtgaaggtggccacatccaagaagtacaagggtaccgtggccatcaaggtggtggaccggcggcgagcgcccccggacttcgtcaacaagttcctgccgcgagagctgtccatcctgcggggcgtgcgacacccgcacatcgtgcacgtcttcgagttcatcgaggtgtgcaacgggaaactgtacatcgtgatggaagcggccgccaccgacctgctgcaagccgtgcagcgcaacgggcgcatccccggagttcaggcgcgcgacctctttgcgcagatcgccggcgccgtgcgctacctgcacgatcatcacctggtgcaccgcgacctcaagtgcgaaaacgtgctgctgagcccggacgagcgccgcgtcaagctcaccgacttcggcttcggccgccaggcccatggctacccagacctgagcaccacctactgcggctcagccgcctacgcgtcacccgaggtgctcctgggcatcccctacgaccccaagaagtacgatgtgtggagcatgggcgtcgtgctctacgtcatggtcaccgggtgcatgcccttcgacgactcggacatcgccggcctgccccggcgccagaaacgcggcgtgctctatcccgaaggcctcgagctgtccgagcgctgcaaggccctgatcgccgagctgctgcagttcagcccgtccgccaggccctccgcgggccaggtagcgcgcaactgctggctgcgcgccggggactccggctagaagccgggtggttccagccattcctgcagccaagggcactgggccagggcggcgcacgcgcaagaggcgcgcttcgagggaatatgcgaagctgccgcgtgctgctgcacatgcgctttttcccttccgcttccctccctttcttcccacgggggagtccgcagttgcccttgttcggaatccacgttccccgcgatcccgggagctggaggcgcatgcgcatccgcgattccctgcgaccaggccccgagagggcgagaccagaggggacggaagcattgcgcctgcgcggaactctcagcctctgcgcggagggcgtcccttcccaaccagccgtgggtgccaggttcccggttggaacctgcaataaactcgctgttcctcgcacctggctctaacggtggcccccatttgcggactagtggagaagcgatcgctccatccggggaaggcaggcgcgggtaccctattttagagtcacgcatgttgaggttattgctccaagactcaaaagggagtcgggaggattcgagcctggaccttttgagctccccagtatgggcaaactcaaaggagctttgttgtccccgggtcgtgatgtcgctgtgatgatgggctgggaagcaagtggaccccagcgcctcgccgtccacatcttttaagaatggaacagccaggggtggggcgagggtggcctgtctccacgtaaagtaggagtttatagataaggaaactgaggcccacatggatgtcacttgccaaaaggcagagccaagggccaggcgcggtggctcacgcctgtaaccccaacactgcgagtccgaagcgggcagatatcctgacttcgtgatccacccgcctcggcctctcaaagtgttgggattacaggcgtgagccaacgcgccctggaccctgcctcttaaaa

SEQ ID NO: 407890 - DNA, 454 bp, Homo sapiens
cttgtgcctcagaatcatcatagacgcttggaaatgggagagatcttcttatctcgttgctgatccaataccacagcatacacatggggaaactgagtcggtgatgaactattcactggcagtgccccccgctctgaattgggttttaagtgatgacaagtcggctgagcctcaggtttagaggaaacaccgtgtaggagcaggagcgaacgtttgctctgttcccgtggagcccatcatctacctgagacaacaaggcagatgtccgcataaacgccagggctgtccgtgctcaggggcaaatcagtggaataggtaatacaaagagaaaggcaggtgagagctcaatgggctaacacggtcaaggtaggcttcctgggggaagaggtatttacctggcccataaagaataggttgaagctgggcatggtggctcaagcctgtaagctgagca

SEQ ID NO: 407891 - DNA, 1601 bp, Homo sapiens
atggctgttacctaaatggctgttacctaaatggctgttacctaaatggctgtactcgtggatcacttgagcccaggactttgagaccaacctggtcagtacagtgaaactggtctctacaaaaaataaaataaaataaaaaagattcctagctgattctactgtgttgcaaaatttgggaaacaataaatgactgtggcctcgaagagaaagataagacacatcttataggaagcagaaagtgagacgtgccgttaaaaaagagagagagaaaataccacgggggtccttttgaataaaatgtgaccttgtttttagaaaatgcctcctgactttgagaattcccctttctgtctccagtcctctacgtgcaagaatttggattgggtgcctctcaccacactgtcacactgcaagtcactgaggacaatgacagcaatcagtcgctacatggagctgaccatcgagcctgtgcagcaggcaggctgcagtgccaccaggctgccaggtgacgggcagacgagcgccggagatgcgtccctgcaggaccccccgtcgtaccctcccgttcaggtcatccgggcccgggtgtcttccggcagctcctctgaggtctcctccatcaactccgacctggagtgggaccctgaagatgtgaacctcgaaggcagcaaagaaaatgtggagctactgggatcccaggtgcaccaggactctgtgaggacagcacacctgagtgatgatgattaacaccttctggagccagctcatcagctcagagcccagggtcaggagttcgttcagtaacgcagcgggaatcaatctgcactgacaccgcggcaggaactgaagctgccctggcaagtgaggaaccaggagccgtcactgagtgtggctgggctacatcatagctcatcacggagctacgactttgggtactgcggacagacctggataggcccagcattcgttctgaagatcacagttcacagaagcttttgcttcgtaaagataatccaaaggatctcagacccgctcttccttttcccttcattcccttgagagtcagccatgaacggaatacctgctaggttccaggaatgagctcacctaacagatagcaaatgtgtctggttagatctcagcagagcccattctgcaagacctggctgagccagatgagagggtgggccctgtgctggggggccttgggtcacacacaggaaccgagacctggcttccaccccccagtcacccacttgggttatctgctggaagttatcgataggactgtgtggccaaccaagtgcttgtgagatcactgacactgcaaaaacaaagcaaactgctccgggtaccaggacttcctccaacctggcaagggtgtgcgctgaggcggggcttgcaggtgagggggctgtatgcttcaggaactaactaaatgcatgcagaaggtaagaggcatgatgggaggtgttcaagcacagcaatcccatttgggagttattttgatactgcgatgagtaagggtaagggcgcatggaatggggctaaggtgggagtgaacactggggtgaataaattttaaatcaattcaagta

SEQ ID NO: 407892 - DNA, 1901 bp, Homo sapiens
ccggtctctactaaaaatacgaaaattacccgagcatgatggcaggtgcccgtaatcccagctacttgggaggctgaggcgagagaatcgcttgaaccagggaggcaggggttgcagtgagctaagatcataccaccgcactccagcctgggtgacagagcgagactctgtctcaaaaaaaaaaagggggtcacattcagaggtggatctgaattttgagggacactattcaacccactgcatgtattgtcactgtaagccaggcctgtcaagaaagacgttttccaaaatgctttagttttgcaaatatttaccatgtccttgttagggacagggtcacattggatgctgggccctcgtgaggacaggaacatccaccctagccctgtcttcagatgagctcctctctgtcccaggcaggataatacaggggagggaggagagtaggtgagtggggaggggggtggcagcatggtgtggaggggtgaagggccacgctaggcagctggaatattctgcttcctaccttaacttacaccatctcagattattttcctttcgtgtgtgatgaagagcaagatgagacaggccttaggatttgccaaggaagccagagagagccctgacacccaagcccttttgacctgtgcagagaaagaggaagaaaaccaggagaatttggattgggtgcctctcaccacactgtcacactgcaagtcactgaggacaatgacagcaatcagtcgctacatggagctgaccatcgagcctgtgcagcaggcaggctgcagtgccaccaggctgccaggtgacgggcagacgagcgccggagatgcgtccctgcaggaccccccgtcgtaccctcccgttcaggtcatccgggcccgggtgtcttccggcagctcctctgaggtctcctccatcaactccgacctggagtgggaccctgaagatgtgaacctcgaaggcagcaaagaaaatgtggagctactgggatcccaggtgcaccaggactctgtgaggacagcacacctgagtgatgatgattaacaccttctggagccagctcatcagctcagagcccagggtcaggagttcgttcagtaacgcagcgggaatcaatctgcactgacaccgcggcaggaactgaagctgccctggcaagtgaggaaccaggagccgtcactgagtgtggctgggctacatcatagctcatcacggagctacgactttgggtactgcggacagacctggataggcccagcattcgttctgaagatcacagttcacagaagcttttgcttcgtaaagataatccaaaggatctcagacccgctcttccttttcccttcattcccttgagagtcagccatgaacggaatacctgctaggttccaggaatgagctcacctaacagatagcaaatgtgtctggttagatctcagcagagcccattctgcaagacctggctgagccagatgagagggtgggccctgtgctggggggccttgggtcacacacaggaaccgagacctggcttccaccccccagtcacccacttgggttatctgctggaagttatcgataggactgtgtggccaaccaagtgcttgtgagatcactgacactgcaaaaacaaagcaaactgctccgggtaccaggacttcctccaacctggcaagggtgtgcgctgaggcggggcttgcaggtgagggggctgtatgcttcaggaactaactaaatgcatgcagaaggtaagaggcatgatgggaggtgttcaagcacagcaatcccatttgggagttattttgatactgcgatgagtaagggtaagggcgcatggaatggggctaaggtgggagtgaacactggggtgaataaattttaaatcaattcaagta

SEQ ID NO: 407893 - DNA, 1141 bp, Homo sapiens
cttgtgcctcagaatcatcatagacgcttggaaatgggagagatcttcttatctcgttgctgatccaataccacagcatacacatggggaaactgaggccccaaaaacgaaggcaaattagtgacaggaggagaactggagcccaatccctacttgcctccatggctggaacctcaaagtgggaccctgaagatgtgaacctcgaaggcagcaaagaaaatgtggagctactgggatcccaggtgcaccaggactctgtgaggacagcacacctgagtgatgatgattaacaccttctggagccagctcatcagctcagagcccagggtcaggagttcgttcagtaacgcagcgggaatcaatctgcactgacaccgcggcaggaactgaagctgccctggcaagtgaggaaccaggagccgtcactgagtgtggctgggctacatcatagctcatcacggagctacgactttgggtactgcggacagacctggataggcccagcattcgttctgaagatcacagttcacagaagcttttgcttcgtaaagataatccaaaggatctcagacccgctcttccttttcccttcattcccttgagagtcagccatgaacggaatacctgctaggttccaggaatgagctcacctaacagatagcaaatgtgtctggttagatctcagcagagcccattctgcaagacctggctgagccagatgagagggtgggccctgtgctggggggccttgggtcacacacaggaaccgagacctggcttccaccccccagtcacccacttgggttatctgctggaagttatcgataggactgtgtggccaaccaagtgcttgtgagatcactgacactgcaaaaacaaagcaaactgctccgggtaccaggacttcctccaacctggcaagggtgtgcgctgaggcggggcttgcaggtgagggggctgtatgcttcaggaactaactaaatgcatgcagaaggtaagaggcatgatgggaggtgttcaagcacagcaatcccatttgggagttattttgatactgcgatgagtaagggtaagggcgcatggaatggggctaaggtgggagtgaacactggggtgaataaattttaaatcaattcaagta

SEQ ID NO: 407894 - DNA, 1784 bp, Homo sapiens
atggctgttacctaaatggctgttacctaaatggctgttacctaaatggctgtactcgtggatcacttgagcccaggactttgagaccaacctggtcagtacagtgaaactggtctctacaaaaaataaaataaaataaaaaagattcctagctgattctactgtgttgcaaaatttgggaaacaataaatgactgtggcctcgaagagaaagataagacacatcttataggaagcagaaagtgagacgtgccgttaaaaaagagagagagaaaataccacgggggtccttttgaataaaatgtgaccttgtttttagaaaatgcctcctgactttgagaattcccctttctgtctccagtcctctacgtgcaagaatttggattgggtgcctctcaccacactgtcacactgcaagtcactgaggacaatgacagcaatcagtcgctacatggagctgaccatcgagcctgtgcagcaggcaggctgcagtgccaccaggctgccaggtgacgggcagacgagcgccggagatgcgtccctgcaggaccccccgtcgtaccctcccgttcaggtcatccgggcccgggtgtcttccggcagctcctctgaggtctcctccatcaactccgacctggagtgggaccctgaagatgtgaacctcgaaggcagcaaagaaaatgtggagctactgggatcccaggtgcaccaggactctgtgaggacagcacacctgagtgatgatgattaacaccttctggagccagctcatcagctcagagcccagggtcaggagttcgttcagtaacgcagcgggaatcaatctgcactgacaccgcggcaggaactgaagctgccctggcaagtgaggaaccaggagccgtcactgagtgtggctgggctacatcatagctcatcacggagctacgactttgggtactgcggacagacctggataggcccagcattcgttctgaagatcacagttcacagaagcttttgcttcgtaaagataatccaaaggatctcagacccgctcttccttttcccttcattcccttgagagtcagccatgaacggaatacctgctaggttccaggaatgagctcacctaacagatagcaaatgtgtctggttagatctcagcagagcccattctgcaagacctggctgagccagatgagagggtgggccctgtgctggggggccttgggtcacacacaggaaccgagacctggcttccaccccccagtcacccacttgggttatctgctggaagttatcgataggactgtgtggccaaccaagtgcttgtgagatcactgacactgcaaaaacaaagcaaactgctccgggtaccaggacttcctccaacctggcaagggtgtgcgctgaggcggggcttgcaggtgagggggctgtatgcttcaggaactaactaaatgcatgcagaaggtaagaggcatgatgggaggtgttcaagcacagcaatcccatttgggagttattttgatactgcgatgagtaagggtaagggcgcatggaatggggctaaggtgggagtgaacactggggtgaataaattttaaatcaattcaagtatctcactgtggagtgcaatggcgagcatgaatccctgcacagtcacagaatgacgtcggccacgagaggaagtggagaaatgccaagcaacacagttttgctccgggctggcccacagccgcctgcgtgacgcagctacagcagcccagtttctcctgaggggtagggcaagttccagcagca

SEQ ID NO: 407895 - DNA, 303 bp, Homo sapiens
actttgggaggccgaggtgggaggatcactcgtggatcacttgagcccaggactttgagaccaacctggtcagtacagtgaaactggtctctacaaaaaataaaataaaataaaaaagattcctagctgattctactgtgttgcaaaatttgggaaacaataaatgactgtggcctcgaagagaaagataagacacatcttataggaagcagaaagtgagacgtgccgttaaaaaagagagagagaaaataccacgggggtccttttgaataaaatgtgaccttgtttttagaaaatgcctcc

SEQ ID NO: 407896 - DNA, 317 bp, Homo sapiens
caaaagctgtaagtctaacagaagcattgccctggaggactggctgcaggcagagggcttgccccgcaacctgctgtgccactgagggccctgggtcttgtgatctgctgcttctcccgcccagcccctccctctctctgcccagtgccgggggaagacatttccctccatccacctgtggacccggctcctgtcggccactggctggcctcctctatgcctcggccattgtggcccacgaccggcaccctgagtacctgctgcgggccacaccctggttcctgacctccctcggccgtgcggcactggacctcgct

SEQ ID NO: 407897 - DNA, 1499 bp, Homo sapiens
ggcacgaggtcacaatccaggttttcactggctggcctcctctatgcctcggccattgtggcccacgaccggcaccctgagtacctgctgcgggccacaccctggttcctgacctccctcggccgtgcggcactggacctcgctattattttcctttcgtgtgtgatgaagagcaagatgagacaggccttaggatttgccaaggaagccagagagagccctgacacccaagcccttttgacctgtgcagagaaagaggaagaaaaccaggagaatttggattgggtgcctctcaccacactgtcacactgcaagtcactgaggacaatgacagcaatcagtcgctacatggagctgaccatcgagcctgtgcagcaggcaggctgcagtgccaccaggctgccaggtgacgggcagacgagcgccggagatgcgtccctgcaggaccccccgtcgtaccctcccgttcaggtcatccgggcccgggtgtcttccggcagctcctctgaggtctcctccatcaactccgacctggagtgggaccctgaagatgtgaacctcgaaggcagcaaagaaaatgtggagctactgggatcccaggtgcaccaggactctgtgaggacagcacacctgagtgatgatgattaacaccttctggagccagctcatcagctcagagcccagggtcaggagttcgttcagtaacgcagcgggaatcaatctgcactgacaccgcggcaggaactgaagctgccctggcaagtgaggaaccaggagccgtcactgagtgtggctgggctacatcatagctcatcacggagctacgactttgggtactgcggacagacctggataggcccagcattcgttctgaagatcacagttcacagaagcttttgcttcgtaaagataatccaaaggatctcagacccgctcttccttttcccttcattcccttgagagtcagccatgaacggaatacctgctaggttccaggaatgagctcacctaacagatagcaaatgtgtctggttagatctcagcagagcccattctgcaagacctggctgagccagatgagagggtgggccctgtgctggggggccttgggtcacacacaggaaccgagacctggcttccaccccccagtcacccacttgggttatctgctggaagttatcgataggactgtgtggccaaccaagtgcttgtgagatcactgacactgcaaaaacaaagcaaactgctccgggtaccaggacttcctccaacctggcaagggtgtgcgctgaggcggggcttgcaggtgagggggctgtatgcttcaggaactaactaaatgcatgcagaaggtaagaggcatgatgggaggtgttcaagcacagcaatcccatttgggagttattttgatactgcgatgagtaagggtaagggcgcatggaatggggctaaggtgggagtgaacactggggtgaataaattttaaatcaattcaagta

SEQ ID NO: 407898 - DNA, 1532 bp, Homo sapiens
ggcacgaggtcacaatccaggttttcactggctggcctcctctatgcctcggccattgtggcccacgaccggcaccctgagtacctgctgcgggccacaccctggttcctgacctccctcggccgtgcggcactggacctcgctattattttcctttcgtgtgtgatgaagagcaagatgagacaggccttaggatttgccaaggaagccagagagagccctgacacccaagcccttttgacctgtgcagagaaagaggaagaaaaccaggagaatttggattgggtgcctctcaccacactgtcacactgcaagtcactgaggacaatgacagcaatcagtcgctacatggagctgaccatcgagcctgtgcagcaggcaggctgcagtgccaccaggctgccaggtgacgggcagacgagcgccggagatgcgtccctgcaggaccccccgtcgtaccctcccgttcaggtcatccgggcccgggtgtcttccggcagctcctctgaggtctcctccatcaactccgacctggagcagaagtattgggaggccctaaactcggagcagtgggaccctgaagatgtgaacctcgaaggcagcaaagaaaatgtggagctactgggatcccaggtgcaccaggactctgtgaggacagcacacctgagtgatgatgattaacaccttctggagccagctcatcagctcagagcccagggtcaggagttcgttcagtaacgcagcgggaatcaatctgcactgacaccgcggcaggaactgaagctgccctggcaagtgaggaaccaggagccgtcactgagtgtggctgggctacatcatagctcatcacggagctacgactttgggtactgcggacagacctggataggcccagcattcgttctgaagatcacagttcacagaagcttttgcttcgtaaagataatccaaaggatctcagacccgctcttccttttcccttcattcccttgagagtcagccatgaacggaatacctgctaggttccaggaatgagctcacctaacagatagcaaatgtgtctggttagatctcagcagagcccattctgcaagacctggctgagccagatgagagggtgggccctgtgctggggggccttgggtcacacacaggaaccgagacctggcttccaccccccagtcacccacttgggttatctgctggaagttatcgataggactgtgtggccaaccaagtgcttgtgagatcactgacactgcaaaaacaaagcaaactgctccgggtaccaggacttcctccaacctggcaagggtgtgcgctgaggcggggcttgcaggtgagggggctgtatgcttcaggaactaactaaatgcatgcagaaggtaagaggcatgatgggaggtgttcaagcacagcaatcccatttgggagttattttgatactgcgatgagtaagggtaagggcgcatggaatggggctaaggtgggagtgaacactggggtgaataaattttaaatcaattcaagta

SEQ ID NO: 407899 - DNA, 697 bp, Homo sapiens
atggctgttacctaaatggctgttacctaaatggctgttacctaaatggctgtactcgtggatcacttgagcccaggactttgagaccaacctggtcagtacagtgaaactggtctctacaaaaaataaaataaaataaaaaagattcctagctgattctactgtgttgcaaaatttgggaaacaataaatgactgtggcctcgaagagaaagataagacacatcttataggaagcagaaagtgagacgtgccgttaaaaaagagagagagaaaataccacgggggtccttttgaataaaatgtgaccttgtttttagaaaatgcctcctgactttgagaattcccctttctgtctccagtcctctacgtgcaagaatttggattgggtgcctctcaccacactgtcacactgcaagtcactgaggacaatgacagcaatcagtcgctacatggagctgaccatcgagcctgtgcagcaggcaggctgcagtgccaccaggctgccaggtgacgggcagacgagcgccggagatgcgtccctgcaggaccccccgtcgtaccctcccgttcaggtcatccgggcccgggtgtcttccggcagctcctctgaggtctcctccatcaactccgacctggagtgggaccctgaagatgtgaacctccaatggtgcagcagctctccaaggttgcagcatg

SEQ ID NO: 407900 - DNA, 2167 bp, Homo sapiens
  misc_feature (1)..(1): n is a, c, g, or t
  misc_feature (6)..(7): n is a, c, g, or t
ngccgnngctcggatctaggagctactcgcccggccctgggcggtgggaggcggcggcggcggcggcgctcgcgcacctcggaggagccaggagccggaaccagggccgagcccgcgggccggggctagccagccggtcggagatgtccgcccagaggttaatttctaacagaacctcccagcaatcggcatctaattctgattacacctgggaatatgaatattatgagattggaccagtttcctttgaaggactgaaggctcataaatattccattgtgattggattttgggttggtcttgcagtcttcgtgatttttatgttttttgtgctgaccttgctgaccaagacaggagccccacaccaagacaatgcagagtcctcagagaagagattcagaatgaacagctttgtgtcagactttggaagacctctggagccagataaagtattttctcgccaaggcaacgaggagtccaggtctctctttcactgctacatcaatgaggtggaacgcttggacagagccaaagcttgtcaccagaccacagcccttgacagtgacgtccaactccaggaagccatcagaagcagtgggcagccagaggaggagctgaacaggctcatgaagtttgacatccccaactttgtgaacacagaccagaactactttggggaggatgatcttctgatttctgaaccacctattgttctggaaactaagccactttcccagacctcacacaaagacctggattgagaaacatgctctgtaaagggtcttcctgaagatgtggattctatctttatgtagcaagaaatctacatccaccaaaattgtgtgtgtttgggggagagagagacatagagatagagacagagaggcagagaagagacccctttagaagagagctgagctgattaagctgagtggttttttgttttgttttgtttttgctttttaatacatttggagctttgggagtattaaagtatttacaccaagcttgtccaacccgtggcatgtgtcccaggacagctttgaatgtggcccaatacaaattttaaactttattaaaacatgagttttgtttttttttttgctattttttttaaagctcgtcagctatcgttagtgttagtgtactttatgtgtggcccaagacaactcttcttccagtgtggcacagggaagctaaaagattggacacctctgatttatactagctcgttttgcttgttgaaaaatttggccaaatacctattgtcagcattcttgggtgaggattagcctaccatgttctaatctggccctgccactactatgctctacctttggtgagttgctttacctctctgggctgccccatttttaactgtaggttgacaggtctagagtgatccatcccacctctaatattttgtgaatttatgactttgccttcagatgaggctgagctatacataaaacagtataaactagggtactgcctcgtatctcttgtaggctctctcaaatctctgtaccttccacttaaccctaattgagccaagctttagtcaggggatctggttgtctaccagaatgtcaggagactcatcttacacagtcatggtggccaatgtttctggtgggttgtgctgaaacagctcttctgagaacttccaaccacccatgctctaacctggagacagccatcccctgcctcagaataagtaccaattcgtagtacatgtatggtactcttgtccccaagaaatgttaggaagcttgtcagctgaatgagaggaggtgccttctgggtatctctgtgttggtgtatctgtgccattggctacagaacaagaaaaatactatttgccatgctattaccttggcagatgtgtaggtgatagtcatctggctttgagctgagatggtcagtgggttgtaaattccccactagcagatattcagggtggcctgagttatgtaaacaagtgagcaacacagctttaatttcatggaggaatcaaagctgcacactggtattaaaacaacttgattttgcgcacacagttgcatgcatggcaagctgttaacctctgggtggcattttcattatgaatttgccctcccccttgggacgcgctgtaaataattgcaataaaacaaacctttctctg

SEQ ID NO: 407901 - DNA, 68 bp, Homo sapiens
gtaagtttgggctgttcctaaatgtctcttaagcctcacaggagactgaggaaatagaaactactacc

SEQ ID NO: 407902 - DNA, 2166 bp, Homo sapiens
  misc_feature (1)..(1): n is a, c, g, or t
  misc_feature (6)..(7): n is a, c, g, or t
ngccgnngctcggatctaggagctactcgcccggccctgggcggtgggaggcggcggcggcggcggcgctcgcgcacctcggaggagccaggagccggaaccagggccgagcccgcgggccggggctagccagccggtcggagatgtccgcccagaggttaatttctaacagaacctcccagcaatcggcatctaattctgattacacctgggaatatgaatattatgagattggaccagtttcctttgaaggactgaaggctcataaatattccattgtgattggattttgggttggtcttgcagtcttcgtgatttttatgttttttgtgctgaccttgctgaccaagacaggagccccacaccaagacaatgcagagtcctcagagaagagattcagaatgaacagctttgtgtcagactttggaagacctctggagccagataaagtattttctcgccaaggcaacgaggagtccaggtctctctttcactgctacatcaatgaggtggaacgcttggacagagccaaagcttgtcaccagaccacagcccttgacagtgacgtccaactccaggaagccatcagaagcagtgggcagccagaggaggagctgaacaggctcatgaagtttgacatccccaactttgtgaacacagaccagaactactttggggaggatgatcttctgatttctgaaccacctattgttctggaaactaagccactttcccagacctcacacaaagacctggattgagaaacatgctctgtaaagggtcttcctgaagatgtggattctatctttatgtagcaagaaatctacatccaccaaaattgtgtgtgtttgggggagagagagacatagagatagagacagagaggcagagaagagacccctttagaagagagctgagctgattaagctgagtggttttttgttttgttttgtttttgctttttaatacatttggagctttgggagtattaaagtatttacaccaagcttgtccaacccgtggcatgtgtcccaggacagctttgaatgtggcccaatacaaattttaaactttattaaaacatgagttttgtttttttttttgctattttttttaaagctcgtcagctatcgttagtgttagtgtactttatgtgtggcccaagacaactcttcttccagtgtggcacagggaagctaaaagattggacacctctgatttatactagctcgttttgcttgttgaaaaatttggccaaatacctattgtcagcattcttgggtgaggattagcctaccatgttctaatctggccctgccactactatgctctacctttggtgagttgctttacctctctgggctgccccatttttaactgtaggttgacaggtctagagtgatccatcccacctctaatattttgtgaatttatgactttgccttcagatgaggctgagctatacataaaacagtataaactagggtactgcctcgtatctcttgtaggctctctcaaatctctgtaccttccacttaaccctaattgagccaagctttagtcaggggatctggttgtctaccagaatgtcaggagactcatcttacacagtcatggtggccaatgtttctggtgggttgtgctgaaacagctcttctgagaacttccaaccacccatgctctaacctggagacagccatcccctgcctcagaataagtaccaattcgtagtacatgtatggtactcttgtccccaagaaatgttaggaagcttgtcagctgaatgagaggaggtgccttctgggtatctctgtgttggtgtatctgtgccattggctacagaacaagaaaaatactatttgccatgctattaccttggcagatgtgtaggtgatagtcatctggctttgagctgagatggtcagtgggttgtaaattccccactagcagatattcagggtggcctgagttatgtaaacaagtgagcaacacagctttaatttcatggaggaatcaaagctgcacactggtattaaaacaacttgattttgcgcacacagttgcatgcatggcaagctgttaacctctgggtggcattttcattatgaatttgttcaccacctgtcttgcttaagctacaaaataaatgcatttgactgcaagaaa

SEQ ID NO: 407903 - DNA, 1839 bp, Homo sapiens
agcggacttccggagacctcacacaagatggcggcacccgaggaacacgattctccgaccgaagcgtcccagccgattgtggaagaggaggaaactaaaacatttaaagacctgggtgtgacagatgtgttgtgtgaagcttgtgaccagttgggatggacaaaacccaccaagatccagattgaagctattcctttggccttacaaggtcgtgatatcattgggcttgcagaaactggctctggaaagacaggcgcctttgctttgcccattctaaacgcactgctggagaccccgcagcgtttgtttgccctagttcttaccccgactcgggagctggcctttcagatctcagagcagtttgaagccctggggtcctctattggagtgcagagtgctgtgattgtaggtggaattgattcaatgtctcaatctttggcccttgcaaaaaaaccacatataataatagcaactcctggtcgactgattgaccacttggaaaatacgaaaggtttcaacttgagagctctcaaatacttggtcatggatgaagccgaccgaatactgaatatggattttgagacagaggttgacaagatcctcaaagtgattcctcgagatcggaaaacattcctcttctctgccaccatgaccaagaaggttcaaaaacttcagcgagcagctctgaagaatcctgtgaaatgtgccgtttcctctaaataccagacagttgaaaaattacagcaatattatatttttattccctctaaattcaaggatacctacctggtttatattctaaatgaattggctggaaactcctttatgatattctgcagcacctgtaataatacccagagaacagctttgctactgcgaaatcttggcttcactgccatccccctccatggacaaatgagtcagagtaagcgcctaggatcccttaataagtttaaggccaaggcccgttccattcttctagcaactgacgttgccagccgaggtttggacatacctcatgtagatgtggttgtcaactttgacattcctacccattccaaggattacatccatcgagtaggtcgaacagctagagctgggcgctccggaaaggctattacttttgtcacacagtatgatgtggaactcttccagcgcatagaacacttaattgggaagaaactaccaggttttccaacacaggatgatgaggttatgatgctgacagaacgcgtcgctgaagcccaaaggtttgcccgaatggagttaagggagcatggagaaaagaagaaacgctcgcgagaggatgctggagataatgatgacacagagggtgctattggtgtcaggaacaaggtggctggaggaaaaatgaagaagcggaaaggccgttaatcacttttatgaaggctcgagttctgctgttctgtaaaagagaattggagaatgaaacctgctccaacagagatcatgagactgaaattggtcagaattgtgtccagaatgtgctcagctaattcagtattcttccccattctgggttggagtttactgcagagtaattcttacagtgctgatgtcaagactgttactgttcttcgactttgattccttgctcatgacatgagtagggtgtgctcttctgtcacttcacacagaccttttgccttttttagctgcaagtcaaggactaggttgatgatgcccatgacctgtaattgtaaagaagcttggacatctgcaaatgatatttaaaccatcttggcttgtgctttattcaaactaatgtgaaacaataaatttaaatattatttttaaaagaaaataactccttaaaga

SEQ ID NO: 407904 - DNA, 588 bp, Homo sapiens
tccatatttctgttttgacctgtgaagccccattcaaaacttagggggaaaaacctttaaaaaatttatgtctgtttgttctcgtgtttgtctattttgtgttttgtattccaaaacataggttaagttttccaacatttctttttcattacctcagagtaagcgcctaggatcccttaataagtttaaggccaaggcccgttccattcttctagcaactgacgttgccagccgaggtttggacatacctcatgtagatgtggttgtcaactttgacattcctacccattccaaggattacatccatcgagtaggtcgaacagctagagctgggcgctccggaaaggctattacttttgtcacacagtaagtaaatcagctttagggccgagcaatgtagagaaaagagcagaactttcaagccactggctgagaacctgacactaccatttactacactaatcactttcatactgaaaaccaggatgaaggagttgaaagatgggaataataatacctatctagcagggttttggtgaaaattggagattatatatgtaaaagatctagtatagtatttggcatgta

SEQ ID NO: 407905 - DNA, 2387 bp, Homo sapiens
agcggacttccggagacctcacacaagatggcggcacccgaggaacacgattctccgaccgaagcgtcccagccgattgtggaagaggaggaaactaaaacatttaaagacctgggtgtgacagatgtgttgtgtgaagcttgtgaccagttgggatggacaaaacccaccaagatccagattgaagctattcctttggccttacaaggtcgtgatatcattgggcttgcagaaactggctctggaaagacaggcgcctttgctttgcccattctaaacgcactgctggagaccccgcagcgtttgtttgccctagttcttaccccgactcgggagctggcctttcagatctcagagcagtttgaagccctggggtcctctattggagtgcagagtgctgtgattgtaggtggaattgattcaatgtctcaatctttggcccttgcaaaaaaaccacatataataatagcaactcctggtcgactgattgaccacttggaaaatacgaaaggtttcaacttgagagctctcaaatacttggtcatggatgaagccgaccgaatactgaatatggattttgagacagaggttgacaagatcctcaaagtgattcctcgagatcggaaaacattcctcttctctgccaccatgaccaagaaggttcaaaaacttcagcgagcagctctgaagaatcctgtgaaatgtgccgtttcctctaaataccagacagttgaaaaattacagcaatattatatttttattccctctaaattcaaggtaaaatgtttactttgatcattcctgcctctccctcttcttttcaccaaagcatctgaaaatgtgtcaactcttgattaggtaagagctgtaatgcagattggcatcctgtctgtttgctttagagtgcatatcgtgcttatattatcaccgataagccagacatgccaggaattcacaacacattaaatcacaatactgaggtcatgatgtaatcatataattccttcccatccccatccttgaggtaatttttcctttgtctgcttattatgtggcttttatttaggatgaagcccctggttttgtgctttgatataaggacttctcctgtttgctgagtacagatctcctgcctgccttaaggctaagtggggaatatgtggttcacagagatgataatgctggttaaggaatgcaaagctggcagctggaggtctggataattgaaaagcgactataggcttagtctttaccttatgtatatgccaggtctccaatcctgtctcccaggttcaatgacatatattgttttgggtttgtaacttgatacctacctggtttatattctaaatgaattggctggaaactcctttatgatattctgcagcacctgtaataatacccagagaacagctttgctactgcgaaatcttggcttcactgccatccccctccatggacaaatgagtcagagtaagcgcctaggatcccttaataagtttaaggccaaggcccgttccattcttctagcaactgacgttgccagccgaggtttggacatacctcatgtagatgtggttgtcaactttgacattcctacccattccaaggattacatccatcgagtaggtcgaacagctagagctgggcgctccggaaaggctattacttttgtcacacagtatgatgtggaactcttccagcgcatagaacacttaattgggaagaaactaccaggttttccaacacaggatgatgaggttatgatgctgacagaacgcgtcgctgaagcccaaaggtttgcccgaatggagttaagggagcatggagaaaagaagaaacgctcgcgagaggatgctggagataatgatgacacagagggtgctattggtgtcaggaacaaggtggctggaggaaaaatgaagaagcggaaaggccgttaatcacttttatgaaggctcgagttctgctgttctgtaaaagagaattggagaatgaaacctgctccaacagagatcatgagactgaaattggtcagaattgtgtccagaatgtgctcagctaattcagtattcttccccattctgggttggagtttactgcagagtaattcttacagtgctgatgtcaagactgttactgttcttcgactttgattccttgctcatgacatgagtagggtgtgctcttctgtcacttcacacagaccttttgccttttttagctgcaagtcaaggactaggttgatgatgcccatgacctgtaattgtaaagaagcttggacatctgcaaatgatatttaaaccatcttggcttgtgctttattcaaactaatgtgaaacaataaatttaaatattatttttaaaagaaaataactccttaaaga

SEQ ID NO: 407906 - DNA, 1988 bp, Homo sapiens
tggcagaaggtgaaggagataagcaggaggtgggggcagtgccacactttaaaaccatgagaaattgtgagaactcactatcatgagaaccgcaatggggaaaaccacctctgtgatccaataacctcccaccaggtccctcccgtgacatgtggggattacaattcaacatgagatttgggtgaggacacagagccaaaccatgtcataaataaagagtgtttaggcatcagtgtgctattctggatcttcttccttcaggttcaaaaacttcagcgagcagctctgaagaatcctgtgaaatgtgccgtttcctctaaataccagacagttgaaaaattacagcaatattatatttttattccctctaaattcaaggtaaaatgtttactttgatcattcctgcctctccctcttcttttcaccaaagcatctgaaaatgtgtcaactcttgattaggtaagagctgtaatgcagattggcatcctgtctgtttgctttagagtgcatatcgtgcttatattatcaccgataagccagacatgccaggaattcacaacacattaaatcacaatactgaggtcatgatgtaatcatataattccttcccatccccatccttgaggtaatttttcctttgtctgcttattatgtggcttttatttaggatgaagcccctggttttgtgctttgatataaggacttctcctgtttgctgagtacagatctcctgcctgccttaaggctaagtggggaatatgtggttcacagagatgataatgctggttaaggaatgcaaagctggcagctggaggtctggataattgaaaagcgactataggcttagtctttaccttatgtatatgccaggtctccaatcctgtctcccaggttcaatgacatatattgttttgggtttgtaacttgatacctacctggtttatattctaaatgaattggctggaaactcctttatgatattctgcagcacctgtaataatacccagagaacagctttgctactgcgaaatcttggcttcactgccatccccctccatggacaaatgagtcagagtaagcgcctaggatcccttaataagtttaaggccaaggcccgttccattcttctagcaactgacgttgccagccgaggtttggacatacctcatgtagatgtggttgtcaactttgacattcctacccattccaaggattacatccatcgagtaggtcgaacagctagagctgggcgctccggaaaggctattacttttgtcacacagtatgatgtggaactcttccagcgcatagaacacttaattgggaagaaactaccaggttttccaacacaggatgatgaggttatgatgctgacagaacgcgtcgctgaagcccaaaggtttgcccgaatggagttaagggagcatggagaaaagaagaaacgctcgcgagaggatgctggagataatgatgacacagagggtgctattggtgtcaggaacaaggtggctggaggaaaaatgaagaagcggaaaggccgttaatcacttttatgaaggctcgagttctgctgttctgtaaaagagaattggagaatgaaacctgctccaacagagatcatgagactgaaattggtcagaattgtgtccagaatgtgctcagctaattcagtattcttccccattctgggttggagtttactgcagagtaattcttacagtgctgatgtcaagactgttactgttcttcgactttgattccttgctcatgacatgagtagggtgtgctcttctgtcacttcacacagaccttttgccttttttagctgcaagtcaaggactaggttgatgatgcccatgacctgtaattgtaaagaagcttggacatctgcaaatgatatttaaaccatcttggcttgtgctttattcaaactaatgtgaaacaataaatttaaatattatttttaaaagaaaataactccttaaaga

SEQ ID NO: 407907 - DNA, 1103 bp, Homo sapiens
agcggacttccggagacctcacacaagatggcggcacccgaggaacacgattctccgaccgaagcgtcccagccgattgtggaagaggaggaaactaaaacatttaaagacctgggtgtgacagatgtgttgtgtgaagcttgtgaccagttgggatggacaaaacccaccaagatccagattgaagctattcctttggccttacaaggtcgtgatatcattgggcttgcagaaactggctctggaaagacaggcgcctttgctttgcccattctaaacgcactgctggagaccccgcagcgtttgtttgccctagttcttaccccgactcgggagctggcctttcagatctcagagcagtttgaagccctggggtcctctattggagtgcagagtgctgtgattgtaggtggaattgattcaatgtctcaatctttggcccttgcaaaaaaaccacatataataatagcaactcctggtcgactgattgaccacttggaaaatacgaaaggtttcaacttgagagctctcaaatacttggtcatggatgaagccgaccgaatactgaatatggattttgagacagaggttgacaagatcctcaaagtgattcctcgagatcggaaaacattcctcttctctgccaccatgaccaagaaggttcaaaaacttcagcgagcagctctgaagaatcctgtgaaatgtgccgtttcctctaaataccagacagttgaaaaattacagcaatattatatttttattccctctaaattcaaggatacctacctggtttatattctaaatgaattggctggaaactcctttatgatattctgcagcacctgtaataatacccagagaacagctttgctactgcgaaatcttggcttcactgccatccccctccatggacaaatgagtcagagtaagcgcctaggatcccttaataagtttaaggccaaggcccgttccattcttctagcaactgacgttgccagccgaggtttggacatacctcatgtagatgtggttgtcaactttgacattcctacccattccaaggattacatccatcgagtaggaatgtcaaagttggcggccgc

SEQ ID NO: 407908 - DNA, 1303 bp, Homo sapiens
gtatttttagtagagatggggtttcagcatgttggccaggctggtctcgaactcctgacctcaagtgatctacctgccttggcctcccaaagtgctgggattacaggtgtgagccaccacatctggctcagcaaggtttcactctgttgaccaggctggagtgcagtgacttgatcatagctcactgcagcttcaaactcctgggctcaagtagtcctcatacctcagtctcctgaatggctgggattacaggcacatgccaccacggttggctaatttttaattttttatagagatggcatctcactgtgttgtccaggctggtctggaactcctggtctcaagtgattctcctgctttgacctcccaaagcgttgggattacaggtgcaagccaccatgcctggcctcccttgagtgattttctaatgggctatgcacagagattgcacttaacccatatttagaaaagaaataatatgttcaatattgtttaaacctatggttcctattgcgttgtatcatataataatagtttgggaatggacaggcatttgcgttaccaggcaaccagagctgtgcagttttccttcctcaggtatgatgtggaactcttccagcgcatagaacacttaattgggaagaaactaccaggttttccaacacaggatgatgaggttatgatgctgacagaacgcgtcgctgaagcccaaaggtttgcccgaatggagttaagggagcatggagaaaagaagaaacgctcgcgagaggatgctggagataatgatgacacagagggtgctattggtgtcaggaacaaggtggctggaggaaaaatgaagaagcggaaaggccgttaatcacttttatgaaggctcgagttctgctgttctgtaaaagagaattggagaatgaaacctgctccaacagagatcatgagactgaaattggtcagaattgtgtccagaatgtgctcagctaattcagtattcttccccattctgggttggagtttactgcagagtaattcttacagtgctgatgtcaagactgttactgttcttcgactttgattccttgctcatgacatgagtagggtgtgctcttctgtcacttcacacagaccttttgccttttttagctgcaagtcaaggactaggttgatgatgcccatgacctgtaattgtaaagaagcttggacatctgcaaatgatatttaaaccatcttggcttgtgctttattcaaactaatgtgaaacaataaatttaaatattatttttaaaagaaaataactccttaaaga

SEQ ID NO: 407909 - DNA, 406 bp, Homo sapiens
cttcctcaggtatgatgtggaactcttccagcgcatagaacacttaattgggaagaaactaccaggttttccaacacaggatgatgaggttatgatgctgacagaacgcgtcgctgaagcccaaaggtttgcccgaatggtatgcatctttcttttctcaccagtgtctgtgcaaacaatgttaactgtgtgccactttattatattaaccctcatactaaactgcagaagctgggtattattttattccaaatttaagacgagcaaactaaggtgcagagatggtaggtaatttgcattagaccatacaaccaaatggttgaatcaaggtttggcctcattctgacattcacacattcacagcacctgttcatgtgtcgcacgtggtgagatagttcatcagact

SEQ ID NO: 407910 - DNA, 1692 bp, Homo sapiens
agcggacttccggagacctcacacaagatggcggcacccgaggaacacgattctccgaccgaagcgtcccagccgattgtggaagaggaggaaactaaaacatttaaagacctgggtgtgacagatgtgttgtgtgaagcttgtgaccagttgggatggacaaaacccaccaagatccagattgaagctattcctttggccttacaaggtcgtgatatcattgggcttgcagaaactggctctggaaagacaggcgcctttgctttgcccattctaaacgcactgctggagaccccgcagcgtttgtttgccctagttcttaccccgactcgggagctggcctttcagatctcagagcagtttgaagccctggggtcctctattggagtgcagagtgctgtgattgtaggtggaattgattcaatgtctcaatctttggcccttgcaaaaaaaccacatataataatagcaactcctggtcgactgattgaccacttggaaaatacgaaaggtttcaacttgagagctctcaaatacttggtcatggatgaagccgaccgaatactgaatatggattttgagacagaggttgacaagatcctcaaagtgattcctcgagatcggaaaacattcctcttctctgccaccatgaccaagaaggttcaaaaacttcagcgagcagctctgaagaatcctgtgaaatgtgccgtttcctctaaataccagacagttgaaaaattacagcaatattatatttttattccctctaaattcaagagtaagcgcctaggatcccttaataagtttaaggccaaggcccgttccattcttctagcaactgacgttgccagccgaggtttggacatacctcatgtagatgtggttgtcaactttgacattcctacccattccaaggattacatccatcgagtaggtcgaacagctagagctgggcgctccggaaaggctattacttttgtcacacagtatgatgtggaactcttccagcgcatagaacacttaattgggaagaaactaccaggttttccaacacaggatgatgaggttatgatgctgacagaacgcgtcgctgaagcccaaaggtttgcccgaatggagttaagggagcatggagaaaagaagaaacgctcgcgagaggatgctggagataatgatgacacagagggtgctattggtgtcaggaacaaggtggctggaggaaaaatgaagaagcggaaaggccgttaatcacttttatgaaggctcgagttctgctgttctgtaaaagagaattggagaatgaaacctgctccaacagagatcatgagactgaaattggtcagaattgtgtccagaatgtgctcagctaattcagtattcttccccattctgggttggagtttactgcagagtaattcttacagtgctgatgtcaagactgttactgttcttcgactttgattccttgctcatgacatgagtagggtgtgctcttctgtcacttcacacagaccttttgccttttttagctgcaagtcaaggactaggttgatgatgcccatgacctgtaattgtaaagaagcttggacatctgcaaatgatatttaaaccatcttggcttgtgctttattcaaactaatgtgaaacaataaatttaaatattatttttaaaagaaaataactccttaaaga

SEQ ID NO: 407911 - DNA, 1812 bp, Homo sapiens
agcggacttccggagacctcacacaagatggcggcacccgaggaacacgattctccgaccgaagcgtcccagccgattgtggaagaggaggaaactaaaacatttaaagacctgggtgtgacagatgtgttgtgtgaagcttgtgaccagttgggatggacaaaacccaccaagatccagattgaagctattcctttggccttacaaggtcgtgatatcattgggcttgcagaaactggctctggaaagacaggcgcctttgctttgcccattctaaacgcactgctggagaccccgcagcgtttgtttgccctagttcttaccccgactcgggagctggcctttcagatctcagagcagtttgaagccctggggtcctctattggagtgcagagtgctgtgattgtaggtggaattgattcaatgtctcaatctttggcccttgcaaaaaaaccacatataataatagcaactcctggtcgactgattgaccacttggaaaatacgaaaggtttcaacttgagagctctcaaatacttggtcatggatgaagccgaccgaatactgaatatggattttgagacagaggttgacaagatcctcaaagtgattcctcgagatcggaaaacattcctcttctctgccaccatgaccaagaaggttcaaaaacttcagcgagcagctctgaagaatcctgtgaaatgtgccgtttcctctaaataccagacagttgaaaaattacagcaatattatatttttattccctctaaattcaaggatacctacctggtttatattctaaatgaattggctggaaactcctttatgatattctgcagcacctgtaataatacccagagaacagctttgctactgcgaaatcttggcttcactgccatccccctccatggacaaatgagtcagagtaagcgcctaggatcccttaataagtttaaggccaaggcccgttccattcttctagcaactgacgttgccagccgaggtttggacatacctcatgtagatgtggttgtcaactttgacattcctacccattccaaggattacatccatcgagtaggtcgaacagctagagctgggcgctccggaaaggctattacttttgtcacacagtatgatgtggaactcttccagcgcatagaacacttaattgggaagaaactaccaggttttccaacacaggatgatgaggttatgatgctgacagaacgcgtcgctgaagcccaaaggtttgcccgaatggagttaagggagcatggagaaaagaagaaacgctcgcgagaggatgctggagataatgatgacacagagggtgctattggtgtcaggaacaaggtggctggaggaaaaatgaagaagcggaaaggccgttaatcacttttatgaaggctcgagttctgctgttctgtaaaagagaattggagaatgaaacctgctccaacagagatcatgagactgaaattggtcagaattgtgtccagaatgtgctcagctaattcagtattcttccccattctgggttggagtttactgcagagtaattcttacagtgctgatgtcaagactgttactgttcttcgactttgattccttgctcatgacatgagtagggtgtgctcttctgtcacttcacacagaccttttgccttttttagctgcaagtcaaggactaggttgatgatgcccatgacctgtaattgtaaagaagcttggacatctgcaaatgatatttaaaccatcttggcttgtgcgtatacactgatgaacatattattctcccctctcctctcg

SEQ ID NO: 407912 - DNA, 1495 bp, Homo sapiens
agcggacttccggagacctcacacaagatggcggcacccgaggaacacgattctccgaccgaagcgtcccagccgattgtggaagaggaggaaactaaaacatttaaagacctgggtgtgacagatgtgttgtgtgaagcttgtgaccagttgggatggacaaaacccaccaagatccagattgaagctattcctttggccttacaaggtcgtgatatcattgggcttgcagaaactggctctggaaagacaggcgcctttgctttgcccattctaaacgcactgctggagaccccgcagcgtttgtttgccctagttcttaccccgactcgggagctggcctttcagatctcagagcagtttgaagccctggggtcctctattggagtgcagagtgctgtgattgtaggtggaattgattcaatgtctcaatgatacctacctggtttatattctaaatgaattggctggaaactcctttatgatattctgcagcacctgtaataatacccagagaacagctttgctactgcgaaatcttggcttcactgccatccccctccatggacaaatgagtcagagtaagcgcctaggatcccttaataagtttaaggccaaggcccgttccattcttctagcaactgacgttgccagccgaggtttggacatacctcatgtagatgtggttgtcaactttgacattcctacccattccaaggattacatccatcgagtaggtcgaacagctagagctgggcgctccggaaaggctattacttttgtcacacagtatgatgtggaactcttccagcgcatagaacacttaattgggaagaaactaccaggttttccaacacaggatgatgaggttatgatgctgacagaacgcgtcgctgaagcccaaaggtttgcccgaatggagttaagggagcatggagaaaagaagaaacgctcgcgagaggatgctggagataatgatgacacagagggtgctattggtgtcaggaacaaggtggctggaggaaaaatgaagaagcggaaaggccgttaatcacttttatgaaggctcgagttctgctgttctgtaaaagagaattggagaatgaaacctgctccaacagagatcatgagactgaaattggtcagaattgtgtccagaatgtgctcagctaattcagtattcttccccattctgggttggagtttactgcagagtaattcttacagtgctgatgtcaagactgttactgttcttcgactttgattccttgctcatgacatgagtagggtgtgctcttctgtcacttcacacagaccttttgccttttttagctgcaagtcaaggactaggttgatgatgcccatgacctgtaattgtaaagaagcttggacatctgcaaatgatatttaaaccatcttggcttgtgctttattcaaactaatgtgaaacaataaatttaaatattatttttaaaagaaaataactccttaaaga

SEQ ID NO: 407913 - DNA, 1272 bp, Homo sapiens
ggagacggcatgaatcgagctcggtaccatctcgtgctgggattacaggcacaagccacctgcctggccgatttttgtttctttttctttttttaagcagcaaggtttcactctgttgaccaggctggagtgcagtgacttgatcatagctcactgcagcttcaaactcctgggctcaagtagtcctcatacctcagtctcctgaatggctgggattacaggcacatgccaccacggttggctaatttttaattttttatagagatggcatctcactgtgttgtccaggctggtctggaactcctggtctcaagtgattctcctgctttgacctcccaaagcgttgggattacaggtgcaagccaccatgcctggcctcccttgagtgattttctaatgggctatgcacagagattgcacttaacccatatttagaaaagaaataatatgttcaatattgtttaaacctatggttcctattgcgttgtatcatataataatagtttgggaatggacaggcatttgcgttaccaggcaaccagagctgtgcagttttccttcctcaggtatgatgtggaactcttccagcgcatagaacacttaattgggaagaaactaccaggttttccaacacaggatgatgaggttatgatgctgacagaacgcgtcgctgaagcccaaaggtttgcccgaatggagttaagggagcatggagaaaagaagaaacgctcgcgagaggatgctggagataatgatgacacagagggtgctattggtgtcaggaacaaggtggctggaggaaaaatgaagaagcggaaaggccgttaatcacttttatgaaggctcgagttctgctgttctgtaaaagagaattggagaatgaaacctgctccaacagagatcatgagactgaaattggtcagaattgtgtccagaatgtgctcagctaattcagtattcttccccattctgggttggagtttactgcagagtaattcttacagtgctgatgtcaagactgttactgttcttcgactttgattccttgctcatgacatgagtagggtgtgctcttctgtcacttcacacagaccttttgccttttttagctgcaagtcaaggactaggttgatgatgcccatgacctgtaattgtaaagaagcttggacatctgcaaatgatatttaaaccatcttggcttgtgctttattcaaactaatgtgaaacaataaatttaaatattatttttaaaagaaaataactccttaaaga

SEQ ID NO: 407914 - DNA, 1300 bp, Homo sapiens
atctctccttaatcagccataaagcaaggaaaaggcaaagcgctattcacatagtgtgggcacactgtccttgatttctctgagaagatggtttgagtgcgagcctccgtagaggagagagtgttgaggtgcccacctttgagtgtttgtgtgagcccctgaaggtggaaagtgctatgtaagtgctgagctattcagcttcccaggcgagagaagatgcttatcttattcatccctcttttatttgtaaaatcttttttgtctcttgacaggtgatcttttttttttcctggaaaccaattagctactaaaattaaacatgcttctctttaaattaatccttttcataaaatggtcttaaaattggccttagcttctcagagtaagtagctgaccccattgtaattagagatgcgtttggagtcctcatttctcccacctcggcattcctctgcccttccccctgctgctgccaggtgctgtccaccttcgggctttcggcgccaccggcctcatcttggcaaaggtcagatgtcggctctgggacagccgtcagattatctagttctgctgcccaagtgcactgacagcaactggcagagttgtaatcactgtaaattcaggtgacggtcagatgagccaggagagaggatgcctgctggttgtttttttgcagtgatgtattgtttatgggattaatgttccgaatggccaagggtgtcagctgatatttattactgtaagctgtctcagctgttcaggttcggcagctagatccatggccacaggaaatgtgggactcggtggcatgtccagtatggctgatgtgtgcagatgtagctgggacctccgtgagcctctgttacagatgcaaggggaaggactcatggcagcagctgccttggattttgttcagggcttctgagggaactccacacactcttgaaggttggggagactctagggaaggggagagtgtccaggtttggctccaaagggggttgggaaggagttcacctctgacaggcctggcatccgtagaaattatgctgcctgccaggtagctgtaggcattgtgtgatttttaccttggtccctcttcagccttctaagagagggcgctttcaaggtcattgtgcctttaagggaaccttctccccagtccctctggatgctggtgcttaaagctataagaagcgggccagacccttttaaacctatctggagtgctgcaggaagagaagtaaatgcacatcgccctggtgtgtgcctcgcaacactcactgcagtaggtttgttt

SEQ ID NO: 407915 - DNA, 647 bp, Homo sapiens
  misc_feature (246)..(246): n is a, c, g, or t
  misc_feature (259)..(259): n is a, c, g, or t
gcaaaatcaggttttctgattccaaatcccgtgttcattcagctgcatcaggaatcaggccattccgctcctagtattagcagcaataacaaaacaggaacagcagctgatgtgtatttggtgctgtaccatgtgccagtctctttaaaaatattatctctcagggtagatgctagcattctattttacatccccgagaaaacttaaaattatcagggttaaataactttccaagatcacacagcnagtatatccacanagcaagtatttgaaccaggtttggctgagtctagagacgatgttcttaatatgccactttgctagagtggcctttgaagtgctctttgaaagacagtttgtaagatgaaaatattcttttagatatatttattgagattttagtcagaaatggatttcttgcccattaaaagcactagtgccctacaaagtgctctattaaagtcctatttttcaggcacaacagatggaggacagatgtttctttatgctctgaaaggtccactttatgtagctgactataataagattgtatctggttccgaatgtttcagagaaatggtatcaggcagatcattgtaaatgaaagccaaatcaaaggcattattgcacagatttgatagaaaaaa

SEQ ID NO: 407916 - DNA, 2235 bp, Homo sapiens
  misc_feature (1)..(1): n is a, c, g, or t
  misc_feature (3)..(3): n is a, c, g, or t
  misc_feature (9)..(10): n is a, c, g, or t
  misc_feature (20)..(20): n is a, c, g, or t
  misc_feature (226)..(226): n is a, c, g, or t
ngnagaganntgaccccctngggggcgctgcctctccctcactcacacactgcacgtcaccctgtttggccccggtggatggctggttagccagagacgggtaagattcctcagggaaggaacaacctaagacaggcacagtcgcagaggggccatcaggagagaacttgggggcaacagaggtggggcatggaccctcacccccacaatcctacaggggcctganccctcacaccttctgagggaggtctcctgcccccatggctgctttgcttcccacgcccagttcagatcgggacccaggtagcagacagagacctggccaacagcaagtgcccactcaccacagcaaggatttgtttctcatttctaccttggaccacagggatggggcagctgaaagaaagggctgtgtcagggtgtctttctcccttttctccctcatttttctagatgcttttttgccttgtagttctttctctttttctttgctttctctttcctttttctgtctgtctcctatacctcccatctctcccttgcccctgccccatcttgcctttttctctttttcctccttttcctttcttattcctttgcctctcctcttcctgagccccacctgctcatctccctgccccaacatcctgtgccatccctgtggtgtgtttgggtcttggccaaagccagacctggcagaactgatggatacctggtgaggcagcggagcccctgggctcccaccccattccctcctcccggggctgcacaggtgagtaggtggaaggtaaggggggcagggaggggaaagaggtcctgggcttaaagcctgggcttggagtactgctccttgacactcagggtcaggcagagagaaaagagacagccttcaaggcagtccatgtctgggtgccccgggtcaggtggggagtgggggccatttttccctgagcacaggctgggagggagtggagggatgagcaggatgggatgggctgtccctcgggtttggtatatttgctcctagagcagcccaggaggcacggtggctctgaagcatcactcacttctgtcccgttcttgacagcgccattcgcgaacgatttcccaagttactacgcctggatggccatgagctacccccaccaattgcctttgatgttgaagcccccacgacgttaccgccctgcaagggaagctattttggaacagaaaacttgaagagtctggtcttgcacttcctgcaacagtactatgcaatttacgactctggagaccggcaagggctcctggatgcctaccatgatggggcctgctgttccctgagcattcctttcattcctcagaaccctgcccgaagcagcttagccgagtatttcaaggatagcagaaatgtgaagaagcttaaagaccctaccttgcggttccggctgctgaagcacacgcgtctcaacgttgttgccttcctcaatgagttgcccaaaacccagcacgacgtcaattccttcgtggtagacataagcgcccagacaagcacattgctgtgtttttctgtcaatggagtcttcaaggaagtggacggaaagtcccgggattctttgcgagccttcacccggacattcattgctgttcctgctagcaattcagggctatgtattgtaaatgatgagctatttgtgcggaatgccagttctgaagagatccaaagagccttcgctatgcctgcacccacgccttcctccagcccggtgcccaccctctctccagagcagcaggaaatgttgcaagcattctctacccagtctggcatgaacctcgagtggtcccagaagtgccttcaggacaacaactgggactacaccagatctgcccaggccttcactcatctcaaggccaagggcgagatcccagaagtggcattcatgaagtgatcgtagtcatgcctcagaagcagtcccccctgtaaatagtccttggatattaccgtctggttgtcgtctgtcatctcctcctgtctggcccgaggccgccccgtgactgtgaccgagggagggagggctgcctgatccctctcctcgcctgccttctggaagacttcagaagattgagcctccctggtgccaggaagccaaagcttactttgtagaactgacactaaactacccgaaggacttaggtgctttgtgtacttaaccccaggacctccttactttttaatataaagagtgatgttgt

SEQ ID NO: 407917 - DNA, 1490 bp, Homo sapiens
  misc_feature (1)..(1): n is a, c, g, or t
  misc_feature (3)..(3): n is a, c, g, or t
  misc_feature (9)..(10): n is a, c, g, or t
  misc_feature (20)..(20): n is a, c, g, or t
  misc_feature (226)..(226): n is a, c, g, or t
  misc_feature (1456)..(1457): n is a, c, g, or t
ngnagaganntgaccccctngggggcgctgcctctccctcactcacacactgcacgtcaccctgtttggccccggtggatggctggttagccagagacgggtaagattcctcagggaaggaacaacctaagacaggcacagtcgcagaggggccatcaggagagaacttgggggcaacagaggtggggcatggaccctcacccccacaatcctacaggggcctganccctcacaccttctgagggaggtctcctgcccccatggctgctttgcttcccacgcccagttcagatcgggacccaggtagcagacagagacctggccaacagcaagtgcccactcaccacagcaaggatttgtttctcatttctaccttggaccacagggatggggcagctgaaagaaagggctgtgtcagggtgtctttctcccttttctccctcatttttctagatgcttttttgccttgtagttctttctctttttctttgctttctctttcctttttctgtctgtctcctatacctcccatctctcccttgcccctgccccatcttgcctttttctctttttcctccttttcctttcttattcctttgcctctcctcttcctgagccccacctgctcatctccctgccccaacatcctgtgccatccctgtggtgtgtttgggtcttggccaaagccagacctggcagaactgatggatacctggtgaggcagcggagcccctgggctcccaccccattccctcctcccggggctgcacaggtgagtaggtggaaggtaaggggggcagggaggggaaagaggtcctgggcttaaagcctgggcttggagtactgctccttgacactcagggtcaggcagagagaaaagagacagccttcaaggcagtccatgtctgggtgccccgggtcaggtggggagtgggggccatttttccctgagcacaggctgggagggagtggagggatgagcaggatgggatgggctgtccctcgggtttggtatatttgctcctagagcagcccaggaggcacggtggctctgaagcatcactcacttctgtcccgttcttgacagcgccattcgcgaacgatttcccaagttactacgcctggatggccatgagctacccccaccaattgcctttgatgttgaagcccccacgacgttaccgccctgcaagggaagctattttggaacagaaaacttgaagagtctggtcttgcacttcctgcaacagtactatgcaatttacgactctggagaccggcaagggctcctggatgcctaccatgatggggcctgctgttccctgagcattcctttcattcctcagaaccctgcccgaagcagcttagccgagtatttcaaggatagcagaaatgtgaagaagcttaaagaccctaccttgcggttccggctgctgaagcacacgcgtcgctatgnngaggccgtcctcatttttttttttttttttttt

SEQ ID NO: 407918 - DNA, 2164 bp, Homo sapiens
atggcggacgaggggaagtcgtacagcgaacacgatgatgaacgcgttaatttccctcaaagaaagaagaaaggccggggtcccttccggtggaaatatggtgaaggaaaccgtaggtctggaagaggcggttctggtattcggtcttcccgccttgaggaagatgatggagatgtggcaatgagtgatgcccaggatggtccccgagtacgatacaacccctataccacccgacctaaccgtcggggtgatacttggcatgatcgagatcgcattcatgttactgtgcggagagacagagctcctccagagagaggaggggctggcaccagccaggatgggacctcaaagaactggttcaagattacaattccttatggcagaaagtatgacaaggcatggctcctgagcatgattcagagcaagtgcagtgtgcccttcacccctattgagtttcactatgagaatacacgggcccagttcttcgttgaagacgccagtactgcctctgcattgaaggctgtcaactataagattttggatcgggagaaccgaaggatatctatcatcatcaactcttctgctccaccccacactatactgaatgaactgaagccagaacaagtagaacagctaaagctgatcatgagcaaacgatacgatggctcccaacaagcccttgacctcaaaggcctccgttcagacccagatttggtggcccagaacattgacgttgtcctgaatcgcagaagctgtatggcagctaccctgaggatcattgaagagaacatccctgagctattgtccttgaacttgagcaacaacaggctgtacaggctggatgacatgtctagcattgttcagaaggcacccaacctgaagatcctaaacctttctggaaatgaattgaagtctgagcgggaattggacaagataaaggggctgaagctagaagagctctggctcgatggaaactccctgtgtgacaccttccgagaccagtccacctacatcagcgccattcgcgaacgatttcccaagttactacgcctggatggccatgagctacccccaccaattgcctttgatgttgaagcccccacgacgttaccgccctgcaagggaagctattttggaacagaaaacttgaagagtctggtcttgcacttcctgcaacagtactatgcaatttacgactctggagaccggcaagggctcctggatgcctaccatgatggggcctgctgttccctgagcattcctttcattcctcagaaccctgcccgaagcagcttagccgagtatttcaaggatagcagaaatgtgaagaagcttaaagaccctaccttgcggttccggctgctgaagcacacgcgtctcaacgttgttgccttcctcaatgagttgcccaaaacccagcacgacgtcaattccttcgtggtagacataagcgcccagacaagcacattgctgtgtttttctgtcaatggagtcttcaaggaagtggacggaaagtcccgggattctttgcgagccttcacccggacattcattgctgttcctgctagcaattcagggctatgtattgtaaatgatgagctatttgtgcggaatgccagttctgaagagatccaaagagccttcgctatgcctgcacccacgccttcctccagcccggtgcccaccctctctccagagcagcaggaaatgttgcaagcattctctacccagtctggcatgaacctcgagtggtcccagaagtgccttcaggacaacaactgggactacaccagatctgcccaggccttcactcatctcaaggccaagggcgagatcccagaagtggcattcatgaagtgatcgtagtcatgcctcagaagcagtcccccctgtaaatagtccttggatattaccgtctggttgtcgtctgtcatctcctcctgtctggcccgaggccgccccgtgactgtgaccgagggagggagggctgcctgatccctctcctcgcctgccttctggaagacttcagaagattgagcctccctggtgccaggaagccaaagcttactttgtagaactgacactaaactacccgaaggacttaggtgctttgtgtacttaaccccaggacctccttactttttaatataaagagtgatgttgt

SEQ ID NO: 407919 - DNA, 1419 bp, Homo sapiens
  misc_feature (1385)..(1386): n is a, c, g, or t
atggcggacgaggggaagtcgtacagcgaacacgatgatgaacgcgttaatttccctcaaagaaagaagaaaggccggggtcccttccggtggaaatatggtgaaggaaaccgtaggtctggaagaggcggttctggtattcggtcttcccgccttgaggaagatgatggagatgtggcaatgagtgatgcccaggatggtccccgagtacgatacaacccctataccacccgacctaaccgtcggggtgatacttggcatgatcgagatcgcattcatgttactgtgcggagagacagagctcctccagagagaggaggggctggcaccagccaggatgggacctcaaagaactggttcaagattacaattccttatggcagaaagtatgacaaggcatggctcctgagcatgattcagagcaagtgcagtgtgcccttcacccctattgagtttcactatgagaatacacgggcccagttcttcgttgaagacgccagtactgcctctgcattgaaggctgtcaactataagattttggatcgggagaaccgaaggatatctatcatcatcaactcttctgctccaccccacactatactgaatgaactgaagccagaacaagtagaacagctaaagctgatcatgagcaaacgatacgatggctcccaacaagcccttgacctcaaaggcctccgttcagacccagatttggtggcccagaacattgacgttgtcctgaatcgcagaagctgtatggcagctaccctgaggatcattgaagagaacatccctgagctattgtccttgaacttgagcaacaacaggctgtacaggctggatgacatgtctagcattgttcagaaggcacccaacctgaagatcctaaacctttctggaaatgaattgaagtctgagcgggaattggacaagataaaggggctgaagctagaagagctctggctcgatggaaactccctgtgtgacaccttccgagaccagtccacctacatcagcgccattcgcgaacgatttcccaagttactacgcctggatggccatgagctacccccaccaattgcctttgatgttgaagcccccacgacgttaccgccctgcaagggaagctattttggaacagaaaacttgaagagtctggtcttgcacttcctgcaacagtactatgcaatttacgactctggagaccggcaagggctcctggatgcctaccatgatggggcctgctgttccctgagcattcctttcattcctcagaaccctgcccgaagcagcttagccgagtatttcaaggatagcagaaatgtgaagaagcttaaagaccctaccttgcggttccggctgctgaagcacacgcgtcgctatgnngaggccgtcctcatttttttttttttttttttt

SEQ ID NO: 407920 - DNA, 1353 bp, Homo sapiens
atggcggacgaggggaagtcgtacagcgaacacgatgatgaacgcgttaatttccctcaaagaaagaagaaaggccggggtcccttccggtggaaatatggtgaaggaaaccgtaggtctggaagaggcggttctggtattcggtcttcccgccttgaggaagatgatggagatgtggcaatgagtgatgcccaggatggtccccgagtacgatacaacccctataccacccgacctaaccgtcggggtgatacttggcatgatcgagatcgcattcatgttactgtgcggagagacagagctcctccagagagaggaggggctggcaccagccaggatgggacctcaaagaactggttcaagattacaattccttatggcagaaagtatgacaaggcatggctcctgagcatgattcagagcaagtgcagtgtgcccttcacccctattgagtttcactatgagaatacacgggcccagttcttcgttgaagacgccagtactgcctctgcattgaaggctgtcaactataagattttggatcgggagaaccgaaggatatctatcatcatcaactcttctgctccaccccacactatactgaatgaactgaagccagaacaagtagaacagctaaagctgatcatgagcaaacgatacgatggctcccaacaagcccttgacctcaaaggcctccgttcagacccagatttggtggcccagaacattgacgttgtcctgaatcgcagaagctgtatggcagctaccctgaggatcattgaagagaacatccctgagctattgtccttgaacttgagcaacaacaggctgtacaggctggatgacatgtctagcattgttcagaaggcacccaacctgaagatcctaaacctttctggaaatgaattgaagtctgagcgggaattggacaagataaaggggctgaagctagaagagctctggctcgatggaaactccctgtgtgacaccttccgagaccagtccacctacatcagcgccattcgcgaacgatttcccaagttactacgcctggatggccatgagctacccccaccaattgcctttgatgttgaagcccccacgacgttaccgccctgcaagggaagctattttggaacagaaaacttgaagagtctggtcttgcacttcctgcaacagtactatgcaatttacgactctggagaccggcaagggctcctggatgcctaccatgatggggcctgctgttccctgagcattcctttcattcctcagaaccctgcccgaagcagcatagcctcttcttcctttgtaaatgataattcactgctagcctcccccaaccccccctgc

SEQ ID NO: 407921 - DNA, 2056 bp, Homo sapiens
atggcggacgaggggaagtcgtacagcgaacacgatgatgaacgcgttaatttccctcaaagaaagaagaaaggccggggtcccttccggtggaaatatggtgaaggaaaccgtaggtctggaagaggcggttctggtattcggtcttcccgccttgaggaagatgatggagatgtggcaatgagtgatgcccaggatggtccccgagtacgatacaacccctataccacccgacctaaccgtcggggtgatacttggcatgatcgagatcgcattcatgttactgtgcggagagacagagctcctccagagagaggaggggctggcaccagccaggatgggacctcaaagaactggttcaagattacaattccttatggcagaaagtatgacaaggcatggctcctgagcatgattcagagcaagtgcagtgtgcccttcacccctattgagtttcactatgagaatacacgggcccagttcttcgttgaagacgccagtactgcctctgcattgaaggctgtcaactataagattttggatcgggagaaccgaaggatatctatcatcatcaactcttctgctccaccccacactatactgaatgaactgaagccagaacaagtagaacagctaaagctgatcatgagcaaacgatacgatggctcccaacaagcccttgacctcaaaggcctccgttcagacccagatttggtggcccagaacattgacgttgtcctgaatcgcagaagctgtatggcagctaccctgaggatcattgaagagaacatccctgagttgaagtctgagcgggaattggacaagataaaggggctgaagctagaagagctctggctcgatggaaactccctgtgtgacaccttccgagaccagtccacctacatcagcgccattcgcgaacgatttcccaagttactacgcctggatggccatgagctacccccaccaattgcctttgatgttgaagcccccacgacgttaccgccctgcaagggaagctattttggaacagaaaacttgaagagtctggtcttgcacttcctgcaacagtactatgcaatttacgactctggagaccggcaagggctcctggatgcctaccatgatggggcctgctgttccctgagcattcctttcattcctcagaaccctgcccgaagcagcttagccgagtatttcaaggatagcagaaatgtgaagaagcttaaagaccctaccttgcggttccggctgctgaagcacacgcgtctcaacgttgttgccttcctcaatgagttgcccaaaacccagcacgacgtcaattccttcgtggtagacataagcgcccagacaagcacattgctgtgtttttctgtcaatggagtcttcaaggaagtggacggaaagtcccgggattctttgcgagccttcacccggacattcattgctgttcctgctagcaattcagggctatgtattgtaaatgatgagctatttgtgcggaatgccagttctgaagagatccaaagagccttcgctatgcctgcacccacgccttcctccagcccggtgcccaccctctctccagagcagcaggaaatgttgcaagcattctctacccagtctggcatgaacctcgagtggtcccagaagtgccttcaggacaacaactgggactacaccagatctgcccaggccttcactcatctcaaggccaagggcgagatcccagaagtggcattcatgaagtgatcgtagtcatgcctcagaagcagtcccccctgtaaatagtccttggatattaccgtctggttgtcgtctgtcatctcctcctgtctggcccgaggccgccccgtgactgtgaccgagggagggagggctgcctgatccctctcctcgcctgccttctggaagacttcagaagattgagcctccctggtgccaggaagccaaagcttactttgtagaactgacactaaactacccgaaggacttaggtgctttgtgtacttaaccccaggacctccttactttttaatataaagagtgatgttgt

SEQ ID NO: 407922 - DNA, 1017 bp, Homo sapiens
gcctcagcctccccagtagctgggactacaggtactatgcaatttacgactctggagaccggcaagggctcctggatgcctaccatgatggggcctgctgttccctgagcattcctttcattcctcagaaccctgcccgaagcagcttagccgagtatttcaaggatagcagaaatgtgaagaagcttaaagaccctaccttgcggttccggctgctgaagcacacgcgtctcaacgttgttgccttcctcaatgagttgcccaaaacccagcacgacgtcaattccttcgtggtagacataagcgcccagacaagcacattgctgtgtttttctgtcaatggagtcttcaaggaagtggacggaaagtcccgggattctttgcgagccttcacccggacattcattgctgttcctgctagcaattcagggctatgtattgtaaatgatgagctatttgtgcggaatgccagttctgaagagatccaaagagccttcgctatgcctgcacccacgccttcctccagcccggtgcccaccctctctccagagcagcaggaaatgttgcaagcattctctacccagtctggcatgaacctcgagtggtcccagaagtgccttcaggacaacaactgggactacaccagatctgcccaggccttcactcatctcaaggccaagggcgagatcccagaagtggcattcatgaagtgatcgtagtcatgcctcagaagcagtcccccctgtaaatagtccttggatattaccgtctggttgtcgtctgtcatctcctcctgtctggcccgaggccgccccgtgactgtgaccgagggagggagggctgcctgatccctctcctcgcctgccttctggaagacttcagaagattgagcctccctggtgccaggaagccaaagcttactttgtagaactgacactaaactacccgaaggacttaggtgctttgtgtacttaaccccaggacctccttactttttaatataaagagtgatgttgt

SEQ ID NO: 407923 - DNA, 398 bp, Homo sapiens
gagtagaatattttacagctcaaaactggaagagcttaataataaatgtgagacaaataatacacggaccctatcttagtaaagaaagtcatcatcatcctcagatgcctttagaaaagactcttttcatctagcataatagtatactattaacaagtttatctagtttaatctgggcataacatgtgaaaatgtcatttttccaatgatagaaacagaattgtattgttttcaccaagaaacaaacatatgtttcagtaaaaaagagaaaattgaactgctttcctttaagtacctataaaaattttaacgtaagattataagtaaaatgaggcttgttaagcttctagaaatcagattaagatatttaaaataaaaacataactgtgggtctcagg

SEQ ID NO: 407924 - DNA, 270 bp, Homo sapiens
gcccgaagcctgaacaggtgaagtgacttttcctaaggtcgcacggccagtaagcggcaaagcacaagtgccctgtcttccagtctggtgttccttccaccacaccacactgccaggaggtgtgtgtgtgtgtgtgcgtgtttgtttgtttgtttagtgggaaacaaatttcgtgttgccctaggtcttcctgggatatggggacaaatacagtaagaataatccttcccaatcttcttgccccaaataaagatgaactgtctatgggca

SEQ ID NO: 407925 - DNA, 1056 bp, Homo sapiens
gtgggagtatataaaaggctaatgtctatctcacgacagatagaaattaaattcagataaatgaataagcaaaaaactatagaaaagttagaacaaaatacaggatttatatatttttggtaaaataggcacaaaactcaggaaccagtaagaattaaaacagaagcacattaaggaaaaataaaactccatatgataaaagacaccataaacaaagttaaaaacataccaacattggaggaaatatgtttaatatagaaataaaagattgaagagcatgtgtgtctgtgcatgcatgcatgtgcatatttggtgtaaggttttcaaaagaataaaatagatgttactgtccctacagaaccccaaatgattcagaaaattaaccagacactgaaaaaagtatggagaaaaggggaagaagacaagaaggtaatgaaatgaagacagaacgtttagaagaaggtatacttaatgaatcgtgagaaatcttcaactttcccgcccagctatggggatttcagaagctaggtgtccattccccaagtaaataaaattatccttttctaaacaaactgcttggctcaggaataagatataaggttactatcactgggaatccaccagcaaaaagagtggccacatgattacactactgtgaaacaccataggccaactgacaatgccccatacaaaacacacagtgcttccatatgcttgtgttttgttttgtttgtttgtttgtttgtttgtttgtttttgagacagggtctcgctctgtcacccaggctggagtgcaatgtcacgatctcagctaactgcaacttctgccttccaggttcaagcaattctcctacctcagcctcctgagaagaatggcgtgaacccaggaggtggagcttgcagtgagccgagatcgagccactgcactccaccctgggggagagagggagactctgtctcaaaaaaaaaaataataataatctgatggaagatgttaaaaatccaatacaagggtcaaggaaatacctcaaaaagccagacaaagtctaagatatg

SEQ ID NO: 407926 - DNA, 772 bp, Homo sapiens
agacagagtctcgctctgtcacccaggctggaatgcagtggcatgatctcaactcactgcaacttccacctcctgagttcaagcaattttcctgcctcagcctcctgagaagttaggattacaggtgtggtggcgggtgcctgtaatcccagctacctgggaggctgaggcgggagaatcgcctgaacctgggaggtggagattgcagagagtcaagattccagcctgggtaacagagagagactccatctcaaaaaaaaaaaagaaaatgtgagtgtgggagctacctgctgcctggatgtcagtttgacagcactggtagtggtagtaatggagtgagtgctgcattgagtgcttcctgtgtacctaagcattatgatgagggctttatagacacttttcattctcaaaacaagctgaagagaggttaccacattttacagagtataagactgaaactgtataattagttcaagatcacgtagtaagatacagagctggaatttgaatatagtctgttaattccaaaactggtattcttaagtgttgataaagaatttcttcatgagcaccgcagatattggtcctggaagaaattttggcctcaaaggcagctctctcccacctggatactttttgtccctacagatagtaaactgtaacattaaaattaaatctgtaattggttatacagtaataatgtcacgggcacagtacttaatgtaacatgcctttttgagaaatgtctttgacttagagcaataggaatcta

SEQ ID NO: 407927 - DNA, 770 bp, Homo sapiens
aggggtcaggtgaggttgcagtggggttagtcggtcaatagtttctttatgccaattaggatttctgcagaaaacaatgaaatactggtttaaacagtaaaaatattttaattccttacagaagcccatggaacatacactccaggtttaattcatcagctcaatagcatcatcaatgacttaggttctttccactttctgcttgtcatctgtgttggctttattttcaagctagctcctccctggttgcaagataattgcagcaggtttagttatcatattcggacatgctaacgcccagggtagtgatcccttccttgcatttctttctcattttaagaacaaagtgtttaaaaaattatacttaaaattattggcatctctgtcaattgaaagatgtcaatctctttcatttttcctaatcactaataacatctactaaaaacaaaatgtctgtgtaaataatttatttgaataaaattaaagttgttgagtgagctcggcttttgaggagtgggaaaggaggggtgcatagattagtggaagatgagaagctagtggggctcaagtccagcaggagcaggagtttggagccaggacttcctagcctctcagggtttttttttaacttccttacctgaaatgatttgtgctatataacttgtcctggctaaactttcttaatctcaactgtttcatttaatcaataacaactactgcgccaccttcataatatcaattttcagcatttcatttactgaatatcattt

SEQ ID NO: 407928 - DNA, 2890 bp, Homo sapiens
ggcggagaggtccggcgggaggcggaggcggaggcgcaggcgctggctggcaggtgtcgctaaccggacggtggtcgccagggcgagaggcgggagccggagaggtgaggcaggacccgggctccactgccgcctctccgagctcttgtgacgcggacctcagtgccaggatggctcggggcgagcggcggcgccgcgcagtgccggcagagggagtgcggacagccgagagggcggctcggggaggccccgggcgacgggacggccggggcggcgggccgcgtagcacggctggaggagtggctctggccgtcgtggtcctgtctttggccctgggtatgtcggggcgctgggtgctggcgtggtaccgtgcgcggcgggcggtcacgctgcactccgcgcctcctgtgttgcctgccgactcctccagccccgccgtggccccggacctcttctggggaacctaccgccctcacgtctacttcggcatgaagacccgcagcccgaagcccctcctcaccggactgatgtgggcgcagcagggcaccaccccggggactcctaagctcaggcacacgtgtgagcagggggacggtgtgggtccctatggctgggagttccacgacggcctctccttcgggcgccaacacatccaggatggggccttaaggctcaccactgagttcgtcaagaggcctgggggtcagcacggaggggactggagctggagagtgactgtagagcctcaggactcaggtacttctgccctccctttggtctccctgttcttctatgtggtgacagatggcaaggaagtcctactaccagaggttggggccaaggggcagttgaagtttatcagtgggcacaccagtgaacttggtgacttccgctttacacttttgccaccaaccagtccaggggatacagcccccaagtatggcagctacaatgtcttctggacctccaacccaggactgcccctgctgacagagatggtaaagagtcgcctaaatagctggtttcagcatcggcccccaggggccccccctgaacgctacctcggcttgccaggatccctgaagtgggaggacagaggtccaagtgggcaagggcaggggcagttcttgatacagcaggtgaccctgaaaattcccatttccatagagtttgtgtttgaatcaggcagtgcccaggcaggaggaaatcaagccctgccaagactggcaggcagtctactgacccaggccctggagagccatgctgaaggctttagagagcgctttgagaagaccttccagctgaaggagaagggcctgagctctggcgagcaggttttgggtcaggctgccctcagcggcctccttggtggaattggctacttctacggacaagggctggtattgccagacatcggggtggaagggtctgagcagaaggtggacccagccctctttccacccgtacctctttttacagcagtgccctcccggtcattcttcccacgaggcttcctttgggatgaaggctttcaccagctggtggttcagcggtgggatccctccctcacccgggaagcccttggccactggctggggctgctaaatgctgatggctggattgggagggagcagatactgggggatgaggcccgagcccgggtgcctccagaattcctagtacaacgagcagtccacgccaaccccccaaccctacttttgcctgtagcccatatgctagaggttggtgaccctgacgacttggctttcctccgaaaggccttgccccgcctgcatgcctggttttcctggctccatcagagccaggcaggcccactgccactatcttaccgctggcggggacgggaccctgccttaccaaccttactgaaccccaagaccctaccctctgggctggatgactacccccgggcttcacacccttcagtaaccgagcggcacctggacctgcgatgttgggtggcactgggtgcccgtgtgctgacgcggctggcagagcatctgggtgaggctgaggtagctgctgagctgggcccactggctgcctcactggaggcagcagagagcctggatgagctgcactgggccccagagctaggagtctttgcagactttgggaaccacacaaaagcagtacagctgaagcccaggccccctcaggggctcgttcgggtggtgggtcggccccaacctcaactgcagtatgtagatgctcttggctatgtcagtctttttcccttgctgctgcgactgctggaccccacctcatcccgccttgggcccctgctggacattctagccgacagccgccatctctggagcccctttggtttacgctcccttgcagcctccagctccttttatggccagcgcaattcagagcatgatcccccctactggcggggtgctgtgtggctcaatgtcaactacctggctttgggagcactccaccactatgggcatctggagggtcctcaccaggctcgggctgccaaactccacggtgagctccgtgccaacgtggtaggcaatgtatggcgccagtaccaggctacaggctttctttgggagcagtacagtgaccgcgatgggcgaggcatgggctgccgccctttccacggctggaccagccttgtcttactggccatggctgaagactactgaagggagggagaggaggggagccaagacactcatgccactctggctctgaagggacaaaggcttctggcttttgcccccagccccttggataccagtaattcaaaccttcctcatttcatctcaggtgtctccttgctgtcatcccacatagccctggggtgaatgtgaatccagagtctatttttctaaataaattggaaaaaaca

SEQ ID NO: 407929 - DNA, 615 bp, Homo sapiens
aaaaaaaaaaaaaaaaaaaagaattaaatgaaatcaactgtgtagagttcttagtgtaggacatagtacaaaagtatactgttatctcccagggcacccagtgcaaggctctttatctcatcccgcttgggtgtacctggttaccctcagtgaccctcattactgccagacgtatgttgtttacattacccctgcctactgttcctttccctcactaaggctgattctcaagagggaattcaagagagaatgccaatctaacactgttcttttctgtcctcgttggtcactcagactcaggtacttctgccctccctttggtctccctgttcttctatgtggtgacagatggcaaggaagtcctactaccagaggttggggccaaggggcagttgaagtttatcagtgggcacaccagtgaacttggtgacttccgctttacacttttgccaccaaccagtccaggggatacagcccccaagtatggcagaggtaactgggggaaaagaatgttgggggatggaaggggtggttattcccattttcaccagtctccatgtcccctgcctgagacctcccaacctgactcctgaacactttgtatttctctttata

SEQ ID NO: 407930 - DNA, 429 bp, Homo sapiens
aaaaaaaaaaaaaaaaaaaagaattaaatgaaatcaactgtgtagagttcttagtgtaggacatagtacaaaagtatactgttatctcccagggcacccagtgcaaggctctttatctcatcccgcttgggtgtacctggttaccctcagtgaccctcattactgccagacgtatgttgtttacattacccctgcctactgttcctttccctcactaaggctgattctcaagagggaattcaagagagaatgccaatccactctggctctgaagggacaaaggcttctggcttttgcccccagccccttggataccagtaattcaaaccttcctcatttcatctcaggtgtctccttgctgtcatcccacatagccctggggtgaatgtgaatccagagtctatttttctaaataaattggaaaaaaca

SEQ ID NO: 407931 - DNA, 373 bp, Homo sapiens
ttactgaaccccaagaccctaccctctgggctggagagtgactgtagagccgactcaggtacttctgccctccctttggtctccctgttcttctatgtggtgacagatggcaaggaagtcctactaccagaggttggggccaaggggcagttgaagtttatcagtgggcacaccagtgaacttggtgacttccgctttacaccactctggctctgaagggacaaaggcttctggcttttgcccccagccccttggataccagtaattcaaaccttcctcatttcatctcaggtgtctccttgctgtcatcccacatagccctggggtgaatgtgaatccagagtctatttttctaaataaattggaaaaaaca

SEQ ID NO: 407932 - DNA, 2564 bp, Homo sapiens
ggcggagaggtccggcgggaggcggaggcggaggcgcaggcgctggctggcaggtgtcgctaaccggacggtggtcgccagggcgagaggcgggagccggagagccccgccgtggccccggacctcttctggggaacctaccgccctcacgtctacttcggcatgaagacccgcagcccgaagcccctcctcaccggactgatgtgggcgcagcagggcaccaccccggggactcctaagctcaggcacacgtgtgagcagggggacggtgtgggtccctatggctgggagttccacgacggcctctccttcgggcgccaacacatccaggatggggccttaaggctcaccactgagttcgtcaagaggcctgggggtcagcacggaggggactggagctggagagtgactgtagagcctcaggactcaggtacttctgccctccctttggtctccctgttcttctatgtggtgacagatggcaaggaagtcctactaccagaggttggggccaaggggcagttgaagtttatcagtgggcacaccagtgaacttggtgacttccgctttacacttttgccaccaaccagtccaggggatacagcccccaagtatggcagctacaatgtcttctggacctccaacccaggactgcccctgctgacagagatggtaaagagtcgcctaaatagctggtttcagcatcggcccccaggggccccccctgaacgctacctcggcttgccaggatccctgaagtgggaggacagaggtccaagtgggcaagggcaggggcagttcttgatacagcaggtgaccctgaaaattcccatttccatagagtttgtgtttgaatcaggcagtgcccaggcaggaggaaatcaagccctgccaagactggcaggcagtctactgacccaggccctggagagccatgctgaaggctttagagagcgctttgagaagaccttccagctgaaggagaagggcctgagctctggcgagcaggttttgggtcaggctgccctcagcggcctccttggtggaattggctacttctacggacaagggctggtattgccagacatcggggtggaagggtctgagcagaaggtggacccagccctctttccacccgtacctctttttacagcagtgccctcccggtcattcttcccacgaggcttcctttgggatgaaggctttcaccagctggtggttcagcggtgggatccctccctcacccgggaagcccttggccactggctggggctgctaaatgctgatggctggattgggagggagcagatactgggggatgaggcccgagcccgggtgcctccagaattcctagtacaacgagcagtccacgccaaccccccaaccctacttttgcctgtagcccatatgctagaggttggtgaccctgacgacttggctttcctccgaaaggccttgccccgcctgcatgcctggttttcctggctccatcagagccaggcaggcccactgccactatcttaccgctggcggggacgggaccctgccttaccaaccttactgaaccccaagaccctaccctctgggctggatgactacccccgggcttcacacccttcagtaaccgagcggcacctggacctgcgatgttgggtggcactgggtgcccgtgtgctgacgcggctggcagagcatctgggtgaggctgaggtagctgctgagctgggcccactggctgcctcactggaggcagcagagagcctggatgagctgcactgggccccagagctaggagtctttgcagactttgggaaccacacaaaagcagtacagctgaagcccaggccccctcaggggctcgttcgggtggtgggtcggccccaacctcaactgcagtatgtagatgctcttggctatgtcagtctttttcccttgctgctgcgactgctggaccccacctcatcccgccttgggcccctgctggacattctagccgacagccgccatctctggagcccctttggtttacgctcccttgcagcctccagctccttttatggccagcgcaattcagagcatgatcccccctactggcggggtgctgtgtggctcaatgtcaactacctggctttgggagcactccaccactatgggcatctggagggtcctcaccaggctcgggctgccaaactccacggtgagctccgtgccaacgtggtaggcaatgtatggcgccagtaccaggctacaggctttctttgggagcagtacagtgaccgcgatgggcgaggcatgggctgccgccctttccacggctggaccagccttgtcttactggccatggctgaagactactgaagggagggagaggaggggagccaagacactcatgccactctggctctgaagggacaaaggcttctggcttttgcccccagccccttggataccagtaattcaaaccttcctcatttcatctcaggtgtctccttgctgtcatcccacatagccctggggtgaatgtgaatccagagtctatttttctaaataaattggaaaaaaca

SEQ ID NO: 407933 - DNA, 2663 bp, Homo sapiens
ggcggagaggtccggcgggaggcggaggcggaggcgcaggcgctggctggcaggtgtcgctaaccggacggtggtcgccagggcgagaggcgggagccggagaggtgaggcaggacccgggctccactgccgcctctccgagctcttgtgacgcggacctcagtgccaggatggctcggggcgagcggcggcgccgcgcagtgccggcagagggagtgcggacagccgagagggcggctcggggaggccccgggcgacgggacggccggggcggcgggccgcgtagcacggctggaggagtggctctggccgtcgtggtcctgtctttggccctgggtatgtcggggcgctgggtgctggcgtggtaccgtgcgcggcgggcggtcacgctgcactccgcgcctcctgtgttgcctgccgactcctccagccccgccgtggccccggacctcttctggggaacctaccgccctcacgtctacttcggcatgaagacccgcagcccgaagcccctcctcaccggactcaggtacttctgccctccctttggtctccctgttcttctatgtggtgacagatggcaaggaagtcctactaccagaggttggggccaaggggcagttgaagtttatcagtgggcacaccagtgaacttggtgacttccgctttacacttttgccaccaaccagtccaggggatacagcccccaagtatggcagctacaatgtcttctggacctccaacccaggactgcccctgctgacagagatggtaaagagtcgcctaaatagctggtttcagcatcggcccccaggggccccccctgaacgctacctcggcttgccaggatccctgaagtgggaggacagaggtccaagtgggcaagggcaggggcagttcttgatacagcaggtgaccctgaaaattcccatttccatagagtttgtgtttgaatcaggcagtgcccaggcaggaggaaatcaagccctgccaagactggcaggcagtctactgacccaggccctggagagccatgctgaaggctttagagagcgctttgagaagaccttccagctgaaggagaagggcctgagctctggcgagcaggttttgggtcaggctgccctcagcggcctccttggtggaattggctacttctacggacaagggctggtattgccagacatcggggtggaagggtctgagcagaaggtggacccagccctctttccacccgtacctctttttacagcagtgccctcccggtcattcttcccacgaggcttcctttgggatgaaggctttcaccagctggtggttcagcggtgggatccctccctcacccgggaagcccttggccactggctggggctgctaaatgctgatggctggattgggagggagcagatactgggggatgaggcccgagcccgggtgcctccagaattcctagtacaacgagcagtccacgccaaccccccaaccctacttttgcctgtagcccatatgctagaggttggtgaccctgacgacttggctttcctccgaaaggccttgccccgcctgcatgcctggttttcctggctccatcagagccaggcaggcccactgccactatcttaccgctggcggggacgggaccctgccttaccaaccttactgaaccccaagaccctaccctctgggctggatgactacccccgggcttcacacccttcagtaaccgagcggcacctggacctgcgatgttgggtggcactgggtgcccgtgtgctgacgcggctggcagagcatctgggtgaggctgaggtagctgctgagctgggcccactggctgcctcactggaggcagcagagagcctggatgagctgcactgggccccagagctaggagtctttgcagactttgggaaccacacaaaagcagtacagctgaagcccaggccccctcaggggctcgttcgggtggtgggtcggccccaacctcaactgcagtatgtagatgctcttggctatgtcagtctttttcccttgctgctgcgactgctggaccccacctcatcccgccttgggcccctgctggacattctagccgacagccgccatctctggagcccctttggtttacgctcccttgcagcctccagctccttttatggccagcgcaattcagagcatgatcccccctactggcggggtgctgtgtggctcaatgtcaactacctggctttgggagcactccaccactatgggcatctggagggtcctcaccaggctcgggctgccaaactccacggtgagctccgtgccaacgtggtaggcaatgtatggcgccagtaccaggctacaggctttctttgggagcagtacagtgaccgcgatgggcgaggcatgggctgccgccctttccacggctggaccagccttgtcttactggccatggctgaagactactgaagggagggagaggaggggagccaagacactcatgccactctggctctgaagggacaaaggcttctggcttttgcccccagccccttggataccagtaattcaaaccttcctcatttcatctcaggtgtctccttgctgtcatcccacatagccctggggtgaatgtgaatccagagtctatttttctaaataaattggaaaaaaca

SEQ ID NO: 407934 - DNA, 2434 bp, Homo sapiens
aaaaaaaaaaaaaaaaaaaagaattaaatgaaatcaactgtgtagagttcttagtgtaggacatagtacaaaagtatactgttatctcccagggcacccagtgcaaggctctttatctcatcccgcttgggtgtacctggttaccctcagtgaccctcattactgccagacgtatgttgtttacattacccctgcctactgttcctttccctcactaaggctgattctcaagagggaattcaagagagaatgccaatctaacactgttcttttctgtcctcgttggtcactcagactcaggtacttctgccctccctttggtctccctgttcttctatgtggtgacagatggcaaggaagtcctactaccagaggttggggccaaggggcagttgaagtttatcagtgggcacaccagtgaacttggtgacttccgctttacacttttgccaccaaccagtccaggggatacagcccccaagtatggcagctacaatgtcttctggacctccaacccaggactgcccctgctgacagagatggtaaagagtcgcctaaatagctggtttcagcatcggcccccaggggccccccctgaacgctacctcggcttgccaggatccctgaagtgggaggacagaggtccaagtgggcaagggcaggggcagttcttgatacagcaggtgaccctgaaaattcccatttccatagagtttgtgtttgaatcaggcagtgcccaggcaggaggaaatcaagccctgccaagactggcaggcagtctactgacccaggccctggagagccatgctgaaggctttagagagcgctttgagaagaccttccagctgaaggagaagggcctgagctctggcgagcaggttttgggtcaggctgccctcagcggcctccttggtggaattggctacttctacggacaagggctggtattgccagacatcggggtggaagggtctgagcagaaggtggacccagccctctttccacccgtacctctttttacagcagtgccctcccggtcattcttcccacgaggcttcctttgggatgaaggctttcaccagctggtggttcagcggtgggatccctccctcacccgggaagcccttggccactggctggggctgctaaatgctgatggctggattgggagggagcagatactgggggatgaggcccgagcccgggtgcctccagaattcctagtacaacgagcagtccacgccaaccccccaaccctacttttgcctgtagcccatatgctagaggttggtgaccctgacgacttggctttcctccgaaaggccttgccccgcctgcatgcctggttttcctggctccatcagagccaggcaggcccactgccactatcttaccgctggcggggacgggaccctgccttaccaaccttactgaaccccaagaccctaccctctgggctggatgactacccccgggcttcacacccttcagtaaccgagcggcacctggacctgcgatgttgggtggcactgggtgcccgtgtgctgacgcggctggcagagcatctgggtgaggctgaggtagctgctgagctgggcccactggctgcctcactggaggcagcagagagcctggatgagctgcactgggccccagagctaggagtctttgcagactttgggaaccacacaaaagcagtacagctgaagcccaggccccctcaggggctcgttcgggtggtgggtcggccccaacctcaactgcagtatgtagatgctcttggctatgtcagtctttttcccttgctgctgcgactgctggaccccacctcatcccgccttgggcccctgctggacattctagccgacagccgccatctctggagcccctttggtttacgctcccttgcagcctccagctccttttatggccagcgcaattcagagcatgatcccccctactggcggggtgctgtgtggctcaatgtcaactacctggctttgggagcactccaccactatgggcatctggagggtcctcaccaggctcgggctgccaaactccacggtgagctccgtgccaacgtggtaggcaatgtatggcgccagtaccaggctacaggctttctttgggagcagtacagtgaccgcgatgggcgaggcatgggctgccgccctttccacggctggaccagccttgtcttactggccatggctgaagactactgaagggagggagaggaggggagccaagacactcatgccactctggctctgaagggacaaaggcttctggcttttgcccccagccccttggataccagtaattcaaaccttcctcatttcatctcaggtgtctccttgctgtcatcccacatagccctggggtgaatgtgaatccagagtctatttttctaaataaattggaaaaaaca

SEQ ID NO: 407935 - DNA, 2245 bp, Homo sapiens
ggcggagaggtccggcgggaggcggaggcggaggcgcaggcgctggctggcaggtgtcgctaaccggacggtggtcgccagggcgagaggcgggagccggagaggactcaggtacttctgccctccctttggtctccctgttcttctatgtggtgacagatggcaaggaagtcctactaccagaggttggggccaaggggcagttgaagtttatcagtgggcacaccagtgaacttggtgacttccgctttacacttttgccaccaaccagtccaggggatacagcccccaagtatggcagctacaatgtcttctggacctccaacccaggactgcccctgctgacagagatggtaaagagtcgcctaaatagctggtttcagcatcggcccccaggggccccccctgaacgctacctcggcttgccaggatccctgaagtgggaggacagaggtccaagtgggcaagggcaggggcagttcttgatacagcaggtgaccctgaaaattcccatttccatagagtttgtgtttgaatcaggcagtgcccaggcaggaggaaatcaagccctgccaagactggcaggcagtctactgacccaggccctggagagccatgctgaaggctttagagagcgctttgagaagaccttccagctgaaggagaagggcctgagctctggcgagcaggttttgggtcaggctgccctcagcggcctccttggtggaattggctacttctacggacaagggctggtattgccagacatcggggtggaagggtctgagcagaaggtggacccagccctctttccacccgtacctctttttacagcagtgccctcccggtcattcttcccacgaggcttcctttgggatgaaggctttcaccagctggtggttcagcggtgggatccctccctcacccgggaagcccttggccactggctggggctgctaaatgctgatggctggattgggagggagcagatactgggggatgaggcccgagcccgggtgcctccagaattcctagtacaacgagcagtccacgccaaccccccaaccctacttttgcctgtagcccatatgctagaggttggtgaccctgacgacttggctttcctccgaaaggccttgccccgcctgcatgcctggttttcctggctccatcagagccaggcaggcccactgccactatcttaccgctggcggggacgggaccctgccttaccaaccttactgaaccccaagaccctaccctctgggctggatgactacccccgggcttcacacccttcagtaaccgagcggcacctggacctgcgatgttgggtggcactgggtgcccgtgtgctgacgcggctggcagagcatctgggtgaggctgaggtagctgctgagctgggcccactggctgcctcactggaggcagcagagagcctggatgagctgcactgggccccagagctaggagtctttgcagactttgggaaccacacaaaagcagtacagctgaagcccaggccccctcaggggctcgttcgggtggtgggtcggccccaacctcaactgcagtatgtagatgctcttggctatgtcagtctttttcccttgctgctgcgactgctggaccccacctcatcccgccttgggcccctgctggacattctagccgacagccgccatctctggagcccctttggtttacgctcccttgcagcctccagctccttttatggccagcgcaattcagagcatgatcccccctactggcggggtgctgtgtggctcaatgtcaactacctggctttgggagcactccaccactatgggcatctggagggtcctcaccaggctcgggctgccaaactccacggtgagctccgtgccaacgtggtaggcaatgtatggcgccagtaccaggctacaggctttctttgggagcagtacagtgaccgcgatgggcgaggcatgggctgccgccctttccacggctggaccagccttgtcttactggccatggctgaagactactgaagggagggagaggaggggagccaagacactcatgccactctggctctgaagggacaaaggcttctggcttttgcccccagccccttggataccagtaattcaaaccttcctcatttcatctcaggtgtctccttgctgtcatcccacatagccctggggtgaatgtgaatccagagtctatttttctaaataaattggaaaaaaca

SEQ ID NO: 407936 - DNA, 2910 bp, Homo sapiens
ggcggagaggtccggcgggaggcggaggcggaggcgcaggcgctggctggcaggtgtcgctaaccggacggtggtcgccagggcgagaggcgggagccggagaggtgaggcaggacccgggctccactgccgcctctccgagctcttgtgacgcggacctcagtgccaggatggctcggggcgagcggcggcgccgcgcagtgccggcagagggagtgcggacagccgagagggcggctcggggaggccccgggcgacgggacggccggggcggcgggccgcgtagcacggctggaggagtggctctggccgtcgtggtcctgtctttggccctgggtatgtcggggcgctgggtgctggcgtggtaccgtgcgcggcgggcggtcacgctgcactccgcgcctcctgtgttgcctgccgactcctccagccccgccgtggccccggacctcttctggggaacctaccgccctcacgtctacttcggcatgaagacccgcagcccgaagcccctcctcaccggactgatgtgggcgcagcagggcaccaccccggggactcctaagctcaggcacacgtgtgagcagggggacggtgtgggtccctatggctgggagttccacgacggcctctccttcgggcgccaacacatccaggatggggccttaaggctcaccactgagttcgtcaagaggcctgggggtcagcacggaggggactggagctggagagtgactgtagagcctcaggactcaggtacttctgccctccctttggtctccctgttcttctatgtggtgacagatggcaaggaagtcctactaccagaggttggggccaaggggcagttgaagtttatcagtgggcacaccagtgaacttggtgacttccgctttacacttttgccaccaaccagtccaggggatacagcccccaagtatggcagctacaatgtcttctggacctccaacccaggactgcccctgctgacagagatggtaaagagtcgcctaaatagctggtttcagcatcggcccccaggggccccccctgaacgctacctcggcttgccaggatccctgaagtgggaggacagaggtccaagtgggcaagggcaggggcagttcttgatacagcaggtgaccctgaaaattcccatttccatagagtttgtgtttgaatcaggcagtgcccaggcaggaggaaatcaagccctgccaagactggcaggcagtctactgacccaggccctggagagccatgctgaaggctttagagagcgctttgagaagaccttccagctgaaggagaagggcctgagctctggcgagcaggttttgggtcaggctgccctcagcggcctccttggtggaattggctacttctacggacaagggctggtattgccagacatcggggtggaagggtctgagcagaaggtggacccagccctctttccacccgtacctctttttacagcagtgccctcccggtcattcttcccacgaggcttcctttgggatgaaggctttcaccagctggtggttcagcggtgggatccctccctcacccgggaagcccttggccactggctggggctgctaaatgctgatggctggattgggagggagcagatactgggggatgaggcccgagcccgggtgcctccagaattcctagtacaacgagcagtccacgccaaccccccaaccctacttttgcctgtagcccatatgctagaggttggtgaccctgacgacttggctttcctccgaaaggccttgccccgcctgcatgcctggttttcctggctccatcagagccaggcaggcccactgccactatcttaccgctggcggggacgggaccctgccttaccaaccttactgaaccccaagaccctaccctctgggctggatgactacccccgggcttcacacccttcagtaaccgagcggcacctggacctgcgatgttgggtggcactgggtgcccgtgtgctgacgcggctggcagagcatctgggtgaggctgaggtagctgctgagctgggcccactggctgcctcactggaggcagcagagagcctggatgagctgcactgggccccagagctaggagtctttgcagactttgggaaccacacaaaagcagtacagctgaagcccaggccccctcaggggctcgttcgggtggtgggtcggccccaacctcaactgcagtatgtagatgctcttggctatgtcagtctttttcccttgctgctgcgactgctggaccccacctcatcccgccttgggcccctgctggacattctagccgacagccgccatctctggagcccctttggtttacgctcccttgcagcctccagctccttttatggccagcgcaattcagagcatgatcccccctactggcggggtgctgtgtggctcaatgtcaactacctggctttgggagcactccaccactatgggcatctggagggtcctcaccaggctcgggctgccaaactccacggtgagctccgtgccaacgtggtaggcaatgtatggcgccagtaccaggctacaggctttctttgggagcagtacagtgaccgcgatgggcgaggcatgggctgccgccctttccacggctggaccagccttgtcttactggccatggctgaagactactgaagggagggagaggaggggagccaagacactcatgccactctggctctgaagggacaaaggcttctggcttttgcccccagccccttggataccagtaattcaaaccttcctcatttcatctcaggtgtctccttgctgtcatcccacatagccctggggtgaatgtgaatccagagtctatttttctaaataaattggaaaaaacattttgaactctaaaaaaaat

SEQ ID NO: 407937 - DNA, 1650 bp, Homo sapiens
gtcctcaagcagattgggctacaggccaaagtaagggttggggggttggcgtggactgctcgttgtactaggaatttctggaggcacccgggctcgggcctcatcccccagtatctgctccgtgccaacgtggtaggcaatgtatggcgccagtaccaggctacaggctttctttgggagcagtacagtgaccgcgatgggcgaggcattggctgccgccctttccacggctggaccagccttgccctcccggtcattcttcccacgaggcttcctttgggatgaaggctttcaccagctggtggttcagcggtgggatccctccctcacccgggaagcccttggccactggctggggctgctaaatgctgatggctggattgggagggagcagatactgggggatgaggcccgagcccgggtgcctccagaattcctagtacaacgagcagtccacgccaaccccccaaccctacttttgcctgtagcccatatgctagaggttggtgaccctgacgacttggctttcctccgaaaggccttgccccgcctgcatgcctggttttcctggctccatcagagccaggcaggcccactgccactatcttaccgctggcggggacgggaccctgccttaccaaccttactgaaccccaagaccctaccctctgggctggatgactacccccgggcttcacacccttcagtaaccgagcggcacctggacctgcgatgttgggtggcactgggtgcccgtgtgctgacgcggctggcagagcatctgggtgaggctgaggtagctgctgagctgggcccactggctgcctcactggaggcagcagagagcctggatgagctgcactgggccccagagctaggagtctttgcagactttgggaaccacacaaaagcagtacagctgaagcccaggccccctcaggggctcgttcgggtggtgggtcggccccaacctcaactgcagtatgtagatgctcttggctatgtcagtctttttcccttgctgctgcgactgctggaccccacctcatcccgccttgggcccctgctggacattctagccgacagccgccatctctggagcccctttggtttacgctcccttgcagcctccagctccttttatggccagcgcaattcagagcatgatcccccctactggcggggtgctgtgtggctcaatgtcaactacctggctttgggagcactccaccactatgggcatctggagggtcctcaccaggctcgggctgccaaactccacggtgagctccgtgccaacgtggtaggcaatgtatggcgccagtaccaggctacaggctttctttgggagcagtacagtgaccgcgatgggcgaggcatgggctgccgccctttccacggctggaccagccttgtcttactggccatggctgaagactactgaagggagggagaggaggggagccaagacactcatgccactctggctctgaagggacaaaggcttctggcttttgcccccagccccttggataccagtaattcaaaccttcctcatttcatctcaggtgtctccttgctgtcatcccacatagccctggggtgaatgtgaatccagagtctatttttctaaataaattggaaaaaaca

SEQ ID NO: 407938 - DNA, 2057 bp, Homo sapiens
ggcggagaggtccggcgggaggcggaggcggaggcgcaggcgctggctggcaggtgtcgctaaccggacggtggtcgccagggcgagaggcgggagccggagaggtgaggcaggacccgggctccactgccgcctctccgagctcttgtgacgcggacctcagtgccaggatggctcggggcgagcggcggcgccgcgcagtgccggcagagggagtgcggacagccgagagggcggctcggggaggccccgggcgacgggacggccggggcggcgggccgcgtagcacggctggaggagtggctctggccgtcgtggtcctgtctttggccctgggtatgtcggggcgctgggtgctggcgtggtaccgtgcgcggcgggcggtcacgctgcactccgcgcctcctgtgttgcctgccgactcctccagccccgccgtggccccggacctcttctggggaacctaccgccctcacgtctacttcggcatgaagacccgcagcccgaagcccctcctcaccggactgatgtgggcgcagcagggcaccaccccggggactcctaagctcaggcacacgtgtgagcagggggacggtgtgggtccctatggctgggagttccacgacggcctctccttcgggcgccaacacatccaggatggggccttaaggctcaccactgagttcgtcaagaggcctgggggtcagcacggaggggactggagctggagagtgactgtagagcctcaggactcaggtacttctgccctccctttggtctccctgttcttctatgtggtgacagatggcaaggaagtcctactaccagaggttggggccaaggggcagttgaagtttatcagtgggcacaccagtgaacttggtgacttccgctttacacttttgccaccaaccagtccaggggatacagcccccaagtatggcagctacaatgtcttctggacctccaacccaggactgcccctgctgacagagatggtaaagagtcgcctaaatagctggtttcagcatcggcccccaggggccccccctgaacgctacctcggcttgccaggatccctgaagtgggaggacagaggtccaagtgggcaagggcaggggcagttcttgatacagcaggtgaccctgaaaattcccatttccatagagtttgtgtttgaatcaggcagtgcccaggcaggaggaaatcaagccctgccaagactggcaggcagtctactgacccaggccctggagagccatgctgaaggctttagagagcgctttgagaagaccttccagctgaaggagaagggcctgagctctggcgagcaggttttgggtcaggctgccctcagcggcctccttggtggaattggctacttctacggacaagggctggtattgccagacatcggggtggaagggtctgagcagaaggtggacccagccctctttccacccgtacctctttttacagcagtgccctcccggtcattcttcccacgaggcttcctttgggatgaaggctttcaccagctggtggttcagcggtgggatccctccctcacccgggaagcccttggccactggctggggctgctaaatgctgatggctggattgggagggagcagatactgggggatgaggcccgagcccgggtgcctccagaattcctagtacaacgagcagtccacgccaaccccccaaccctacttttgcctgtagcccatatgctagaggttggtgacctgggagcagtacagtgaccgcgatgggcgaggcatgggctgccgccctttccacggctggaccagccttgtcttactggccatggctgaagactactgaagggagggagaggaggggagccaagacactcatgccactctggctctgaagggacaaaggcttctggcttttgcccccagccccttggataccagtaattcaaaccttcctcatttcatctcaggtgtctccttgctgtcatcccacatagccctggggtgaatgtgaatccagagtctatttttctaaataaattggaaaaaaca

SEQ ID NO: 407939 - DNA, 1924 bp, Homo sapiens
ggcggagaggtccggcgggaggcggaggcggaggcgcaggcgctggctggcaggtgtcgctaaccggacggtggtcgccagggcgagaggcgggagccggagaggtgaggcaggacccgggctccactgccgcctctccgagctcttgtgacgcggacctcagtgccaggatggctcggggcgagcggcggcgccgcgcagtgccggcagagggagtgcggacagccgagagggcggctcggggaggccccgggcgacgggacggccggggcggcgggccgcgtagcacggctggaggagtggctctggccgtcgtggtcctgtctttggccctgggtatgtcggggcgctgggtgctggcgtggtaccgtgcgcggcgggcggtcacgctgcactccgcgcctcctgtgttgcctgccgactcctccagccccgccgtggccccggacctcttctggggaacctaccgccctcacgtctacttcggcatgaagacccgcagcccgaagcccctcctcaccggactgatgtgggcgcagcagggcaccaccccggggactcctaagctcaggcacacgtgtgagcagggggacggtgtgggtccctatggctgggagttccacgacggcctctccttcgggcgccaacacatccaggatggggccttaaggctcaccactgagttcgtcaagaggcctgggggtcagcacggaggggactggagctggagagtgactgtagagcctcaggactcaggtacttctgccctccctttggtctccctgttcttctatgtggtgacagatggcaaggaagtcctactaccagaggttggggccaaggggcagttgaagtttatcagtgggcacaccagtgaacttggtgacttccgctttacacttttgccaccaaccagtccaggggatacagcccccaagtatggcagctacaatgtcttctggacctccaacccaggactgcccctgctgacagagatggtaaagagtcgcctaaatagctggtttcagcatcggcccccaggggccccccctgaacgctacctcggcttgccaggatccctgaagtgggaggacagaggtccaagtgggcaagggcaggggcagttcttgatacagcaggtgaccctgaaaattcccatttccatagagtttgtgtttgaatcaggcagtgcccaggcaggaggaaatcaagccctgccaagactggcaggcagtctactgacccaggccctggagagccatgctgaaggctttagagagcgctttgagaagaccttccagctgaaggagaagggcctgagctctggcgagcaggttttgggtcaggctgccctcagcggcctccttggtggaattggctacttctacggacaagggctggtattgccagacatcggggtggaagggtctgagcagaaggtggacccagccctctttccacccgtacctctttttacagcagtgccctcccggtcattcttcccacgaggcttcctttgggatgaaggctttcaccagctggtggttcagcggtgggatccctccctcacccgggaagcccttggccactggctggggctgctaaatgctgatggctggattgggagggagcagatactgggggatgaggcccgagcccgggtgcctccagaattcctagtacaacgagcagtccacgccaaccccccaaccctacttttgcctgtagcccatatgctagaggttggtgaccccactctggctctgaagggacaaaggcttctggcttttgcccccagccccttggataccagtaattcaaaccttcctcatttcatctcaggtgtctccttgctgtcatcccacatagccctggggtgaatgtgaatccagagtctatttttctaaataaattggaaaaaaca

SEQ ID NO: 407940 - DNA, 1944 bp, Homo sapiens
ggcggagaggtccggcgggaggcggaggcggaggcgcaggcgctggctggcaggtgtcgctaaccggacggtggtcgccagggcgagaggcgggagccggagaggtgaggcaggacccgggctccactgccgcctctccgagctcttgtgacgcggacctcagtgccaggatggctcggggcgagcggcggcgccgcgcagtgccggcagagggagtgcggacagccgagagggcggctcggggaggccccgggcgacgggacggccggggcggcgggccgcgtagcacggctggaggagtggctctggccgtcgtggtcctgtctttggccctgggtatgtcggggcgctgggtgctggcgtggtaccgtgcgcggcgggcggtcacgctgcactccgcgcctcctgtgttgcctgccgactcctccagccccgccgtggccccggacctcttctggggaacctaccgccctcacgtctacttcggcatgaagacccgcagcccgaagcccctcctcaccggactgatgtgggcgcagcagggcaccaccccggggactcctaagctcaggcacacgtgtgagcagggggacggtgtgggtccctatggctgggagttccacgacggcctctccttcgggcgccaacacatccaggatggggccttaaggctcaccactgagttcgtcaagaggcctgggggtcagcacggaggggactggagctggagagtgactgtagagcctcaggactcaggtacttctgccctccctttggtctccctgttcttctatgtggtgacagatggcaaggaagtcctactaccagaggttggggccaaggggcagttgaagtttatcagtgggcacaccagtgaacttggtgacttccgctttacacttttgccaccaaccagtccaggggatacagcccccaagtatggcagctacaatgtcttctggacctccaacccaggactgcccctgctgacagagatggtaaagagtcgcctaaatagctggtttcagcatcggcccccaggggccccccctgaacgctacctcggcttgccaggatccctgaagtgggaggacagaggtccaagtgggcaagggcaggggcagttcttgatacagcaggtgaccctgaaaattcccatttccatagagtttgtgtttgaatcaggcagtgcccaggcaggaggaaatcaagccctgccaagactggcaggcagtctactgacccaggccctggagagccatgctgaaggctttagagagcgctttgagaagaccttccagctgaaggagaagggcctgagctctggcgagcaggttttgggtcaggctgccctcagcggcctccttggtggaattggctacttctacggacaagggctggtattgccagacatcggggtggaagggtctgagcagaaggtggacccagccctctttccacccgtacctctttttacagcagtgccctcccggtcattcttcccacgaggcttcctttgggatgaaggctttcaccagctggtggttcagcggtgggatccctccctcacccgggaagcccttggccactggctggggctgctaaatgctgatggctggattgggagggagcagatactgggggatgaggcccgagcccgggtgcctccagaattcctagtacaacgagcagtccacgccaaccccccaaccctacttttgcctgtagcccatatgctagaggttggtgaccccactctggctctgaagggacaaaggcttctggcttttgcccccagccccttggataccagtaattcaaaccttcctcatttcatctcaggtgtctccttgctgtcatcccacatagccctggggtgaatgtgaatccagagtctatttttctaaataaattggaaaaaacattttgaactctaaaaaaaat

SEQ ID NO: 407941 - DNA, 1208 bp, Homo sapiens
ggcggagaggtccggcgggaggcggaggcggaggcgcaggcgctggctggcaggtgtcgctaaccggacggtggtcgccagggcgagaggcgggagccggagaggtgaggcaggacccgggctccactgccgcctctccgagctcttgtgacgcggacctcagtgccaggatggctcggggcgagcggcggcgccgcgcagtgccggcagagggagtgcggacagccgagagggcggctcggggaggccccgggcgacgggacggccggggcggcgggccgcgtagcacggctggaggagtggctctggccgtcgtggtcctgtctttggccctgggtatgtcggggcgctgggtgctggcgtggtaccgtgcgcggcgggcggtcacgctgcactccgcgcctcctgtgttgcctgccgactcctccagccccgccgtggccccggacctcttctggggaacctaccgccctcacgtctacttcggcatgaagacccgcagcccgaagcccctcctcaccggactgatgtgggcgcagcagggcaccaccccggggactcctaagctcaggcacacgtgtgagcagggggacggtgtgggtccctatggctgggagttccacgacggcctctccttcgggcgccaacacatccaggatggggccttaaggctcaccactgagttcgtcaagaggcctgggggtcagcacggaggggactggagctggagagtgactgtagagcctcaggactcaggtacttctgccctccctttggtctccctgttcttctatgtggtgacagatggcaaggaagtcctactaccagaggttggggccaaggggcagttgaagtttatcagtgggcacaccagtgaacttggtgacttccgctttacacttttgccaccaaccagtccaggggatacagcccccaagtatggcaggccctttccacggctggaccagccttgtcttactggccatggctgaagactactgaagggagggagaggaggggagccaagacactcatgccactctggctctgaagggacaaaggcttctggcttttgcccccagccccttggataccagtaattcaaaccttcctcatttcatctcaggtgtctccttgctgtcatcccacatagccctggggtgaatgtgaatccagagtctatttttctaaataaattggaaaaaaca

SEQ ID NO: 407942 - DNA, 718 bp, Homo sapiens
aaaaaaaaaaaaaaaaaaaagaattaaatgaaatcaactgtgtagagttcttagtgtaggacatagtacaaaagtatactgttatctcccagggcacccagtgcaaggctctttatctcatcccgcttgggtgtacctggttaccctcagtgaccctcattactgccagacgtatgttgtttacattacccctgcctactgttcctttccctcactaaggctgattctcaagagggaattcaagagagaatgccaatctaacactgttcttttctgtcctcgttggtcactcagactcaggtacttctgccctccctttggtctccctgttcttctatgtggtgacagatggcaaggaagtcctactaccagaggttggggccaaggggcagttgaagtttatcagtgggcacaccagtgaacttggtgacttccgctttacacttttgccaccaaccagtccaggggatacagcccccaagtatggcagaggtaactgggggaaaagaatgttgggggatggaagccactctggctctgaagggacaaaggcttctggcttttgcccccagccccttggataccagtaattcaaaccttcctcatttcatctcaggtgtctccttgctgtcatcccacatagccctggggtgaatgtgaatccagagtctatttttctaaataaattggaaaaaacattttgaactctaaaaaaaat

SEQ ID NO: 407943 - DNA, 2693 bp, Homo sapiens
ggcggagaggtccggcgggaggcggaggcggaggcgcaggcgctggctggcaggtgtcgctaaccggacggtggtcgccagggcgagaggcgggagccggagaggtgaggcaggacccgggctccactgccgcctctccgagctcttgtgacgcggacctcagtgccaggatggctcggggcgagcggcggcgccgcgcagtgccggcagagggagtgcggacagccgagagggcggctcggggaggccccgggcgacgggacggccggggcggcgggccgcgtagcacggctggaggagtggctctggccgtcgtggtcctgtctttggccctgggtatgtcggggcgctgggtgctggcgtggtaccgtgcgcggcgggcggtcacgctgcactccgcgcctcctgtgttgcctgccgactcctccagccccgccgtggccccggacctcttctggggaacctaccgccctcacgtctacttcggcatgaagacccgcagcccgaagcccctcctcaccggactgatgtgggcgcagcagggcaccaccccggggactcctaagctcaggcacacgtgtgagcagggggacggtgtgggtccctatggctgggagttccacgacggcctctccttcgggcgccaacacatccaggatggggccttaaggctcaccactgagttcgtcaagaggcctgggggtcagcacggaggggactggagctggagagtgactgtagagcctcagctacaatgtcttctggacctccaacccaggactgcccctgctgacagagatggtaaagagtcgcctaaatagctggtttcagcatcggcccccaggggccccccctgaacgctacctcggcttgccaggatccctgaagtgggaggacagaggtccaagtgggcaagggcaggggcagttcttgatacagcaggtgaccctgaaaattcccatttccatagagtttgtgtttgaatcaggcagtgcccaggcaggaggaaatcaagccctgccaagactggcaggcagtctactgacccaggccctggagagccatgctgaaggctttagagagcgctttgagaagaccttccagctgaaggagaagggcctgagctctggcgagcaggttttgggtcaggctgccctcagcggcctccttggtggaattggctacttctacggacaagggctggtattgccagacatcggggtggaagggtctgagcagaaggtggacccagccctctttccacccgtacctctttttacagcagtgccctcccggtcattcttcccacgaggcttcctttgggatgaaggctttcaccagctggtggttcagcggtgggatccctccctcacccgggaagcccttggccactggctggggctgctaaatgctgatggctggattgggagggagcagatactgggggatgaggcccgagcccgggtgcctccagaattcctagtacaacgagcagtccacgccaaccccccaaccctacttttgcctgtagcccatatgctagaggttggtgaccctgacgacttggctttcctccgaaaggccttgccccgcctgcatgcctggttttcctggctccatcagagccaggcaggcccactgccactatcttaccgctggcggggacgggaccctgccttaccaaccttactgaaccccaagaccctaccctctgggctggatgactacccccgggcttcacacccttcagtaaccgagcggcacctggacctgcgatgttgggtggcactgggtgcccgtgtgctgacgcggctggcagagcatctgggtgaggctgaggtagctgctgagctgggcccactggctgcctcactggaggcagcagagagcctggatgagctgcactgggccccagagctaggagtctttgcagactttgggaaccacacaaaagcagtacagctgaagcccaggccccctcaggggctcgttcgggtggtgggtcggccccaacctcaactgcagtatgtagatgctcttggctatgtcagtctttttcccttgctgctgcgactgctggaccccacctcatcccgccttgggcccctgctggacattctagccgacagccgccatctctggagcccctttggtttacgctcccttgcagcctccagctccttttatggccagcgcaattcagagcatgatcccccctactggcggggtgctgtgtggctcaatgtcaactacctggctttgggagcactccaccactatgggcatctggagggtcctcaccaggctcgggctgccaaactccacggtgagctccgtgccaacgtggtaggcaatgtatggcgccagtaccaggctacaggctttctttgggagcagtacagtgaccgcgatgggcgaggcatgggctgccgccctttccacggctggaccagccttgtcttactggccatggctgaagactactgaagggagggagaggaggggagccaagacactcatgccactctggctctgaagggacaaaggcttctggcttttgcccccagccccttggataccagtaattcaaaccttcctcatttcatctcaggtgtctccttgctgtcatcccacatagccctggggtgaatgtgaatccagagtctatttttctaaataaattggaaaaaaca

SEQ ID NO: 407944 - DNA, 2835 bp, Homo sapiens
ggcggagaggtccggcgggaggcggaggcggaggcgcaggcgctggctggcaggtgtcgctaaccggacggtggtcgccagggcgagaggcgggagccggagaggtgaggcaggacccgggctccactgccgcctctccgagctcttgtgacgcggacctcagtgccaggatggctcggggcgagcggcggcgccgcgcagtgccggcagagggagtgcggacagccgagagggcggctcggggaggccccgggcgacgggacggccggggcggcgggccgcgtagcacggctggaggagtggctctggccgtcgtggtcctgtctttggccctgggtatgtcggggcgctgggtgctggcgtggtaccgtgcgcggcgggcggtcacgctgcactccgcgcctcctgtgttgcctgccgactcctccagccccgccgtggccccggacctcttctggggaacctaccgccctcacgtctacttcggcatgaagacccgcagcccgaagcccctcctcaccggactgatgtgggcgcagcagggcaccaccccggggactcctaagctcaggcacacgtgtgagcagggggacggtgtgggtccctatggctgggagttccacgacggcctctccttcgggcgccaacacatccaggatggggccttaaggctcaccactgagttcgtcaagaggcctgggggtcagcacggaggggactggagctggagagtgactgtagagcctcaggactcaggtacttctgccctccctttggtctccctgttcttctatgtggtgacagatggcaaggaagtcctactaccagaggttggggccaaggggcagttgaagtttatcagtgggcacaccagtgaacttggtgacttccgctttacacttttgccaccaaccagtccaggggatacagcccccaagtatggcagctacaatgtcttctggacctccaacccaggactgcccctgctgacagagatggtaaagagtcgcctaaatagctggtttcagcatcggcccccaggggccccccctgaacgctacctcggcttgccaggatccctgaagtgggaggacagaggtccaagtgggcaagggcaggggcagttcttgatacagcaggtgaccctgaaaattcccatttccatagagtttgtgtttgaatcaggcagtgcccaggcaggaggaaatcaagccctgccaagactggcaggcagtctactgacccaggccctggagagccatgctgaaggctttagagagcgctttgagaagaccttccagctgaaggagaagggcctgagctctggcgagcaggttttgggtcaggctgccctcagcggcctccttggtggaattggctacttctacggacaagggctggtattgccagacatcggggtggaagggtctgagcagaaggtggacccagccctctttccacccgtacctctttttacagcagtgccctcccggtcattcttcccacgaggcttcctttgggatgaaggctttcaccagctggtggttcagcggtgggatccctccctcacccgggaagcccttggccactggctggggctgctaaatgctgatggctggattgggagggagcagatactgggggatgaggcccgagcccgggtgcctccagaattcctagtacaacgagcagtccacgccaaccccccaaccctacttttgcctgtagcccatatgctagaggttggtgaccctgacgacttggctttcctccgaaaggccttgccccgcctgcatgcctggttttcctggctccatcagagccaggcaggcccactgccactatcttaccgctggcggggacgggaccctgccttaccaaccttactgaaccccaagaccctaccctctgggctggatgactacccccgggcttcacacccttcagtaaccgagcggcacctggacctgcgatgttgggtggcactgggtgcccgtgtgctgacgcggctggcagagcatctgggtgaggctgaggtagctgctgagctgggcccactggctgcctcactggaggcagcagagagcctggatgagctgcactgggccccagagctaggagtctttgcagactttgggaaccacgtcggccccaacctcaactgcagtatgtagatgctcttggctatgtcagtctttttcccttgctgctgcgactgctggaccccacctcatcccgccttgggcccctgctggacattctagccgacagccgccatctctggagcccctttggtttacgctcccttgcagcctccagctccttttatggccagcgcaattcagagcatgatcccccctactggcggggtgctgtgtggctcaatgtcaactacctggctttgggagcactccaccactatgggcatctggagggtcctcaccaggctcgggctgccaaactccacggtgagctccgtgccaacgtggtaggcaatgtatggcgccagtaccaggctacaggctttctttgggagcagtacagtgaccgcgatgggcgaggcatgggctgccgccctttccacggctggaccagccttgtcttactggccatggctgaagactactgaagggagggagaggaggggagccaagacactcatgccactctggctctgaagggacaaaggcttctggcttttgcccccagccccttggataccagtaattcaaaccttcctcatttcatctcaggtgtctccttgctgtcatcccacatagccctggggtgaatgtgaatccagagtctatttttctaaataaattggaaaaaaca

SEQ ID NO: 407945 - DNA, 3366 bp, Homo sapiens
ggcggagaggtccggcgggaggcggaggcggaggcgcaggcgctggctggcaggtgtcgctaaccggacggtggtcgccagggcgagaggcgggagccggagaggtgaggcaggacccgggctccactgccgcctctccgagctcttgtgacgcggacctcagtgccaggatggctcggggcgagcggcggcgccgcgcagtgccggcagagggagtgcggacagccgagagggcggctcggggaggccccgggcgacgggacggccggggcggcgggccgcgtagcacggctggaggagtggctctggccgtcgtggtcctgtctttggccctgggtatgtcggggcgctgggtgctggcgtggtaccgtgcgcggcgggcggtcacgctgcactccgcgcctcctgtgttgcctgccgactcctccagccccgccgtggccccggacctcttctggggaacctaccgccctcacgtctacttcggcatgaagacccgcagcccgaagcccctcctcaccggactgatgtgggcgcagcagggcaccaccccggggactcctaagctcaggcacacgtgtgagcagggggacggtgtgggtccctatggctgggagttccacgacggcctctccttcgggcgccaacacatccaggatggggccttaaggctcaccactgagttcgtcaagaggcctgggggtcagcacggaggggactggagctggagagtgactgtagagcctcaggactcaggtacttctgccctccctttggtctccctgttcttctatgtggtgacagatggcaaggaagtcctactaccagaggttggggccaaggggcagttgaagtttatcagtgggcacaccagtgaacttggtgacttccgctttacacttttgccaccaaccagtccaggggatacagcccccaagtatggcagctacaatgtcttctggacctccaacccaggactgcccctgctgacagagatggtaaagagtcgcctaaatagctggtttcagcatcggcccccaggggccccccctgaacgctacctcggcttgccaggatccctgaagtgggaggacagaggtccaagtgggcaagggcaggggcagttcttgatacagcaggtgaccctgaaaattcccatttccatagagtttgtgtttgaatcaggcagtgcccaggcaggaggaaatcaagccctgccaagactggcaggcagtctactgacccaggccctggagagccatgctgaaggctttagagagcgctttgagaagaccttccagctgaaggagaagggcctgagctctggcgagcaggttttgggtcaggctgccctcagcggcctccttggtggaattggctacttctacggacaagggctggtattgccagacatcggggtggaagggtctgagcagaaggtggacccagccctctttccacccgtacctctttttacagcagtgccctcccggtcattcttcccacgaggcttcctttgggatgaaggctttcaccagctggtggttcagcggtgggatccctccctcacccgggaagcccttggccactggctggggctgctaaatgctgatggctggattgggagggagcagatactgggggatgaggcccgagcccgggtgcctccagaattcctagtacaacgagcagtccacgccaaccccccaaccctacttttgcctgtagcccatatgctagaggttggtgaccctgacgacttggctttcctccgaaaggccttgccccgcctgcatgcctggttttcctggctccatcagagccaggcaggcccactgccactatcttaccgctggcggggacgggaccctgccttaccaaccttactgaaccccaagaccctaccctctgggctggatgactacccccgggcttcacacccttcagtaaccgagcggcacctggacctgcgatgttgggtggcactgggtgcccgtgtgctgacgcggctggcagagcatctgggtgaggctgaggtagctgctgagctgggcccactggctgcctcactggaggcagcagagagcctggatgagctgcactgggccccagagctaggagtctttgcagactttgggaaccacacaaaagcagtacagctgaagcccaggccccctcaggggctcgttcgggtggtgggtcggccccaacctcaactgcagtatgtagatgctcttggctatgtcagtctttttcccttgctgctgcgactgctggaccccacctcatcccgccttgggcccctgctggacattctagccgacagccgccatctctggagcccctttggtttacgctcccttgcagcctccagctccttttatggccagcgcaattcagagcatgatcccccctactggcggggtgctgtgtggctcaatgtcaactacctggctttgggagcactccaccactatgggcatctggagggtcctcaccaggctcgggctgccaaactccacggtgagctccgtgccaacgtggtaggcaatgtatggcgccagtaccaggctacaggctttctttgggagcagtacagtgaccgcgatgggcgaggcatgggctgccgccctttccacggctggaccagccttgtcttactggccatggctgaagactactgaagggagggagaggaggggagccaagacactcatgccactctggctctgaagggacaaaggcttctggcttttgcccccagccccttggataccagtaattcaaaccttcctcatttcatctcaggtgtctccttgctgtcatcccacatagccctggggtgaatgtgaatccagagtctatttttctaaataaattggaaaaaacaaaaaaaaaaaagacccacaacaccggagaggacaacatatgccgcgaggttcggggaaaaagagggacatgaaacgggcacagtggacaaaccggtgttcccacggacccaaaccatccataggcccaaactgggacaaacacagccggcccccccaaaacagagaacaaacaaacactcacacaaaaacgccccagggtaaaccccggcatacaattggaagcggggaaaagccagagaagagaagagaacaccacaacgacacacaaagagagaacagagcacggacagccaggcgaccacaacaccaacgggaagaaccgaaaacgcggccagaaaagacaagaaaaaaccacacaacacaagagcaccacaacaaccagcgaacaaagagactccaaaacaaacagacaagagaaaaacaggacaagaaccgcgaacaaaaagaaccaacaggcacagcaagaaaaaagcat

SEQ ID NO: 407946 - DNA, 2337 bp, Homo sapiens
ggcggagaggtccggcgggaggcggaggcggaggcgcaggcgctggctggcaggtgtcgctaaccggacggtggtcgccagggcgagaggcgggagccggagagccccgccgtggccccggacctcttctggggaacctaccgccctcacgtctacttcggcatgaagacccgcagcccgaagcccctcctcaccggactcaggtacttctgccctccctttggtctccctgttcttctatgtggtgacagatggcaaggaagtcctactaccagaggttggggccaaggggcagttgaagtttatcagtgggcacaccagtgaacttggtgacttccgctttacacttttgccaccaaccagtccaggggatacagcccccaagtatggcagctacaatgtcttctggacctccaacccaggactgcccctgctgacagagatggtaaagagtcgcctaaatagctggtttcagcatcggcccccaggggccccccctgaacgctacctcggcttgccaggatccctgaagtgggaggacagaggtccaagtgggcaagggcaggggcagttcttgatacagcaggtgaccctgaaaattcccatttccatagagtttgtgtttgaatcaggcagtgcccaggcaggaggaaatcaagccctgccaagactggcaggcagtctactgacccaggccctggagagccatgctgaaggctttagagagcgctttgagaagaccttccagctgaaggagaagggcctgagctctggcgagcaggttttgggtcaggctgccctcagcggcctccttggtggaattggctacttctacggacaagggctggtattgccagacatcggggtggaagggtctgagcagaaggtggacccagccctctttccacccgtacctctttttacagcagtgccctcccggtcattcttcccacgaggcttcctttgggatgaaggctttcaccagctggtggttcagcggtgggatccctccctcacccgggaagcccttggccactggctggggctgctaaatgctgatggctggattgggagggagcagatactgggggatgaggcccgagcccgggtgcctccagaattcctagtacaacgagcagtccacgccaaccccccaaccctacttttgcctgtagcccatatgctagaggttggtgaccctgacgacttggctttcctccgaaaggccttgccccgcctgcatgcctggttttcctggctccatcagagccaggcaggcccactgccactatcttaccgctggcggggacgggaccctgccttaccaaccttactgaaccccaagaccctaccctctgggctggatgactacccccgggcttcacacccttcagtaaccgagcggcacctggacctgcgatgttgggtggcactgggtgcccgtgtgctgacgcggctggcagagcatctgggtgaggctgaggtagctgctgagctgggcccactggctgcctcactggaggcagcagagagcctggatgagctgcactgggccccagagctaggagtctttgcagactttgggaaccacacaaaagcagtacagctgaagcccaggccccctcaggggctcgttcgggtggtgggtcggccccaacctcaactgcagtatgtagatgctcttggctatgtcagtctttttcccttgctgctgcgactgctggaccccacctcatcccgccttgggcccctgctggacattctagccgacagccgccatctctggagcccctttggtttacgctcccttgcagcctccagctccttttatggccagcgcaattcagagcatgatcccccctactggcggggtgctgtgtggctcaatgtcaactacctggctttgggagcactccaccactatgggcatctggagggtcctcaccaggctcgggctgccaaactccacggtgagctccgtgccaacgtggtaggcaatgtatggcgccagtaccaggctacaggctttctttgggagcagtacagtgaccgcgatgggcgaggcatgggctgccgccctttccacggctggaccagccttgtcttactggccatggctgaagactactgaagggagggagaggaggggagccaagacactcatgccactctggctctgaagggacaaaggcttctggcttttgcccccagccccttggataccagtaattcaaaccttcctcatttcatctcaggtgtctccttgctgtcatcccacatagccctggggtgaatgtgaatccagagtctatttttctaaataaattggaaaaaaca

SEQ ID NO: 407947 - DNA, 1997 bp, Homo sapiens
tgcccactgccttctcttgaataatatttcctatttatcttctccccttcaagctacaatgtcttctggacctccaacccaggactgcccctgctgacagagatggtaaagagtcgcctaaatagctggtttcagcatcggcccccaggggccccccctgaacgctacctcggcttgccaggatccctgaagtgggaggacagaggtccaagtgggcaagggcaggggcagttcttgatacagcaggtgaccctgaaaattcccatttccatagagtttgtgtttgaatcaggcagtgcccaggcaggaggaaatcaagccctgccaagactggcaggcagtctactgacccaggccctggagagccatgctgaaggctttagagagcgctttgagaagaccttccagctgaaggagaagggcctgagctctggcgagcaggttttgggtcaggctgccctcagcggcctccttggtggaattggctacttctacggacaagggctggtattgccagacatcggggtggaagggtctgagcagaaggtggacccagccctctttccacccgtacctctttttacagcagtgccctcccggtcattcttcccacgaggcttcctttgggatgaaggctttcaccagctggtggttcagcggtgggatccctccctcacccgggaagcccttggccactggctggggctgctaaatgctgatggctggattgggagggagcagatactgggggatgaggcccgagcccgggtgcctccagaattcctagtacaacgagcagtccacgccaaccccccaaccctacttttgcctgtagcccatatgctagaggttggtgaccctgacgacttggctttcctccgaaaggccttgccccgcctgcatgcctggttttcctggctccatcagagccaggcaggcccactgccactatcttaccgctggcggggacgggaccctgccttaccaaccttactgaaccccaagaccctaccctctgggctggatgactacccccgggcttcacacccttcagtaaccgagcggcacctggacctgcgatgttgggtggcactgggtgcccgtgtgctgacgcggctggcagagcatctgggtgaggctgaggtagctgctgagctgggcccactggctgcctcactggaggcagcagagagcctggatgagctgcactgggccccagagctaggagtctttgcagactttgggaaccacacaaaagcagtacagctgaagcccaggccccctcaggggctcgttcgggtggtgggtcggccccaacctcaactgcagtatgtagatgctcttggctatgtcagtctttttcccttgctgctgcgactgctggaccccacctcatcccgccttgggcccctgctggacattctagccgacagccgccatctctggagcccctttggtttacgctcccttgcagcctccagctccttttatggccagcgcaattcagagcatgatcccccctactggcggggtgctgtgtggctcaatgtcaactacctggctttgggagcactccaccactatgggcatctggagggtcctcaccaggctcgggctgccaaactccacggtgagctccgtgccaacgtggtaggcaatgtatggcgccagtaccaggctacaggctttctttgggagcagtacagtgaccgcgatgggcgaggcatgggctgccgccctttccacggctggaccagccttgtcttactggccatggctgaagactactgaagggagggagaggaggggagccaagacactcatgccactctggctctgaagggacaaaggcttctggcttttgcccccagccccttggataccagtaattcaaaccttcctcatttcatctcaggtgtctccttgctgtcatcccacatagccctggggtgaatgtgaatccagagtctatttttctaaataaattggaaaaaaca

SEQ ID NO: 407948 - DNA, 2536 bp, Homo sapiens
ggcggagaggtccggcgggaggcggaggcggaggcgcaggcgctggctggcaggtgtcgctaaccggacggtggtcgccagggcgagaggcgggagccggagaggtgaggcaggacccgggctccactgccgcctctccgagctcttgtgacgcggacctcagtgccaggatggctcggggcgagcggcggcgccgcgcagtgccggcagagggagtgcggacagccgagagggcggctcggggaggccccgggcgacgggacggccggggcggcgggccgcgtagcacggctggaggagtggctctggccgtcgtggtcctgtctttggccctgggtatgtcggggcgctgggtgctggcgtggtaccgtgcgcggcgggcggtcacgctgcactccgcgcctcctgtgttgcctgccgactcctccagccccgccgtggccccggacctcttctggggaacctaccgccctcacgtctacttcggcatgaagacccgcagcccgaagcccctcctcaccggactgatgtgggcgcagcagggcaccaccccggggactcctaagctcaggcacacgtgtgagcagggggacggtgtgggtccctatggctgggagttccacgacggcctctccttcgggcgccaacacatccaggatggggccttaaggctcaccactgagttcgtcaagaggcctgggggtcagcacggaggggactggagctggagagtgactgtagagcctcaggactcaggtacttctgccctccctttggtctccctgttcttctatgtggtgacagatggcaaggaagtcctactaccagaggttggggccaaggggcagttgaagtttatcagtgggcacaccagtgaacttggtgacttccgctttacacttttgccaccaaccagtccaggggatacagcccccaagtatggcagctacaatgtcttctggacctccaacccaggactgcccctgctgacagagatggtaaagagtcgcctaaatagctggtttcagcatcggcccccaggggccccccctgaacgctacctcggcttgccaggatccctgaagtgggaggacagaggtccaagtgggcaagggcaggggcagttcttgatacagcaggtgaccctgaaaattcccatttccatagagtttgtgtttgaatcaggcagtgcccaggcaggaggaaatcaagccctgccaagactggcaggcagtctactgacccaggccctggagagccatgctgaaggctttagagagcgctttgagaagaccttccagctgaaggagaagggcctgagctctggcgagcaggttttgggtcaggctgccctcagcggcctccttggtggaattggctacttctacggacaagggctggtattgccagacatcggggtggaagggtctgagcagaaggtggacccagccctctttccacccgtacctctttttacagcagtgccctcccggtcattcttcccacgaggcttcctttgggatgaaggctttcaccagctggtggttcagcggtgggatccctccctcacccgggaagcccttggccactggctggggctgctaaatgctgatggctggattgggagggagcagatactgggggatgaggcccgagcccgggtgcctccagaattcctagtacaacgagcagtccacgccaaccccccaaccctacttttgcctgtagcccatatgctagaggttggtgaccctgacgacttggctttcctccgaaaggccttgccccgcctgcatgcctggttttcctggctccatcagagccaggcaggcccactgccactatcttaccgctggcggggacgggaccctgccttaccaaccttactgaaccccaagaccctaccctctgggctggatgactacccccgggcttcacacccttcagtaaccgagcggcacctggacctgcgatgttgggtggcactgggtgcccgtgtgctgacgcggctggcagagcatctgggtgaggctgaggtagctgctgagctgggcccactggctgcctcactggaggcagcagagagcctggatgagctgcactgggccccagagctaggagtctttgcagactttgggaaccacacaaaagcagtacagctgaagcccaggccccctcaggggctcgttcgggtggtgggtcggccccaacctcaactgcagtatgtagatgctcttggctatgtcagtctttttcccttgctgctgcgactgctggaccccacctcatcccgccttgggcccctgctggacattctagccgacagccgccatctctggagcccctttggtttacgctcccttgcagcctccagctccttttatggccagcgcaattcagagcatgatcccccctactggcggggtgctgtgtggctcaatgtcaactacctggctttgggagcactccacccacgattgtttatctggagagagacctcaacagggtttctcctggaaaaaagccccaaagggtt

SEQ ID NO: 407949 - DNA, 2003 bp, Homo sapiens
ggcggagaggtccggcgggaggcggaggcggaggcgcaggcgctggctggcaggtgtcgctaaccggacggtggtcgccagggcgagaggcgggagccggagaggtgaggcaggacccgggctccactgccgcctctccgagctcttgtgacgcggacctcagtgccaggatggctcggggcgagcggcggcgccgcgcagtgccggcagagggagtgcggacagccgagagggcggctcggggaggccccgggcgacgggacggccggggcggcgggccgcgtagcacggctggaggagtggctctggccgtcgtggtcctgtctttggccctgggtatgtcggggcgctgggtgctggcgtggtaccgtgcgcggcgggcggtcacgctgcactccgcgcctcctgtgttgcctgccgactcctccagccccgccgtggccccggacctcttctggggaacctaccgccctcacgtctacttcggcatgaagacccgcagcccgaagcccctcctcaccggactgatgtgggcgcagcagggcaccaccccggggactcctaagctcaggcacacgtgtgagcagggggacggtgtgggtccctatggctgggagttccacgacggcctctccttcgggcgccaacacatccaggatggggccttaaggctcaccactgagttcgtcaagaggcctgggggtcagcacggaggggactggagctggagagtgactgtagagcctcaggactcaggtacttctgccctccctttggtctccctgttcttctatgtggtgacagatggcaaggaagtcctactaccagaggttggggccaaggggcagttgaagtttatcagtgggcacaccagtgaacttggtgacttccgctttacacttttgccaccaaccagtccaggggatacagcccccaagtatggcagctacaatgtcttctggacctccaacccaggactgcccctgctgacagagatggtaaagagtcgcctaaatagctggtttcagcatcggcccccaggggccccccctgaacgctacctcggcttgccaggatccctgaagtgggaggacagaggtccaagtgggcaagggcaggggcagttcttgatacagcaggtgaccctgaaaattcccatttccatagagtttgtgtttgaatcaggcagtgcccaggcaggaggaaatcaagccctgccaagactggcaggcagtctactgacccaggccctggagagccatgctgaaggctttagagagcgctttgagaagaccttccagctgaaggagaagggcctgagctctggcgagcaggttttgggtcaggctgccctcagcggcctccttggtggaattggctacttctacggacaagggctggtattgccagacatcggggtggaagggtctgagcagaaggtggacccagccctctttccacccgtacctctttttacagcagtgccctcccggtcattcttcccacgaggcttcctttgggatgaaggctttcaccagctggtggttcagcggtgggatccctccctcacccgggaagcccttggccactggctggggctgctaaatgctgatggctggattgggagggagcagatactgggggatgaggcccgagcccgggtgcctccagaattcctagtacaacgagcagtccacgtgggagcagtacagtgaccgcgatgggcgaggcatgggctgccgccctttccacggctggaccagccttgtcttactggccatggctgaagactactgaagggagggagaggaggggagccaagacactcatgccactctggctctgaagggacaaaggcttctggcttttgcccccagccccttggataccagtaattcaaaccttcctcatttcatctcaggtgtctccttgctgtcatcccacatagccctggggtgaatgtgaatccagagtctatttttctaaataaattggaaaaaaca

SEQ ID NO: 407950 - DNA, 1314 bp, Homo sapiens
ggcggagaggtccggcgggaggcggaggcggaggcgcaggcgctggctggcaggtgtcgctaaccggacggtggtcgccagggcgagaggcgggagccggagaggtgaggcaggacccgggctccactgccgcctctccgagctcttgtgacgcggacctcagtgccaggatggctcggggcgagcggcggcgccgcgcagtgccggcagagggagtgcggacagccgagagggcggctcggggaggccccgggcgacgggacggccggggcggcgggccgcgtagcacggctggaggagtggctctggccgtcgtggtcctgtctttggccctgggtatgtcggggcgctgggtgctggcgtggtaccgtgcgcggcgggcggtcacgctgcactccgcgcctcctgtgttgcctgccgactcctccagccccgccgtggccccggacctcttctggggaacctaccgccctcacgtctacttcggcatgaagacccgcagcccgaagcccctcctcaccggactgatgtgggcgcagcagggcaccaccccggggactcctaagctcaggcacacgtgtgagcagggggacggtgtgggtccctatggctgggagttccacgacggcctctccttcgggcgccaacacatccaggatggggccttaaggctcaccactgagttcgtcaagaggcctgggggtcagcacggaggggactggagctggagagtgactgtagagcctcaggactcaggtacttctgccctccctttggtctccctgttcttctatgtggtgacagatggcaaggaagtcctactaccagaggttggggccaaggggcagttgaagtttatcagtgggcacaccagtgaacttggtgacttccgctttacacttttgccaccaaccagtccaggggatacagcccccaagtatggcagctacaatgtcttctggacctccaacccaggactgcccctgctgacagagatggtaaagagtcgcctaaatagctggtttcagcatcggcccccaggggccccccctgaacgctacctcggcttgccaggatccctgaagtgggaggacagaggtccaagtgggcaagggcaggggcagttcttgatacagcaggtgaccctgaaaattcccatttccatagagtttgtgtttgaatcaggcagtgcccaggcaggaggaaatcaagccctgccaagactggcaggcagtctactgacccaggcctgggaacatgtggagtttaagagggttgaaaaactccatgaggaaagctggattggagagttgg

SEQ ID NO: 407951 - DNA, 1154 bp, Homo sapiens
ggcggagaggtccggcgggaggcggaggcggaggcgcaggcgctggctggcaggtgtcgctaaccggacggtggtcgccagggcgagaggcgggagccggagaggtgaggcaggacccgggctccactgccgcctctccgagctcttgtgacgcggacctcagtgccaggatggctcggggcgagcggcggcgccgcgcagtgccggcagagggagtgcggacagccgagagggcggctcggggaggccccgggcgacgggacggccggggcggcgggccgcgtagcacggctggaggagtggctctggccgtcgtggtcctgtctttggccctgggtatgtcggggcgctgggtgctggcgtggtaccgtgcgcggcgggcggtcacgctgcactccgcgcctcctgtgttgcctgccgactcctccagccccgccgtggccccggacctcttctggggaacctaccgccctcacgtctacttcggcatgaagacccgcagcccgaagcccctcctcaccggactgatgtgggcgcagcagggcaccaccccggggactcctaagctcaggcacacgtgtgagcagggggacggtgtgggtccctatggctgggagttccacgacggcctctccttcgggcgccaacacatccaggatggggccttaaggctcaccactgagttcgtcaagaggcctgggggtcagcacggaggggactggagctggagagtgactgtagagcctcaggactcaggtacttctgccctccctttggtctccctgttcttctatgtggtgacagatggcaaggaagtcctactaccagaggttggggccaaggggcagttgaagtttatcagtgggcacaccagtgaacttggtgacttccgctttacacttttgccaccaaccagtccaggggatacagcccccaagtatggcagaggtaactgggggaaaagaatgttgggggatggaagccactctggctctgaagggacaaaggcttctggcttttgcccccagccccttggataccagtaattcaaaccttcctcatttcatctcaggtgtctccttgctgtcatcccacatagccctggggtgaatgtgaatccagagtctatttttctaaataaattggaaaaaaca

SEQ ID NO: 407952 - DNA, 716 bp, Homo sapiens
cctagcaggcatctaagataaagaaagcaatgattcggaagtccagtagggcccatttgaccggtagcaaaatcgaaagcacgaaatagatcaaggttagggagccagacaaagcccttggaagagaggcagtattgcagatcgaagcaagcagttcagagtctatgaggcctgggaatttaaaagcaggaagagtaagaagcagaaacaagaagctccatctgaacagactcctctctccaaccttcatgagacccacagtgtgtgatgggccaccacagcactggcttctagacttttacagggaagccagtgaacaaattacctcgtcacccagaaaacaaagagctcaggaactattttggaagttccttccagtctaagactatggaactcagaatctagcaggtgtgttcctttggatagcaaaactaaagatataaatatgaataagaaattctttgccacttctcctgggcaaggttatactttatgccatctactgagataaaccagatgagtcagtttgcttctgtcagttgctgtgtcacagatgacatcttctcaaaataatattatctcacagccaagaaatagcgcttcgtttactgtgtttttctatcctgaaactaaatgggcttacgcttcatagtggctaagatactccacacacaactagtacccatagatcttttctcactgataggaaaaaaaaa

SEQ ID NO: 407953 - DNA, 466 bp, Homo sapiens
aggttagctgagtgattctggctcaaggtctcataaagttgcacacaggatatcagctagggctggagtcatctgaatgtttgactggactggaagatttacttccaagctcattcacgtaactattggccagaggcttcacttccttgccaggaggcctctctttagggctgctcacaatgtgacttcctccagagcaagtgatccaacagagagagcccaagacagaagctttatcttggaactcatatacagttaacttctgctctggtcttttggtcacatcagccaacgctgatccaatgtggaagcattttgaataccaagaggcaggagtcactgggggccatcttacaggctggcttccacaagtaccctgtatcagcagctgtctacccacctaaatactgaattaagatggtctcagccaggcacagtggctcacgcctgtaatcccagcacttta

SEQ ID NO: 407954 - DNA, 352 bp, Homo sapiens
aaggaatctagcccagggctcccactttcagttttagtcactaacccttttcaaaagcttcttttgcgagatatgacttttaaatcagacagctggagatcagttcctgcttagcggtcaagttgtgagccacctgcattgttgaccccacttaaagaggagacattgtgaggaatttgcccttttccaaaactcttgggggaaaacacaggaagtctggcagggagaaagccccagcaagtcacctttgaaaaatgtaaacaggattttcaagggtacaaagacccaggataataattttctttttaagttttgctttatttataataaaagatttgtatatatttataca

SEQ ID NO: 407955 - DNA, 361 bp, Homo sapiens
caccttcaaaatgcatccagaccccgccctttcttcgacacttggctgaccacaccctggtcctgtccacccttggctcctgtctggatgctcccagcagcctcctccctgggctcccttgccctgccccagtctgttccccacgcacagccgccaggggatcctgtaacacctgtgtttgtttcttcgggctgctgtaacaaattccaccaagttggtggcttaacacaacagaatgtatggccgggcgcagtggctcctgcctgtaatcccagcactttgggaggccgagacagtcgatcatttgaagttgcaccactgcactccagcctggataacagagcgagactccgtcttaaaa

SEQ ID NO: 407956 - DNA, 229 bp, Homo sapiens
cctttctcataaactttcagaatatttcacatttttcttctcccaaagatggtcctgtgttagtcacccttaaacttatctcacccctcttaaagaatttaagttcaacacgggcaagaaatatctatgctatcttcatactatctacatagaaggcttgcacatagtgtacattaatatactgttttaatttactgtcacgataatttacaaaccaatgtggaaaact

SEQ ID NO: 407957 - DNA, 951 bp, Homo sapiens
gctatcttaactgccatataagtgcattttaattttgcctttacttgtttagatcagtaactgctttgaaatttctcttcatttatgctctactaattttgtttatgcgtgagcaccaaaagtgttgactatttctacctcacagcagcacgggagcctcaagaaacagccattcttctaaagaaccatctcaaccactgttgggtcaggccaggccattccaggttgtccagttaaatgattgcactaggaaatttcctatgggattcttgctttatacccaggtatcgggagacaccaaggagcactgagcatgacaaccagacctggaaacgtactgagccctggaactttcattcctctagaaaatttgtcaccaagggaagtccccaaatgaccctggcactaatgtgggcttttacctgcatatctcttgttccttttgctggtctttgctgagttgtatgtctgttttgatgctgaagatgtgacttttgggaaaatctcctgggatcagctccaaactaaacagtgaaatatttgactactgtctgacagaagaaagacaaagtaaattcctgtccggagagtcagctatcttaaaaggttcatggcactacaaggtggcatctgaaaaaccatctctctagctaaagtccattcaccaatatctgttatgaatgactaaggctgtacttagtcatgatagccacatagggctatttaaatttaaataaatttctatatgttcataaatgctaagaaaaatgaaattcatagaggcagcatcttgtaactggatatactcatgaaggctgcatactagattaatagtattaatgcttactattcttctactgatttttactagattgagaatactaagggccccatgttggcttacttaggagagattagtagaaattttgttttcaccagtcattggaaaaa

SEQ ID NO: 407958 - DNA, 483 bp, Homo sapiens
ctaacatcatagcattttgttccacatgtattgactagaaaggagttctgaatctatctgagagtctgtggacattattaaattagatgaaaggttatagcttttttccaaatagaaatcgctttagtgtttttctgattacaaaacaatacatagctgggcatggtggtatgccccatagtctcagctactcaggagggtgaggcaagaggattgctttagcccagaagtttggggctctactgtgctatcattgtacctgtgctctgcactccagcctaggtaatgtagcaagaccctgtctcttaagacaaaacacacacacaaacaaaacaatacacattcactggaaatataaagaagaaaataaaaatcttctataacatcacttttaggttattgtgttaaactttgtaaggtatgtatttctatgtctaggctttttgttttcctgtatatatagtcatgtcaatactgctttat

SEQ ID NO: 407959 - DNA, 244 bp, Homo sapiens
cttttctgctttaggtagccagacagaactgttccttgcaaccagtgactgtctaattcagtcacttaatgttttgtagctttgttcagttactgggcacaacccactttctgctcaggcggcttggagacagccatgggccatatgaatcgctattattttaactttcatagtaagaacttgctccatgtgggaaagcataattattttggtttctgagtttaataagcagaaagcaaagaag

SEQ ID NO: 407960 - DNA, 270 bp, Homo sapiens
ctaaatataagtattatttttcaaattattactagtgaaagtaagaaaaatatttattttccaaggcaaataaaaacaaattatttttaaatctttttttaatgaaggcattaaatgaaacatgtagtaggtaagagtctcaaatttcttaatgtacaggagggttattgtaataattttctagaagttggccacatctagaattaaaacattggtatatatacctacctggaaacagacaaaaatgaaataaaagatttctacatatac

SEQ ID NO: 407961 - DNA, 323 bp, Homo sapiens
aaattgggagtgtagcagaatgattggaggggttactagagactaattgctgcctccttccccccacctgctgcctccaatttctgattcacttggtctcggatgggacacaagaacttgtattctaaatccccaggcagataccaatactgcagatctggaaatcacactttgagaatgactgctctaacatattaaatgcattttatttatttattaaaacttttttgaattattttttatttcaataggtttctagggagcagatgatgtttggttacataaataagttctttagtggtgatttctgagattttggtgcg

SEQ ID NO: 407962 - DNA, 843 bp, Homo sapiens
  misc_feature (805)..(805): n is a, c, g, or t
aggaatataaatagtttctggaaaggacactgacaacttcaaagcaaaatgaagttctttctgttgcttttcaccattgggttctgctgggctcagtattccccaaatacacaacaaggacggacatctattgttcatctgtttgaatggcgatgggttgatattgctcttgaatgtgagcgatatttagctccgaagggatttggaggggttcaggtctctccaccaaatgaaaatgttgcaatttacaaccctttcagaccttggtgggaaagataccaaccagttagctataaattatgcacaagatctggaaatgaagatgaatttagaaacatggtgactagatgtaacaatgttggggttcgtatttatgtggatgctgtaattaatcatatgtgtggtaacgctgtgagtgcaggaacaagcagtacctgtggaagttacttcaaccctggaagtagggactttccagcagtcccatattctggatgggatttcaatgatggtaaatgtaaaactggaagtggagatatcgagaactacaatgatgctactcaggtcagagattgtcgtctgactggtcttcttgatcttgcactggagaaggattacgtgcgttctaagattgccgaatatatgaaccatctcattgacattggtgttgcagggttcagacttgatgcttccaagcacatgtggcctggagacataaaggcaattttggacaaactgcataatctaaacagtaactggttccctgcaggaagtaaacctttcatttaccaggaggtaattgatcttngggtgggtgagcccaatttaaaagccagtgactacttt

SEQ ID NO: 407963 - DNA, 288 bp, Homo sapiens
aacaaattagatgagcatggtgatgggtgcctgtaatccctgctgcttgggaggcagaggcaggagaatcgcttgaatccgggaggcattcaatgttgcggtgagccaagacctcgccattgcactccagcctgggcaataagagcgaaactccgtctcaaacaacaacaacaacaacaacaacaacaaaagaacctggctagtctttgccttctctaaagttccccctaaaatgacgttactaatacctatcccacaggaccactgatggtgtttagagaatggatg

SEQ ID NO: 407964 - DNA, 696 bp, Homo sapiens
cttaaaactgcctgatatacttgggtgatattcttccaggaatgataaaatgagacagaaatggcctttgagtgttttcaggaagggaaaatggaaaatgaaagctggactaaaaggtgttacaaaagcaaactagttaatacttccaagaaatgaatatgctaagatattgtttgctgatcaacatttattaaacatttactgtgtaccactgatctaggctcttggccagatatgagcaacaaaaagaagatagtgtagtgcttgccttccaaaatctagcacagtcctagaaagaattcaggtttcactaaggctacttagggagagagttctctaggttctagaaattaaggcaggcacccacacaaagactcagttgcaaatgggtggaaagaatgatttttattaatcagcacaatatcttaaaaatcccagtgtagccttctttgataaaagacagagtacatgacttagaggcttaagaggggtcttctactacccattctggatttctgttttgagacttggaagttctaaagtccttgcagaggagattctgaggcccaccagtagcctaaaatctccaggcctgctcccctcactgcccccactcctgggtggaacacagacgtagaagatgctactcagctcagtggccctgcccaccatgcacctgaccctgtgaatgcctgt

SEQ ID NO: 407965 - DNA, 679 bp, Homo sapiens
gtagaaaaaagtgaggcattcaacagtcttagcagaaactaatttggggatagattgagaataataaattagtgaagctctaatagagtgcctttcttcaccaggtgaacttaagaatggagaatgaaggggggaggaggcacaagggactggctactccttatgggttctctttagttcttagaggtctttggatgtcaccaagctgagaacagctggaaggggaatttgaacatcttccaaacctctctattacttgaagttgagaagaaagtgattctgtctcacagtagcatatcaattcagtttaaactgcatttatactcaagtgtagtaattactagcccaatatttagtaattgtagattttaaaattctggccaaaactaaataatttaaaagttgaattgtttagcgcgagtgtggtggctcatgcctgtaatcccagcactttgggaggccaaggtgggcagatcgcttgaggtcaggagttgcagaccagcctggccaacatggtgaaaccccatctctatcaaaatacaaaaattggccgagtatggtggtgcctgcctgtaatcccagctaatcagtaagctaagcaggagaatcgcttgaacctgggaggcagaggttgcagtgagccaagatcgggccactgcactccagcaagaccctgtct

SEQ ID NO: 407966 - DNA, 623 bp, Homo sapiens
tagagttgtgaagattgattcttttttaatttaattttattttatttttgaggtagggtctctgtctgttgtccaggctggagtgcaatggcatgattatggctcactgcatcctatacctcctgggctcaagtgattctcccacctcagcctccccagtagctgggactacaggcacgtaacaccgtgcccggctaatttttttgtattttttgtagagacagggttttgtcatgttgcccaggctgtgcttgaactcctgggctcaagctatcctcctgccttggcttccaaagcattgtgaagactgaacaagatgtagacataaaatgctttgctgtgggtctggttcatggtgaactgtcagtacatgttaactactatggcaacactcctaaaagagttctaaagaagtgatacccaagtaacacttaattcttaatctgtgtgcctcagaagcaccagctgatcacatcagttcattgctatttctctgaaagcaccctccaaccccgccactctctgctgacatcatactttattttcattcatccaggttggacaacatcattgtcactatcaacatgactttgtcccttcttgctgtctcccttttatccctc

SEQ ID NO: 407967 - DNA, 867 bp, Homo sapiens
caaaatccagaattgcagatactgtgtactgtgttgcctgctgtttagagagaagacctttggtgattaaattgtgtgtgagtttaatttcaggagattatctttgtctgctttcttcagaaagaaactaaaaaccacatgatgtgaagggctgtcccgttcctaagttctccaccatgtgactgcctgcttcttttccattggtatctaccactgccccctaggaaggtttcttctgatctcctctgactataaggaccttaagggcgaggacactcccttgtctggcacatggggaggaggccgctttgtcaggacttaatggaaattgcttttaataaggacatcagtggaaattatgtctgggtttgttgtttgtttgaggagcgtaaaggggattgttatttattctagaaacagaataagagtctgaaccacatagaattacacaccgaagaggttttgttgtgactaccaactttgttgaggatatgaagtggctctacctagagtgctgtttgaaggactgtgggtctgagatgggctctgaagagtgccacgattgattaggtatgtctgccatgggcactggagatgggagaagtgctatgtgcaccttctgtttgccaagcttgccatagacctatctgaccatagtctatgctgatccatgtcagagtggagaggtctttttctctgggaagtctaatagactctgtggtaactattgaagtattatctaaacttaaacatatgctttgtgtttttccctgtaaccttaaatgagactgggcaaattgcattcttatcctaaaaccatgatgtggcacattttggtgttaataaaacacaacacacaaagtaaaa

SEQ ID NO: 407968 - DNA, 362 bp, Homo sapiens
ccaaaaagttagagcatattctgggatcttattgtttgtgtgagttgcgataggacagactatgctatagtaacaaatacatcccaaatgcttagtggatttacacaataaagctttatttcacaatcacacaaagtttcatatgaataaggtagctctcttccatctcagaacccatgacctccatggtgaatcatgtagcctccaagagaaagaaaaagaaggcacatcgggctgggtgcggtggctcactcctgtaagcccagcgttttgggaagctgaggcaagaggatcacttgaggccaagagtttgagaccagcctgggcaatgtgacgaaaccccatttctaccaaaaaaaaaa

SEQ ID NO: 407969 - DNA, 495 bp, Homo sapiens
gcgtggtcgcggccgaggtacgcgggctccatgtgacaagctctatgatgtgtcacatattatttgggcagcttcttttcaaatctatagaccaacaacttcagtcaaatgtgggactcaatgactgttgaaggcagtgagctagaatcaccagcaaagggctttcttaattaaaaataataaatgttgtacctcaaagtacggtcctttggcttcagagagatgacagttacagtaagagtgaactaaagttttgtcatttcgtgtaacacaaaagggctagacaattcttaaatcttcgcatctgaagggtttgtcaagggcttgcaaaatgagtcgaaatcacttaagagaaatttaatatcttaaactatgcattgccatggctctggtgtatgtctgaggcctgtttgaatactctgagcatttatggacaagaaaaggagctgtagatttcaccacctgcccccctcaacacctacccgtacgttgtat

SEQ ID NO: 407970 - DNA, 368 bp, Homo sapiens
catctagtctatacatcagtctctatcaggtcactatagcttctatcaggtcctgtgacttcttagcataaagcagtctggtgtctcccatcacccttaaaataaaatccacttacttctacagcctgcacggcctcccatgcattggcacctgcttccctctgcacctcttcccttaccattctctgccagctcactccagccacactggcattctttctagcctcgaacatgccatccaaccttcattttcttcccattccctctatctggaggcctacatagcacattagtattacccataaggtctctgcttaaaaatcacctctgcaagctgggggcagtggctcatgcctataatcccagca

SEQ ID NO: 407971 - DNA, 785 bp, Homo sapiens
ggggggaaggggagtgagagggtgagggctgcggcctcttcctccacttcaaacagataggcccaaaggactgaggaggtgccagtcctgcgctaggtgctggggacggagcagtgaataaaaccggaaaaggaccccgccctggtgtcagtgccattctagcagggggcccagacactggagataggtgggggtgaggggccaggggcattctgccaggaaggtggcaggaatgtgagtagagtgagttagcaaaggccccacagagagagcgtcgaccctcactctctggggactcacaactcctgcttgtccaaccccagccccagcctcagcccagctctctgcagctgcagccacctctgaggcttccaggacaacagcagcagcaagttagcctgctccacacagcaggtggaggaagccatgggcagctaggcagtggatcatcttctgaggcctcatctgtgccccacctgctggctcagccctctgtttccttaggggatcagcctgggtccatgacccagaaccttctgggcccccaacagcccatgctagagcggcccatgcaaaataatacagggccacaacctcccaaaccaggacctgtcctccagtctgggcagggtctgcctggggttggaatcatgcctacggtgggtcagcttcgagcacagctccaaggagtcctggccaaaaacccacagctgcggcacttaagtcctcagcagcagcagcagctacaggcactcctcatgcagcggcagctgcagcagagtcag

SEQ ID NO: 407972 - DNA, 414 bp, Homo sapiens
acgctctctctgtggggcagggagccggggtgggccctgaggtcgaggccctgcccctagctcctggagggggcctgtctgcggtccagggaagcccccaagttgaggttggctcagccctctgtttccttaggggatcagcctgggtccatgacccagaaccttctgggcccccaacagcccatgctagagcggcccatgcaaaataatacagggccacaacctcccaaaccaggacctgtcctccagtctgggcagggtctgcctggggttggaatcatgcctacggtgggtcagcttcgagcacagctccaaggagtcctggccaaaaacccacagctgcggcacttaagtcctcagcagcagcagcagctacaggcactcctcatgcagcggcagctgcagcagagtcag

SEQ ID NO: 407973 - DNA, 788 bp, Homo sapiens
tgtattgaccgtggcttatacgattacagaacaggctcctctagagggatctgaagcaccgcaggtcgtgagttggccctggcatgccagcaaagcctcttcaacacttttctagccctggagccctgggtccaaccctcctcctgacgggcaaggaacaaaacaccgtagacccagccgtttcttcagaggccactgaggggccctctacacatcagggagggccgttagcaataggaactacccctgagtcaatggccactgaaccaggagaggtaaagccctcactctctggggactcacaactcctgcttgtccaaccccagccccagcctcagcccagctctctgcagctgcagccacctctgaggcttccaggacaacagcagcagcaagttagcctgctccacacagcaggtggaggaagccatgggcagctaggcagtggatcatcttctgaggcctcatctgtgccccacctgctggctcagccctctgtttccttaggggatcagcctgggtccatgacccagaaccttctgggcccccaacagcccatgctagagcggcccatgcaaaataatacagggccacaacctcccaaaccaggacctgtcctccagtctgggcagggtctgcctggggttggaatcatgcctacggtgggtcagcttcgagcacagctccaaggagtcctggccaaaaacccacagctgcggcacttaagtcctcagcagcagcagcagctacaggcactcctcatgcagcggcagctgcagcagagtcag

SEQ ID NO: 407974 - DNA, 498 bp, Homo sapiens
  misc_feature (414)..(414): n is a, c, g, or t
  misc_feature (416)..(417): n is a, c, g, or t
  misc_feature (420)..(420): n is a, c, g, or t
  misc_feature (422)..(423): n is a, c, g, or t
  misc_feature (431)..(431): n is a, c, g, or t
  misc_feature (434)..(435): n is a, c, g, or t
  misc_feature (438)..(438): n is a, c, g, or t
  misc_feature (440)..(440): n is a, c, g, or t
ccacgctgttgtggaacaagcagctttaatttcaagtgcacgttccacaacgcagcgttcaacaacagcagcagcaagtggcacttggccctggcatgccagcaaagcctcttcaacacttttctagccctggagccctgggtccaaccctcctcctgacgggcaaggaacaaaacaccgtagacccagccgtttcttcagaggccactgaggggccctctacacatcagggagggccgttagcaataggaactacccctgagtcaatggccactgaaccaggagaggtaaagccctcactctctggggactcacaactcctgcttgtccaaccccagccccagcctcagcccagctctctgcagctgcagccacctctgaggcttccaggacaacagcagcagcgttccactncnntgngnncaacgagngtnnggngntcccgcattccgtgaatccttgttccctgattttaaacgatccgcccgtggaacccta

SEQ ID NO: 407975 - DNA, 1640 bp, Homo sapiens
  misc_feature (324)..(324): n is a, c, g, or t
ctggatccctggctggcccttcagggggcttcttccctggcaaccttgctcttcgaagcctcggacctgattcaaggcttttacaggaaaggcagctgcagctgcagcagcaacgtatgcagctggcccagaaactgcagcagcagcagcagcagcaacagcagcagcagcaccttctaggacaggtggcaatccagcagcaacagcagcagggtcctggagtacagacaaaccaagctctgggtcccaagccccagggccttatgcctcccagcagccaccaaggcctcctggtccagcagctgtcccctcaaccaccccagnggccccagggcatgctgggccctgcccaggtggctgtgttgcagcagcagcaccctggagctttgggcccccagggccctcacagacaggtgcttatgacccagtcccgggtgctcagttccccccagctggcacagcagggtcagggccttatgggacacaggctggtcacagcccagcagcagcagcagcaacaacagcaccaacagcaagggtccatggcagggctgtcccatcttcagcagagtctgatgtcacacagtgggcagcccaaactgagcgctcagcccatgggctctttacagcagcttcagcagcagcagcagctgcaacagcaacagcaacttcagcagcagcagcagcagcagctacaacagcaacagcaacttcagcagcaacagcttcaacagcagcaacagcagcagcagcttcaacaacagcagcagcaacagcttcaacagcagcaacagcagctacaacagcaacagcaacaacaacagcagcagtttcaacagcagcagcaacagcagcagatgggccttttaaaccagagtcgaactttactgtctcctcagcaacaacagcagcagcaagtggcacttggccctggcatgccagcaaagcctcttcaacacttttctagccctggagccctgggtccaaccctcctcctgacgggcaaggaacaaaacaccgtagacccagccgtttcttcagaggccactgaggggccctctacacatcagggagggccgttagcaataggaactacccctgagtcaatggccactgaaccaggagaggtaaagccctcactctctggggactcacaactcctgcttgtccaaccccagccccagcctcagcccagctctctgcagctgcagccacctctgaggcttccaggacaacagcagcagcaagttagcctgctccacacagcaggtggaggaagccatgggcagctaggcagtggatcatcttctgaggcctcatctgtgccccacctgctggctcagccctctgtttccttaggggatcagcctgggtccatgacccagaaccttctgggcccccaacagcccatgctagagcggcccatgcaaaataatacagggccacaacctcccaaaccaggacctgtcctccagtctgggcagggtctgcctggggttggaatcatgcctacggtgggtcagcttcgagcacagctccaaggagtcctggccaaaaacccacagctgcggcacttaagtcctcagcagcagcagcagctacaggcactcctcatgcagcggcagctgcagcagagtcag

SEQ ID NO: 407976 - DNA, 1185 bp, Homo sapiens
agatgagactttcatgcaagaaaataaatcctgcacatttgatgtactgctttaaacttaaagacctctttggacccgaaattgtaaggattctataaacctggagagtaatcctaagaaaaatcatcagaagaaaggaatttgtagaactaaaactgcaaacatccagaatcttgatggtgtgccaagccaaatgtcaactggaactcaaccaaaaactaaagtgctctctgataacagacccaaagaaagagtgggttcaaacaattctcctacctcagcctcccgagtagctgggattacaggtgtacgccattgtgtccggaattggtgggttcttggtctcactgacttcaagaatgaagccgtggaccctcgcgcatgtccctgaaatggagcgaaggatacaccaaaggaagagttgctacatcccatctctcctgggaaaggaacatgctgcagggagagagttgcgagagctcttcacccttctaccctgcagcaaaggaaaatgggtctcctcaaggaaggcatttccccacagcaaagctgcaagcaacatgaaataatgcaccatgactatgggttcttggcaaaggattcctggcctggtacagttagaaattgggctctattctcaagcaaagggttccaacaaaaaaataccgcagcaagcagaccgtggaatgtgcttctccactcttccatacggggtgatggcacagaatcagagttgaacatgggagggaagtggaagggataaaaatgtaatggaattgcagagttgttggcattcagatgtgtaggtggtgggtggcaagtcctgcttattgcctgtggttgtgagaggcaatggtgatgggtcttattacatagcagtaagagaaggagaaaaaaatatatatcttttcatttgtcaaagttatttatcgcaggattatttgtaattttagaaatttggagaaaaatattcaaaattgtgaaagctttaaaataaattatagtgtgtttatcccacagaattttagatattcattaaaaactacattttaaaagaaaatacattggaaaaatgctcacaatctactgcttagtgaaaaaaaatgaaaaacttggtataaaaattcttccaagtttttttaatatgcaaggaaaaaaataaaaaggaaaattttcaaatgttat

SEQ ID NO: 407977 - DNA, 465 bp, Homo sapiens
agatgagactttcatgcaagaaaataaatcctgcacatttgatgtactgctttaaacttaaagacctctttggacccgaaattgtaaggttaaccacctgggacggtaaactaccgaagtctgcttctgcttccaaaggagaaccgcagtgaaagtggtggacatgtcctaccatctgtaagctcaagatcctctagagaactgcaggattcagggtgctctactgacagtacctggggcagccggatcaggaaagagtttgtctagccacagttgtcccttgcagtcagctacagaagacccagtgctgtgagaaaatcagacagaagtatttccaagactttccatgtctgactaaccaaggtaaaatcaggaactaacctaacagcttctgcaccatggcagaagagtttgcagaaatgtacctgttttacttttcaatagattatattttaacacttttta

SEQ ID NO: 407978 - DNA, 869 bp, Homo sapiens
agatgagactttcatgcaagaaaataaatcctgcacatttgatgtactgctttaaacttaaagacctctttggacccgaaattgtaaggattctataaacctggagagtaatcctaagaaaaatcatcagaagaaaggaatttgtagaactaaaactgcaaacatccagaatcttgatggtgtgccaagccaaatgtcaactggaactcaaccaaaaactaaacctttactgatcacatgtttcctctgtcttgaatggatagcagcatcgactgttgcaataaattctccactccgcagacctgggcagcccacacctgtgccagaaattatgcaccagatggcaactgaaaatgactggatatctatgagaagaggatatttagagaaaatacacatttacaagtaaagcaagatttttaaatcaacaattcctgtactgaaatgttacatttgttaaataaataaatatatcttggactgcagaaatacagcaacttttttttttttgagatggagtcttgctgtgttgtccaggctggagtacagtggtgtgatcttggctcactgcaacctccaccccccaggttcaagcaattctcctgcctcagcctcccgagtagctgggattacaggcacactccaccatacctggctaattttttgtattttgagtagagaaggagttttgccatgttggccaggctagcctccaactcttggctagtcaagtcatccgcccacctcagcctcccaaagtgctgggattacaggcatgagccactgcatctggccaacatcagcttttaaacagaaaaaaaaaatttaggtgtcagctcaattatttctctttgaaagaatttaaatga

SEQ ID NO: 407979 - DNA, 234 bp, Homo sapiens
atctctagaaggaaaaatcaaaagagttgtcagagaagatttaggcacttgactcagagcatatcatgggtgctgaagaaataattcttgcttactcttttaataatgcaaacaaatgtaaaagtaaacagaaggtgacatgagtttaaagaatcatctctttcacaagtgagtttttgtattgttttgtttaaatactcaaggactgaatgaagtcagcataaggcacagaaa

SEQ ID NO: 407980 - DNA, 414 bp, Homo sapiens
ctatcttcaggcctgagaggcctctgcctccgctaacctcacttaaatgtgagaacaatacccgcagagataatgagctgtcagaatgtagaggacagacccatgggaacttcaaaattcccctctcaatccccattttatgttagaaaatcaagtaccgagaatgttaagttaaattatgtgaccaaaacaaggaaagaggctggtaaaactgcattttgcacaaaagtgttgattcaacatgaagtcaaataatatgttctaatgaaaccacacctctcacacacatatcctttctctcaaacctcggtgttactctggccaaaagtcttaggtttcttgaagtgtttgtggaagagtagatggagttttatttaacattatcaagaaatccaagctgcagacccacacata

SEQ ID NO: 407981 - DNA, 382 bp, Homo sapiens
tttttttttgggctagggtctcaactaggttgcccaggctggtctcgaacttctggccttaagcgatctcctcccacttcagcctcccaaagcactgggtttccaagcttcagccactgtgcgcagcctagactggattattcttcccaattaggcacctcctccctctagtaatattatatatcctcactctttgcaacatgacctttgcaagacctcctaccaggaagagtacattgactaatgtcattgactttgggcttggtcctgtgactcgctttggtaacagaaatggaagacattgcactgtaccactgttgagctaagactttaaggcataataatcaccaacccttttaagcttaaaccttccaccatagga

SEQ ID NO: 407982 - DNA, 380 bp, Homo sapiens
cttcttcaacaaaaggctgatcctgtctgcggcaagaaatacccaagatgagtgtggagcctcttacagtgccagagttaggaagtgccaaaagaaaaaaaatcacctaaaaccccacaacgatgaggctatgtcaaagggacgtaggagctaattaaaagaacatcctatgccaaaaatggaacaatttaagcaacaaaataacagagtattgaattataatccaaagtatgaaccaggcttgatggcacacacctgtaatcctagctacttggtaggctgaggcagaaggatccctggggcccgggaggatccctggagactaggagcaatatggcaaaactgcatctccaaaaacaacaacaacaacaaacaacaac

SEQ ID NO: 407983 - DNA, 754 bp, Homo sapiens
ctgatagcacggctcagttcaagtccagaacctcagaaccaaggaatctgacagtggtaactctcagtctgaggttgaaggcctaagatcctgcaggggcactggttcaagtctgaaggccagagaagctggagttctgatgtccaaggacatgacaagatggtgacccaaccccagaagagaacaaatttgctttcctctgtcttgtgttctatctgggtgctcagttgattggacagtgcctgtccaaattgggtgagagatctttcttagtccactgattcagtcctaagtctctttcagaaccaccctcataaagatacccagaaatgatactttgccagctatctgttcagccctttttacccagtcaagttgccaccaaaaattaaccatcacagggtctctccggccgctgcagtcagatgatagctggggtcaggctctcttaaagccttctccattcacatgtgcctgcccggggaaaactcaaacagctctgggctgaaacggctggaaaaccttggcatgtctatgtctctctctctctctctctctctctctctctctctctcagcttttcatttggtctttcaacatcagggcctcagggcaaccaaacttcttacattgtagccaaagacgccagaatgattatcccaagaaaaagtcactgatgctgggtgtggtggctcaggcctggaatcccagcactttaagaggctaaggtgagaggacaccaatttagcaggaa

SEQ ID NO: 407984 - DNA, 984 bp, Homo sapiens
ttttatcattaataattcaatagagataatgagaaaggattgtgtgagtgcccatctttgttccaggccccagaaatacaatggtaatgaaagacagatgtggtctctgtcgtcacagaacttgcactttaataggaaggtgtgtaaatcaaaccaccatacaaacaaatgaaagattgcaactgtggtgttaagaaagaaaagcatatagtgttctgaaatctgtaactggcatatttgacctggggatatcaagaaagaattccccaaggaagtaaacctaaggtgagatctgaatgatctcatctgaaatcacatgaaataactagttgaaaagagtgggaaattgtactccaagcagtgactacatttgtaggggagaaagcattgtgtgccagttatcaagttatagtgtctcttggctccagatctactcttcttgccctactttgtgatactggagctggaccctgtaagcaattctcttttgccagctagtagaatgttaacttttgatgtcagcagatggcaataaagtgaccctgcaaggccataagaacaggagtatatctctctttggggttctggatctctattattattaattattattattcacaggaacccagcagccattcagaggagctccaacctacatcctcgtgccattccccacctcccgccactgtcagtggctttgagcagctccaatccatctacaccctctggcaatggcagcctcttaacagaagagctcagtctgtgccctttgacaagtttcttcaccaccacaaggctgcacgttcctctggtagccacacaccttcttcgatcaggtcagaatctcagtcttggcttgggggcctcccctaggccttagttcctttattgtctcattttcttcagtacagatatagtaactgctctcatgctaaatgtggacaccttatggtcctcttttaccccttctagtagttagtaacc

SEQ ID NO: 407985 - DNA, 323 bp, Homo sapiens
cgtggtgtatgttgtgctgtttcatgaacacagattgcttctacaactaaaaattagaaacaaattatataacataatctggacataagaacaaagtataacaaaggaacagcccactaaacatgcttctctgcaagaacccacagagtgaaatcaaagagtcagagcccaacttccaaagtagaaaacaaaaagtcctcttacatggtcctggatatttacatactctattcaaatgtagaggctatatttatagaactgtcccaatatcaggtttctatgaatcaggttcttctagcacatgaatgaagacctcactgcca

SEQ ID NO: 407986 - DNA, 496 bp, Homo sapiens
agttacttttccaaaggtaaaataaaaaatttaaaaatgttttatgttcaacgttcagtacttaaaggagatcctgagttttagctagaaatgttttcagttttatgtaagttataatcagaaagattaaaaatgtacagtgaaattgtgttttaattcagttcatactcttggtgacagtttgtttttgtggactatttaggatactaaaattgaaatagataggcttccggccaagtgcagcagctcatgcccacaatctcagcactttgggaagtctaggtgggaggattgcttgagaccaacctgggcaacataacaagaccctgtctctacaagaaaataaaaataaatctagctgggttcagtgttgtgtgtagcctcagctacttgggaggctaagatgggaggattgcttgagcccaggaggtcgaagctgcagtgagccttgctcacactctgggtgacaaagcgagaccctggctcaaaaaaaaaa

SEQ ID NO: 407987 - DNA, 326 bp, Homo sapiens
gatccctcacatgcacagttcacaacagggttcacattcgtatgacaatctaatgctgccactgatctgacaggaggcagagctcaggccgtaatgctctctcgctgggcagccctcttcctagcaggccgtggactgatacaggtctgcggcccagggtatggggacccttgttctaaaggacatccacctaaacagggatcctcaaccaacagatgggtatcagaatcacctgaaaggcattttcaaactcattttgaaggctgtagtgaactactactattactggaaatgtaacagaggggttctgggatagcaaaggtgaa

SEQ ID NO: 407988 - DNA, 369 bp, Homo sapiens
ttcaaactttgtgcccattttcttattgagttgattactttactattgagttaaaatagttctttacatattctggatataagtcctctgtctgatgtatgtgtttggacataatttctcctagtctatggcttctttttcattttcctactgctgtctttcaatgaacaaagcaaaaacttttaattttgataaagtccagtttaccaattttttcttttatggtttttactttttgtgttctatcacaaatatttttctcctatgttttattccagaaattttatagttttgggttttacatttaggtctatgaaccattttagataatttttgtgtatggtatgaaccgagggtcaattttttttc

SEQ ID NO: 407989 - DNA, 1153 bp, Homo sapiens
gtgcagtggcgcaatcttggctcaccgcaacctccacttcccaggttcaagcaattctgcctcagcctcccgagtagctgggattacaggcatgcgccaccacgcctggctaattttgtatttttagtagagacggggtttctccatgttggtcaggctggtctcgaactcccaacgtcaggtgatcctcccgcctcagtctcccaaagtgctgggattacaggtgtgagccaccatgcctggtctagggaattgacttctttttgaccttctgcactcccttccccaaaaggattgtggcttctgttgaccattgacctcagcagaagttgataaggcaggaggtttccagtcctcctggaaaaccaactgctgagcatgagttgtccttggctgtctctgggcctcgcacccatgggaagttttgaggtagggcccttgctgtttacaacttctgagagagtagtgatgggaccccaaagtaagcttgtatcagagggcagtaatgaccttcccatatccccatcctgtggtcacctgggatttgggttccctggggcggaagtgggaaataggagcccagggaaggacatctgaagcacccacagtttaaatagcgactcttcttggttagccagggctgtgctcatgttgggccctacccaggtcagtggccttttcactctcaaagatcgggggtgacgaagcagcattcttaaacagtgttaggctgacagatttttccagttgaagaagctgaagtatctgccttttgagggtgactctagattacaagagagactatcagatccaatcagcttttgaaaaatcaggaatgtgcttaaaatgccagtgagtggttgtgaagatcaggtttatttcccaggataggcagtctttctttccctccttttccagttctcttttcctacctgtccttccataagcctggtctctagtgccgaggaccttggagaagagagggcccctagctaagctggagccagaaagaaccttcatggtgagtgtggtttcccaaacttgggaaatgaacctagggtgaggggcaggggagtacgtcagtgggaagtgaaatttgacaaatacactgataccagattgaccagatggtaagtagtgaatgccacgatta

SEQ ID NO: 407990 - DNA, 242 bp, Homo sapiens
tgatggggttttggggttgaagggcatctgtgatgggcattgagccacgctggccttcgccgggtgctgtctcagctgacgccccctgaccccatgtgcaaccctcaggccgcaggaacccgggcatccagggctggacgctctaggtgacagaaatttgaaatgcaagaaagacccagacaccgaaggcaggggctgccccatgagatcgctcctcatggcactggaaacagcgagtggaa

SEQ ID NO: 407991 - DNA, 468 bp, Homo sapiens
taagtttggtgagacaggctaaattgaattcaaaatccatcagtgactcatgaccatcagttagaaacattctggattgggagcctttggaatcacaggagttgagagactgccagctcacttcattgtcatttaattgtgggtcctcaaaggggaatgttccaaatgtcatgtcttcccagctttgtgtgggtggtgggaaaatgaagaggggtaatagggagagaattaatgtcaggagaataagacagaaaaggcctacaattctgtagtttctcctaagactggcttcaggattcctttgagtttaatatttctgttatgtttttatcctgagatatttaaatttccagaacattcaaggtcaatgataagactattagaaagatttttatttaaacataaactcaaaagcactcaaggataaagaagaaacctatgagaactctgagtaggtaacctacaatt

SEQ ID NO: 407992 - DNA, 371 bp, Homo sapiens
taagagatgagggtctcgttttgttgccagcttcaagctggatgacttgaattggctcaagccatcctcctgcctcagcttcctaagtaactggagctataggcacacaccactgggcctggctgggaatctgaacttttgaatttcttgacgtttgaattctcaaccagaaccattgcattaaggacatttttggaaaacgggacttttacattttaacaggttatcgaatggtggaacatgcaggcctagctgtattagcagaaacacaaatgcgtttgaagtatagctacgtgaaattagacaattcatttccacttagtgcaaatagcaaagccccatttctgagagagagcctatttgccaaaaaa

SEQ ID NO: 407993 - DNA, 901 bp, Homo sapiens
ttctcttcttataaggacaccagtcatattgggttaggacccacccataaggcctcgtttaacttaattaccctttaacggccctatttacaaatacagtcatactttgaagtactgggggtgtggattccaacacatgagttttgaggggatgcaattcagcccatagcatgtggtaatgtagaatgtatgtacagtcaataaaggaaagaatataatatttttaattatatttagaaaaaatataactttatgtatcaaggaacatgataagcaaagtaaaaagaaaaataacaaactaggaaaacatatttccattgcacatcacggacagtgttacctgttctaatatacagtgtcccaaaacagggaagagcaaccacatagaaagatgtggttgagagaaatgaacatagttcggagaaaaagaaaagcatatgacttatagccatataaaaagatgcacaacttcattgattgtaagagaaatgcaaattaaatacaacgaataccatttctcaactattagatgggtaaatggttcaagtgtgacaatgtacttagttggagaagctgaagggcatttttatacattgttgatgtgattgcaaaatggttttacaaaacaccatatgcatttattctttgacaaaacaactccacttctagaaatttattccactggcaaaattacagaaaggtgtgtggacatggctttcattggatatctactggagtagcataagactagaaccaactccaaattcccagagtaagaagctagttgaataaactatgatactccacacaatatggttctatgcagttgttaaaggaatgaggaatatctttatgatatattgcccactggaataaagcaatgtagagtaaagtgtataca

SEQ ID NO: 407994 - DNA, 2054 bp, Homo sapiens
  misc_feature (1171)..(1171): n is a, c, g, or t
atgagtgaagaatggtttgctttgggaatattttcttagttcttcaaggacatgatgtggaagtcttgacttgagtaacttcaatagcactaacaacaggaattgaaaaaaacttagaattttaaagctgagaaagagttatcgctgtgatgattttgtggttaatgacaccaagctgggactggtacagaaagtcagagaacacttacagaacttggaaaactcagctttcacagctgacaggcataagaaaagaaaacttttggaaaactcaacactaaacagcaagttattaaaagtaaatggaagcaccactgccatttgtgccacaggccttcggaatttggggaacacatgtttcatgaatgccatccttcagtcactcagtaacattgagcagttttgctgttatttcaaagaactgcccgccgtggagttaaggaatgggaaaacagcaggaaggcggacataccacaccaggagccaaggggataacaatgtgtctttggtagaagagtttagaaagacactctgtgctttatggcaaggcagccagactgcatttagcccagagtccttattttatgttgtttggaagattatgccaaactttaggggctatcaacagcaggacgcccatgaattcatgcgctaccttttggaccacctacacttggaacttcagggcggtttcaacggtgtttcccgctcagcaattctgcaggagaattctactctgtctgcaagtaacaagtgttgcataaatggagcatctactgttgtcacggctatattcggaggcattctccaaaatgaggttaactgcctcatatgtgggacagaatctagaaagtttgatccattcctagacctttcattagatattccaagtcagttcagaagtaagcgctctaagaatcaagaaaatggaccagtttgttcgttacgagattgtcttcgcagttttaccgacttagaagaacttgatgagacagagttatatatgtgccataaatgcaaaaagaaacaaaagtccacaaaaaagttttggattcaaaaactacccaaggtgctatgcttacatttgaaaagatttcattggacagcatatttaagaaataaagttgatacatacgtagaatttccactgagaggcctagacatgaaatgntacttactagagcctgagaacagtggcccggagagctgcctgtatgacctcgccgctgtggtggtgcaccatggttccggggttggttctggacattacacagcatacgcaactcacgaaggccgctggttccacttcaatgacagtactgtaacactgactgacgaggagactgtggtgaaggcgaaggcctacatccttttctacgtggaacaccaggccaaagctggatcggataaactttaatacctcctccaaatcatcattcaccaaccataccagagaaacatttccagttttccacaaatacttgatacaagatttaatttcattatgcacttttcaatttcctattttggatttagttttgtcaatggtagtgacttactgaacatggggcaccaactaattttgttgttgttctaccagaaaacctcagcagatgttttgatttgctgctttagttgtaataattcaatttttataggtagttgtaagaacttagtcttatttgacttttttattttatgttaatgttttcagttctcactttgaggcacatttacatcaatgcttttgttcctctcacatgctgaaagcaagatgtgttccttattgtgaagagcgacacaactgcctgctgcctttccacagctataatggacatcaggttgactctaaatcaaggatcatgtgtgcacaatacttgtggcccacaaaatttcacaatgactgctgaggaatcattctttttgcctgtaaaatataacaaagggcatcattaagtagaccaggtaattactgcttgtctctcaaggctgctgtctttatcagcactaactaaataaatttgttggttcagttgtacttgtcctgcaaatac

SEQ ID NO: 407995 - DNA, 855 bp, Homo sapiens
  misc_feature (733)..(733): n is a, c, g, or t
  misc_feature (744)..(744): n is a, c, g, or t
  misc_feature (754)..(754): n is a, c, g, or t
  misc_feature (767)..(767): n is a, c, g, or t
  misc_feature (775)..(775): n is a, c, g, or t
  misc_feature (779)..(779): n is a, c, g, or t
  misc_feature (783)..(783): n is a, c, g, or t
  misc_feature (797)..(797): n is a, c, g, or t
  misc_feature (810)..(810): n is a, c, g, or t
  misc_feature (820)..(820): n is a, c, g, or t
  misc_feature (839)..(839): n is a, c, g, or t
cgccgggagacggcgggcgagaaaacccggcgtccggaagcccgtgctttctttgacgcaagggctcgagacgcagccgccgtcggccgagcgcccggctagaagcgacaccagacggagcctccggagttcctccgcccccacctcgccgggtcctggagccgcagtcctcccagctgccctcctcgtggccatggagtgtccacacctgagctccagcgtctgcattgctccggactcagccaagttccccaacggctccccgtcgtcctggtgctgcagcgtgtgccggtccaacaaaagcccttgggtctgtttgacttgttcaagtgtccactgtggaaggtatgtgaatggccatgcaaaaaaacattatgaagatgcacaagtacctttaaccaaccataagaaatcagaaaagcaagataaagttcagcacacagtatgtatggattgcagtagctacagtacatactgttatcgctgtgatgattttgtggttaatgacaccaagctgggactggtacagaaagtcagagaacacttacagaacttggaaaactcagctttcacagctgacaggcataagaaaagaaaacttttggaaaactcaacactaaacagcaagttattaaaagtaaatggaagcaccactgccatttgtgccacaggccttcggaatttggggaacacatgtttcatgaatgccatccttcagtcactcagtaacaancattgagcagntttgctgtanttcaaaaaactgncccccggngggntaanggattggggaaacnccaggaagggggnaaatcccaanccagggcccaaaggggggnacaaatgggccctttg

SEQ ID NO: 407996 - DNA, 620 bp, Homo sapiens
tcactatctgtttgtgttttaatagctcagctttcacagctgacaggcataagaaaagaaaacttttggaaaactcaacactaaacagcaagttattaaaagtaaatgtaagtaattaaaatttattcaaatataagagttagttgagatttaatcactgttttgttacaactctaacatgtaatgttacctgttacagacttttataaatgtgtgtcttggatttggagtattttacacaatgtttgccacctgtactgtcgattgttgccgtgaccccagtgagtccatctgtcagcaccttcttcccatcagcgttactgctgtgctcctcttccctttttagcatggtgaaaaaatggctcttcagtaagattgtcatcacatggagagggtagaggtcatcgagatactgatgtcattgaccactgctccttcttccttgttctgtagcctgagaacagtggcccggagagctgcctgtatgacctcgccgctgtggtggtgcaccatggttccgggtgagtacaacagccagcttctggtgggtgggaatacctggtggccagcccaatgacctgcagttttgtaccactcttgctagttcttctcaactcgtg

SEQ ID NO: 407997 - DNA, 2546 bp, Homo sapiens
  misc_feature (1663)..(1663): n is a, c, g, or t
cgccgggagacggcgggcgagaaaacccggcgtccggaagcccgtgctttctttgacgcaagggctcgagacgcagccgccgtcggccgagcgcccggctagaagcgacaccagacggagcctccggagttcctccgcccccacctcgccgggtcctggagccgcagtcctcccagctgccctcctcgtggccatggagtgtccacacctgagctccagcgtctgcattgctccggactcagccaagttccccaacggctccccgtcgtcctggtgctgcagcgccttcaaatgtttatctggtgtgactgtattatgccctcagagagtactgtatgttgcccaggctggcctcgaactctaggctcaagtgattcttctgcctcagcctcccaagtagctgggactacagatgcaatcaccaccacacttggcagtgtgccggtccaacaaaagcccttgggtctgtttgacttgttcaagtgtccactgtggaaggtatgtgaatggccatgcaaaaaaacattatgaagatgcacaagtacctttaaccaaccataagaaatcagaaaagcaagataaagttcagcacacagtatgtatggattgcagtagctacagtacatactgttatcgctgtgatgattttgtggttaatgacaccaagctgggactggtacagaaagtcagagaacacttacagaacttggaaaactcagctttcacagctgacaggcataagaaaagaaaacttttggaaaactcaacactaaacagcaagttattaaaagtaaatggaagcaccactgccatttgtgccacaggccttcggaatttggggaacacatgtttcatgaatgccatccttcagtcactcagtaacattgagcagttttgctgttatttcaaagaactgcccgccgtggagttaaggaatgggaaaacagcaggaaggcggacataccacaccaggagccaaggggataacaatgtgtctttggtagaagagtttagaaagacactctgtgctttatggcaaggcagccagactgcatttagcccagagtccttattttatgttgtttggaagattatgccaaactttaggggctatcaacagcaggacgcccatgaattcatgcgctaccttttggaccacctacacttggaacttcagggcggtttcaacggtgtttcccgctcagcaattctgcaggagaattctactctgtctgcaagtaacaagtgttgcataaatggagcatctactgttgtcacggctatattcggaggcattctccaaaatgaggttaactgcctcatatgtgggacagaatctagaaagtttgatccattcctagacctttcattagatattccaagtcagttcagaagtaagcgctctaagaatcaagaaaatggaccagtttgttcgttacgagattgtcttcgcagttttaccgacttagaagaacttgatgagacagagttatatatgtgccataaatgcaaaaagaaacaaaagtccacaaaaaagttttggattcaaaaactacccaaggtgctatgcttacatttgaaaagatttcattggacagcatatttaagaaataaagttgatacatacgtagaatttccactgagaggcctagacatgaaatgntacttactagagcctgagaacagtggcccggagagctgcctgtatgacctcgccgctgtggtggtgcaccatggttccggggttggttctggacattacacagcatacgcaactcacgaaggccgctggttccacttcaatgacagtactgtaacactgactgacgaggagactgtggtgaaggcgaaggcctacatccttttctacgtggaacaccaggccaaagctggatcggataaactttaatacctcctccaaatcatcattcaccaaccataccagagaaacatttccagttttccacaaatacttgatacaagatttaatttcattatgcacttttcaatttcctattttggatttagttttgtcaatggtagtgacttactgaacatggggcaccaactaattttgttgttgttctaccagaaaacctcagcagatgttttgatttgctgctttagttgtaataattcaatttttataggtagttgtaagaacttagtcttatttgacttttttattttatgttaatgttttcagttctcactttgaggcacatttacatcaatgcttttgttcctctcacatgctgaaagcaagatgtgttccttattgtgaagagcgacacaactgcctgctgcctttccacagctataatggacatcaggttgactctaaatcaaggatcatgtgtgcacaatacttgtggcccacaaaatttcacaatgactgctgaggaatcattctttttgcctgtaaaatataacaaagggcatcattaagtagaccaggtaattactgcttgtctctcaaggctgctgtctttatcagcactaactaaataaatttgttggttcagttgtacttgtcctgcaaatac

SEQ ID NO: 407998 - DNA, 2236 bp, Homo sapiens
  misc_feature (1353)..(1353): n is a, c, g, or t
gggataacaatgtgtctttggtagaagagtttagaaagacactctgtgctttatggcaaggcagccagactgcatttagcccagagtccttattttatgttgtttggaagattatgccaaactttagtgtgccggtccaacaaaagcccttgggtctgtttgacttgttcaagtgtccactgtggaaggtatgtgaatggccatgcaaaaaaacattatgaagatgcacaagtacctttaaccaaccataagaaatcagaaaagcaagataaagttcagcacacagtatgtatggattgcagtagctacagtacatactgttatcgctgtgatgattttgtggttaatgacaccaagctgggactggtacagaaagtcagagaacacttacagaacttggaaaactcagctttcacagctgacaggcataagaaaagaaaacttttggaaaactcaacactaaacagcaagttattaaaagtaaatggaagcaccactgccatttgtgccacaggccttcggaatttggggaacacatgtttcatgaatgccatccttcagtcactcagtaacattgagcagttttgctgttatttcaaagaactgcccgccgtggagttaaggaatgggaaaacagcaggaaggcggacataccacaccaggagccaaggggataacaatgtgtctttggtagaagagtttagaaagacactctgtgctttatggcaaggcagccagactgcatttagcccagagtccttattttatgttgtttggaagattatgccaaactttaggggctatcaacagcaggacgcccatgaattcatgcgctaccttttggaccacctacacttggaacttcagggcggtttcaacggtgtttcccgctcagcaattctgcaggagaattctactctgtctgcaagtaacaagtgttgcataaatggagcatctactgttgtcacggctatattcggaggcattctccaaaatgaggttaactgcctcatatgtgggacagaatctagaaagtttgatccattcctagacctttcattagatattccaagtcagttcagaagtaagcgctctaagaatcaagaaaatggaccagtttgttcgttacgagattgtcttcgcagttttaccgacttagaagaacttgatgagacagagttatatatgtgccataaatgcaaaaagaaacaaaagtccacaaaaaagttttggattcaaaaactacccaaggtgctatgcttacatttgaaaagatttcattggacagcatatttaagaaataaagttgatacatacgtagaatttccactgagaggcctagacatgaaatgntacttactagagcctgagaacagtggcccggagagctgcctgtatgacctcgccgctgtggtggtgcaccatggttccggggttggttctggacattacacagcatacgcaactcacgaaggccgctggttccacttcaatgacagtactgtaacactgactgacgaggagactgtggtgaaggcgaaggcctacatccttttctacgtggaacaccaggccaaagctggatcggataaactttaatacctcctccaaatcatcattcaccaaccataccagagaaacatttccagttttccacaaatacttgatacaagatttaatttcattatgcacttttcaatttcctattttggatttagttttgtcaatggtagtgacttactgaacatggggcaccaactaattttgttgttgttctaccagaaaacctcagcagatgttttgatttgctgctttagttgtaataattcaatttttataggtagttgtaagaacttagtcttatttgacttttttattttatgttaatgttttcagttctcactttgaggcacatttacatcaatgcttttgttcctctcacatgctgaaagcaagatgtgttccttattgtgaagagcgacacaactgcctgctgcctttccacagctataatggacatcaggttgactctaaatcaaggatcatgtgtgcacaatacttgtggcccacaaaatttcacaatgactgctgaggaatcattctttttgcctgtaaaatataacaaagggcatcattaagtagaccaggtaattactgcttgtctctcaaggctgctgtctttatcagcactaactaaataaatttgttggttcagttgtacttgtcctgcaaatac

SEQ ID NO: 407999 - DNA, 1857 bp, Homo sapiens
  misc_feature (974)..(974): n is a, c, g, or t
tcactatctgtttgtgttttaatagctcagctttcacagctgacaggcataagaaaagaaaacttttggaaaactcaacactaaacagcaagttattaaaagtaaatggaagcaccactgccatttgtgccacaggccttcggaatttggggaacacatgtttcatgaatgccatccttcagtcactcagtaacattgagcagttttgctgttatttcaaagaactgcccgccgtggagttaaggaatgggaaaacagcaggaaggcggacataccacaccaggagccaaggggataacaatgtgtctttggtagaagagtttagaaagacactctgtgctttatggcaaggcagccagactgcatttagcccagagtccttattttatgttgtttggaagattatgccaaactttaggggctatcaacagcaggacgcccatgaattcatgcgctaccttttggaccacctacacttggaacttcagggcggtttcaacggtgtttcccgctcagcaattctgcaggagaattctactctgtctgcaagtaacaagtgttgcataaatggagcatctactgttgtcacggctatattcggaggcattctccaaaatgaggttaactgcctcatatgtgggacagaatctagaaagtttgatccattcctagacctttcattagatattccaagtcagttcagaagtaagcgctctaagaatcaagaaaatggaccagtttgttcgttacgagattgtcttcgcagttttaccgacttagaagaacttgatgagacagagttatatatgtgccataaatgcaaaaagaaacaaaagtccacaaaaaagttttggattcaaaaactacccaaggtgctatgcttacatttgaaaagatttcattggacagcatatttaagaaataaagttgatacatacgtagaatttccactgagaggcctagacatgaaatgntacttactagagcctgagaacagtggcccggagagctgcctgtatgacctcgccgctgtggtggtgcaccatggttccggggttggttctggacattacacagcatacgcaactcacgaaggccgctggttccacttcaatgacagtactgtaacactgactgacgaggagactgtggtgaaggcgaaggcctacatccttttctacgtggaacaccaggccaaagctggatcggataaactttaatacctcctccaaatcatcattcaccaaccataccagagaaacatttccagttttccacaaatacttgatacaagatttaatttcattatgcacttttcaatttcctattttggatttagttttgtcaatggtagtgacttactgaacatggggcaccaactaattttgttgttgttctaccagaaaacctcagcagatgttttgatttgctgctttagttgtaataattcaatttttataggtagttgtaagaacttagtcttatttgacttttttattttatgttaatgttttcagttctcactttgaggcacatttacatcaatgcttttgttcctctcacatgctgaaagcaagatgtgttccttattgtgaagagcgacacaactgcctgctgcctttccacagctataatggacatcaggttgactctaaatcaaggatcatgtgtgcacaatacttgtggcccacaaaatttcacaatgactgctgaggaatcattctttttgcctgtaaaatataacaaagggcatcattaagtagaccaggtaattactgcttgtctctcaaggctgctgtctttatcagcactaactaaataaatttgttggttcagttgtacttgtcctgcaaatac

SEQ ID NO: 408000 - DNA, 1156 bp, Homo sapiens
cgccgggagacggcgggcgagaaaacccggcgtccggaagcccgtgctttctttgacgcaagggctcgagacgcagccgccgtcggccgagcgcccggctagaagcgacaccagacggagcctccggagttcctccgcccccacctcgccgggtcctggagccgcagtcctcccagctgccctcctcgtggccatggagtgtccacacctgagctccagcgtctgcattgctccggactcagccaagttccccaacggctccccgtcgtcctggtgctgcagcgtgtgccggtccaacaaaagcccttgggtctgtttgacttgttcaagtgtccactgtggaaggtatgtgaatggccatgcaaaaaaacattatgaagatgcacaagtacctttaaccaaccataagaaatcagaaaagcaagataaagttcagcacacagtatgtatggattgcagtagctacagtacatactgttatcgctgtgatgattttgtggttaatgacaccaagctgggactggtacagaaagtcagagaacacttacagaacttggaaaactcagctttcacagctgacaggcataagaaaagaaaacttttggaaaactcaacactaaacagcaagttattaaaagtaaatgtaagtaattaaaatttattcaaatataagagttagttgagatttaatcactgttttgttacaactctaacatgtaatgttacctgttacagacttttataaatgtgtgtcttggatttggagtattttacacaatgtttgccacctgtactgtcgattgttgccgtgaccccagtgagtccatctgtcagcaccttcttcccatcagcgttactgctgtgctcctcttccctttttagcatggtgaaaaaatggctcttcagtaagattgtcatcacatggagagggtagaggtcatcgagatactgatgtcattgaccactgctccttcttccttgttctgtagcctgagaacagtggcccggagagctgcctgtatgacctcgccgctgtggtggtgcaccatggttccgggtgagtacaacagccagcttctggtgggtgggaatacctggtggccagcccaatgacctgcagttttgtaccactcttgctagttcttctcaactcgtg

SEQ ID NO: 408001 - DNA, 2393 bp, Homo sapiens
  misc_feature (1510)..(1510): n is a, c, g, or t
cgccgggagacggcgggcgagaaaacccggcgtccggaagcccgtgctttctttgacgcaagggctcgagacgcagccgccgtcggccgagcgcccggctagaagcgacaccagacggagcctccggagttcctccgcccccacctcgccgggtcctggagccgcagtcctcccagctgccctcctcgtggccatggagtgtccacacctgagctccagcgtctgcattgctccggactcagccaagttccccaacggctccccgtcgtcctggtgctgcagcgtgtgccggtccaacaaaagcccttgggtctgtttgacttgttcaagtgtccactgtggaaggtatgtgaatggccatgcaaaaaaacattatgaagatgcacaagtacctttaaccaaccataagaaatcagaaaagcaagataaagttcagcacacagtatgtatggattgcagtagctacagtacatactgttatcgctgtgatgattttgtggttaatgacaccaagctgggactggtacagaaagtcagagaacacttacagaacttggaaaactcagctttcacagctgacaggcataagaaaagaaaacttttggaaaactcaacactaaacagcaagttattaaaagtaaatggaagcaccactgccatttgtgccacaggccttcggaatttggggaacacatgtttcatgaatgccatccttcagtcactcagtaacattgagcagttttgctgttatttcaaagaactgcccgccgtggagttaaggaatgggaaaacagcaggaaggcggacataccacaccaggagccaaggggataacaatgtgtctttggtagaagagtttagaaagacactctgtgctttatggcaaggcagccagactgcatttagcccagagtccttattttatgttgtttggaagattatgccaaactttaggggctatcaacagcaggacgcccatgaattcatgcgctaccttttggaccacctacacttggaacttcagggcggtttcaacggtgtttcccgctcagcaattctgcaggagaattctactctgtctgcaagtaacaagtgttgcataaatggagcatctactgttgtcacggctatattcggaggcattctccaaaatgaggttaactgcctcatatgtgggacagaatctagaaagtttgatccattcctagacctttcattagatattccaagtcagttcagaagtaagcgctctaagaatcaagaaaatggaccagtttgttcgttacgagattgtcttcgcagttttaccgacttagaagaacttgatgagacagagttatatatgtgccataaatgcaaaaagaaacaaaagtccacaaaaaagttttggattcaaaaactacccaaggtgctatgcttacatttgaaaagatttcattggacagcatatttaagaaataaagttgatacatacgtagaatttccactgagaggcctagacatgaaatgntacttactagagcctgagaacagtggcccggagagctgcctgtatgacctcgccgctgtggtggtgcaccatggttccggggttggttctggacattacacagcatacgcaactcacgaaggccgctggttccacttcaatgacagtactgtaacactgactgacgaggagactgtggtgaaggcgaaggcctacatccttttctacgtggaacaccaggccaaagctggatcggataaactttaatacctcctccaaatcatcattcaccaaccataccagagaaacatttccagttttccacaaatacttgatacaagatttaatttcattatgcacttttcaatttcctattttggatttagttttgtcaatggtagtgacttactgaacatggggcaccaactaattttgttgttgttctaccagaaaacctcagcagatgttttgatttgctgctttagttgtaataattcaatttttataggtagttgtaagaacttagtcttatttgacttttttattttatgttaatgttttcagttctcactttgaggcacatttacatcaatgcttttgttcctctcacatgctgaaagcaagatgtgttccttattgtgaagagcgacacaactgcctgctgcctttccacagctataatggacatcaggttgactctaaatcaaggatcatgtgtgcacaatacttgtggcccacaaaatttcacaatgactgctgaggaatcattctttttgcctgtaaaatataacaaagggcatcattaagtagaccaggtaattactgcttgtctctcaaggctgctgtctttatcagcactaactaaataaatttgttggttcagttgtacttgtcctgcaaatac

SEQ ID NO: 408002 - DNA, 732 bp, Homo sapiens
  misc_feature (713)..(713): n is a, c, g, or t
cgccgggagacggcgggcgagaaaacccggcgtccggaagcccgtgctttctttgacgcaagggctcgagacgcagccgccgtcggccgagcgcccggctagaagcgacaccagacggagcctccggagttcctccgcccccacctcgccgggtcctggagccgcagtcctcccagctgccctcctcgtggccatggagtgtccacacctgagctccagcgtctgcattgctccggactcagccaagttccccaacggctccccgtcgtcctggtgctgcagcgtgtgccggtccaacaaaagcccttgggtctgtttgacttgttcaagtgtccactgtggaagttatcgctgtgatgattttgtggttaatgacaccaagctgggactggtacagaaagtcagagaacacttacagaacttggaaaactcagctttcacagctgacaggcataagaaaagaaaacttttggaaaactcaacactaaacagcaagttattaaaagtaaatggaagcaccactgccatttgtgccacaggccttcggaatttggggaacacatgtttcatgaatgccatccttcagtcactcagtaacattgagcagttttgctgttatttcaaagaactgcccgccgtggagttaaggaatgggaaaacagcaggaaggcggacataccacaccaggagccaaggggataacaatgtgtctntggtagaagagtttacgaa

SEQ ID NO: 408003 - DNA, 2509 bp, Homo sapiens
  misc_feature (1626)..(1626): n is a, c, g, or t
cgccgggagacggcgggcgagaaaacccggcgtccggaagcccgtgctttctttgacgcaagggctcgagacgcagccgccgtcggccgagcgcccggctagaagcgacaccagacggagcctccggagttcctccgcccccacctcgccgggtcctggagccgcagtcctcccagctgccctcctcgtggccatggagtgtccacacctgagctccagcgtctgcattgctccggactcagccaagttccccaacggctccccgtcgtcctggtgctgcagcgtgtgccggtccaacaaaagcccttgggtctgtttgacttgttcaagtgtccactgtggaaggatttggggaacctgaaaatactttgtacagataacttttttttaaaaaagaagaaaagtagaagcacttaaattctgcagttgaagagacagattcctctcctagattttgagaggtatgtgaatggccatgcaaaaaaacattatgaagatgcacaagtacctttaaccaaccataagaaatcagaaaagcaagataaagttcagcacacagtatgtatggattgcagtagctacagtacatactgttatcgctgtgatgattttgtggttaatgacaccaagctgggactggtacagaaagtcagagaacacttacagaacttggaaaactcagctttcacagctgacaggcataagaaaagaaaacttttggaaaactcaacactaaacagcaagttattaaaagtaaatggaagcaccactgccatttgtgccacaggccttcggaatttggggaacacatgtttcatgaatgccatccttcagtcactcagtaacattgagcagttttgctgttatttcaaagaactgcccgccgtggagttaaggaatgggaaaacagcaggaaggcggacataccacaccaggagccaaggggataacaatgtgtctttggtagaagagtttagaaagacactctgtgctttatggcaaggcagccagactgcatttagcccagagtccttattttatgttgtttggaagattatgccaaactttaggggctatcaacagcaggacgcccatgaattcatgcgctaccttttggaccacctacacttggaacttcagggcggtttcaacggtgtttcccgctcagcaattctgcaggagaattctactctgtctgcaagtaacaagtgttgcataaatggagcatctactgttgtcacggctatattcggaggcattctccaaaatgaggttaactgcctcatatgtgggacagaatctagaaagtttgatccattcctagacctttcattagatattccaagtcagttcagaagtaagcgctctaagaatcaagaaaatggaccagtttgttcgttacgagattgtcttcgcagttttaccgacttagaagaacttgatgagacagagttatatatgtgccataaatgcaaaaagaaacaaaagtccacaaaaaagttttggattcaaaaactacccaaggtgctatgcttacatttgaaaagatttcattggacagcatatttaagaaataaagttgatacatacgtagaatttccactgagaggcctagacatgaaatgntacttactagagcctgagaacagtggcccggagagctgcctgtatgacctcgccgctgtggtggtgcaccatggttccggggttggttctggacattacacagcatacgcaactcacgaaggccgctggttccacttcaatgacagtactgtaacactgactgacgaggagactgtggtgaaggcgaaggcctacatccttttctacgtggaacaccaggccaaagctggatcggataaactttaatacctcctccaaatcatcattcaccaaccataccagagaaacatttccagttttccacaaatacttgatacaagatttaatttcattatgcacttttcaatttcctattttggatttagttttgtcaatggtagtgacttactgaacatggggcaccaactaattttgttgttgttctaccagaaaacctcagcagatgttttgatttgctgctttagttgtaataattcaatttttataggtagttgtaagaacttagtcttatttgacttttttattttatgttaatgttttcagttctcactttgaggcacatttacatcaatgcttttgttcctctcacatgctgaaagcaagatgtgttccttattgtgaagagcgacacaactgcctgctgcctttccacagctataatggacatcaggttgactctaaatcaaggatcatgtgtgcacaatacttgtggcccacaaaatttcacaatgactgctgaggaatcattctttttgcctgtaaaatataacaaagggcatcattaagtagaccaggtaattactgcttgtctctcaaggctgctgtctttatcagcactaactaaataaatttgttggttcagttgtacttgtcctgcaaatac

SEQ ID NO: 408004 - DNA, 2116 bp, Homo sapiens
  misc_feature (1233)..(1233): n is a, c, g, or t
gttcattgcctacgtggcttttaaaaaagactcttgaaaaacattccattgtgaattccaggtcctctttaaacttaccaccagcagtaactgcctgcagagccatgtgatcatcttggcaacagccagaccttttagtgatttcattactgtggtttcctcaagctctttacacacattgattaatattttccttgcagttatcgctgtgatgattttgtggttaatgacaccaagctgggactggtacagaaagtcagagaacacttacagaacttggaaaactcagctttcacagctgacaggcataagaaaagaaaacttttggaaaactcaacactaaacagcaagttattaaaagtaaatggaagcaccactgccatttgtgccacaggccttcggaatttggggaacacatgtttcatgaatgccatccttcagtcactcagtaacattgagcagttttgctgttatttcaaagaactgcccgccgtggagttaaggaatgggaaaacagcaggaaggcggacataccacaccaggagccaaggggataacaatgtgtctttggtagaagagtttagaaagacactctgtgctttatggcaaggcagccagactgcatttagcccagagtccttattttatgttgtttggaagattatgccaaactttaggggctatcaacagcaggacgcccatgaattcatgcgctaccttttggaccacctacacttggaacttcagggcggtttcaacggtgtttcccgctcagcaattctgcaggagaattctactctgtctgcaagtaacaagtgttgcataaatggagcatctactgttgtcacggctatattcggaggcattctccaaaatgaggttaactgcctcatatgtgggacagaatctagaaagtttgatccattcctagacctttcattagatattccaagtcagttcagaagtaagcgctctaagaatcaagaaaatggaccagtttgttcgttacgagattgtcttcgcagttttaccgacttagaagaacttgatgagacagagttatatatgtgccataaatgcaaaaagaaacaaaagtccacaaaaaagttttggattcaaaaactacccaaggtgctatgcttacatttgaaaagatttcattggacagcatatttaagaaataaagttgatacatacgtagaatttccactgagaggcctagacatgaaatgntacttactagagcctgagaacagtggcccggagagctgcctgtatgacctcgccgctgtggtggtgcaccatggttccggggttggttctggacattacacagcatacgcaactcacgaaggccgctggttccacttcaatgacagtactgtaacactgactgacgaggagactgtggtgaaggcgaaggcctacatccttttctacgtggaacaccaggccaaagctggatcggataaactttaatacctcctccaaatcatcattcaccaaccataccagagaaacatttccagttttccacaaatacttgatacaagatttaatttcattatgcacttttcaatttcctattttggatttagttttgtcaatggtagtgacttactgaacatggggcaccaactaattttgttgttgttctaccagaaaacctcagcagatgttttgatttgctgctttagttgtaataattcaatttttataggtagttgtaagaacttagtcttatttgacttttttattttatgttaatgttttcagttctcactttgaggcacatttacatcaatgcttttgttcctctcacatgctgaaagcaagatgtgttccttattgtgaagagcgacacaactgcctgctgcctttccacagctataatggacatcaggttgactctaaatcaaggatcatgtgtgcacaatacttgtggcccacaaaatttcacaatgactgctgaggaatcattctttttgcctgtaaaatataacaaagggcatcattaagtagaccaggtaattactgcttgtctctcaaggctgctgtctttatcagcactaactaaataaatttgttggttcagttgtacttgtcctgcaaatac

SEQ ID NO: 408005 - DNA, 1922 bp, Homo sapiens
  misc_feature (1039)..(1039): n is a, c, g, or t
tttgttactctctctacaaggttttttcctagtgtccaaagagctgttcctctttggactaacagttaaatttacaaggggatttagagggttctgtgggcaaatttaaagttgaactaagattctatcttggacaaccagctatcaccaggctcggtaggtttgtcgcctctacctataaatcttcccactattttgctacatagacgggtgtgctcttttagctgttcttaggtagctcgtctggtttcgggggtcttagctttggctctccttgcaaagttatttctagttaattcattatgcagaaggtataggggttagtccttgctatattatctcgataaggagccaaggggataacaatgtgtctttggtagaagagtttagaaagacactctgtgctttatggcaaggcagccagactgcatttagcccagagtccttattttatgttgtttggaagattatgccaaactttaggggctatcaacagcaggacgcccatgaattcatgcgctaccttttggaccacctacacttggaacttcagggcggtttcaacggtgtttcccgctcagcaattctgcaggagaattctactctgtctgcaagtaacaagtgttgcataaatggagcatctactgttgtcacggctatattcggaggcattctccaaaatgaggttaactgcctcatatgtgggacagaatctagaaagtttgatccattcctagacctttcattagatattccaagtcagttcagaagtaagcgctctaagaatcaagaaaatggaccagtttgttcgttacgagattgtcttcgcagttttaccgacttagaagaacttgatgagacagagttatatatgtgccataaatgcaaaaagaaacaaaagtccacaaaaaagttttggattcaaaaactacccaaggtgctatgcttacatttgaaaagatttcattggacagcatatttaagaaataaagttgatacatacgtagaatttccactgagaggcctagacatgaaatgntacttactagagcctgagaacagtggcccggagagctgcctgtatgacctcgccgctgtggtggtgcaccatggttccggggttggttctggacattacacagcatacgcaactcacgaaggccgctggttccacttcaatgacagtactgtaacactgactgacgaggagactgtggtgaaggcgaaggcctacatccttttctacgtggaacaccaggccaaagctggatcggataaactttaatacctcctccaaatcatcattcaccaaccataccagagaaacatttccagttttccacaaatacttgatacaagatttaatttcattatgcacttttcaatttcctattttggatttagttttgtcaatggtagtgacttactgaacatggggcaccaactaattttgttgttgttctaccagaaaacctcagcagatgttttgatttgctgctttagttgtaataattcaatttttataggtagttgtaagaacttagtcttatttgacttttttattttatgttaatgttttcagttctcactttgaggcacatttacatcaatgcttttgttcctctcacatgctgaaagcaagatgtgttccttattgtgaagagcgacacaactgcctgctgcctttccacagctataatggacatcaggttgactctaaatcaaggatcatgtgtgcacaatacttgtggcccacaaaatttcacaatgactgctgaggaatcattctttttgcctgtaaaatataacaaagggcatcattaagtagaccaggtaattactgcttgtctctcaaggctgctgtctttatcagcactaactaaataaatttgttggttcagttgtacttgtcctgcaaatac

SEQ ID NO: 408006 - DNA, 1198 bp, Homo sapiens
ttttcagggtgacctaccctgtgagtgcctccaagtggaagccaagttagtgctcagagcaacaggggcactgatgaaactgggaaaagcaccttggcaaggacggagcccgagctcagtaatgggaaggctgtccagccctgctgccggtatccaggaaggtaaactctttcctaggagacttcaaaatcagcataaatgtccagttatctgtagtgtcgcggttatacccatccaaccactgattcaacaaccagcctccagtggggaatgcgggtcttgttcttgcatgggttggaggctcctggtatctctaactgacatccaacaaccagtaactcaagtcactaagagggtagggtggggaggaatgccaggccagagctggtgtttgcattatgtgctatgcactcacaaaacattgttttagttttagagatactgaataattcttcccaaaaaactctgcattcggtgactatcctgttcctggtcctgagtttgatcacgtcgctgctgagctctgggtttaccttctacaacagcatcagcaacccttaccagacattcctggggccgacgggggtgtacacctggaacgggctcggtgcatccttcgtttttgtgaccatgatactgtttgtggcgaacacgcagtccaaccaactctccgaagagttgttccaaatgctttacccggcaaccaccagtaaaggaacgacccacagttacggatactcgttctggctcatactgctcgtcattcttctaaatatagtcactgtaaccatcatcattttctaccagaaggccagataccagcggaagcaggagcagagaaagccaatggaatatgctccaagggacggaattttattctgaattctctttcatctcattttggcgttgcatctattgtacatcagccctgagtagtaactggttagcttctctggacaattcagcatggtaacgtgactgtcatctgtgacagcatttgtgtttcatgacactgtgttcttcattgatgctgtactcctgaaaatttttcccacaaggttggggaaatgaatgggaaatgtcgctggtctgtgtggtattcaaagcagtagtatcatgatgagcgtaacgacccttctgacctggtctcacgatctgaaataataaaaggctgtgtcatgtttcttttcaaaaagta

SEQ ID NO: 408007 - DNA, 1112 bp, Homo sapiens
tcagggcagcccagtctccgtacccagttcttaggaccctgggacctctccccaggagctgagcttgtatctcacagtcccaggtgctccaggcccactgcccacccagggtctttttaaggcggcttcttccatctgtgatgccctgtccttcctcagctcttcccagacctccttatacagcttctctctgaactgtcctagtcaatcattcattcagcacactactgcattcaccacctaggaagtgcgctgtttggtagacaagttacacaactgcttctgaaagcgtttgagtcagcacattcactattggtcatacacagccctgcacaatctttagtgttctatgcctagacatctagtttgtgtcttacaattttgtaccttctccctagtgcttaaaagagtgtaaactcctgtgtagatatgcaatacattcccatatatatgtgttccataaagataagtgacattaaaaactgtatcaccatgccatgcatgaaactccatcttcctttcagcatccttcgtttttgtgaccatgatactgtttgtggcgaacacgcagtccaaccaactctccgaagagttgttccaaatgctttacccggcaaccaccagtaaaggaacgacccacagttacggatactcgttctggctcatactgctcgtcattcttctaaatatagtcactgtaaccatcatcattttctaccagaaggccagataccagcggaagcaggagcagagaaagccaatggaatatgctccaagggacggaattttattctgaattctctttcatctcattttggcgttgcatctattgtacatcagccctgagtagtaactggttagcttctctggacaattcagcatggtaacgtgactgtcatctgtgacagcatttgtgtttcatgacactgtgttcttcattgatgctgtactcctgaaaatttttcccacaaggttggggaaatgaatgggaaatgtcgctggtctgtgtggtattcaaagcagtagtatcatgatgagcgtaacgacccttctgacctggtctcacgatctgaaataataaaaggctgtgtcatgtttcttttcaaaaagta

SEQ ID NO: 408008 - DNA, 1161 bp, Homo sapiens
caatgtccattagcataacccttcctcaggaagagtgagattttatatttgacaataaagtgttagactccatttctaaataccagacttcaaaagataaggttcaaaagtgttataagaagatattcctttttttgtcctagagaacttattttcctgtgaaaatgcctaccacaaagaagacattgatgttcttatcaagctttttcaccagccttgggtccttcattgtaatttgctctattcttgggacacaagcatggatcaccagtacaattgctgttagagactctgcttcaaatgggagcattttcatcacttacggactttttcgtggggagagtagtgaagaattgagtcacggacttgcagaaccaaagaaaaagtttgcagttttagagatactgaataattcttcccaaaaaactctgcattcggtgactatcctgttcctggtcctgagtttgatcacgtcgctgctgagctctgggtttaccttctacaacagcatcagcaacccttaccagacattcctggggccgacgggggtgtacacctggaacgggctcggtgcatccttcgtttttgtgaccatgatactgtttgtggcgaacacgcagtccaaccaactctccgaagagttgttccaaatgctttacccggcaaccaccagtaaaggaacgacccacagttacggatactcgttctggctcatactgctcgtcattcttctaaatatagtcactgtaaccatcatcattttctaccagaaggccagataccagcggaagcaggagcagagaaagccaatggaatatgctccaagggacggaattttattctgaattctctttcatctcattttggcgttgcatctattgtacatcagccctgagtagtaactggttagcttctctggacaattcagcatggtaacgtgactgtcatctgtgacagcatttgtgtttcatgacactgtgttcttcattgatgctgtactcctgaaaatttttcccacaaggttggggaaatgaatgggaaatgtcgctggtctgtgtggtattcaaagcagtagtatcatgatgagcgtaacgacccttctgacctggtctcacgatctgaaataataaaaggctgtgtcatgtttcttttcaaaaagta

SEQ ID NO: 408009 - DNA, 399 bp, Homo sapiens
taagtactgtagaacagcataatcttgtccatcagcctcagtaaacatcatctgagatgacagaaattaatgatgtcataggctgactaatgtggagcagcagaggacatttcaggattcttttgaacttcacatttacttataaatggctgcacaacattccccagcagaacctgctctgccagaatgggtggtaactgctagagggtgcagatagcctggcatttctctggcacacccctttttgggttgatgatagaagagctgcttaggtgttccatgaacacagttcccttgattggtgccctggatggattcgcctcccgccagttatgctcagtagccactctaggctgttcctgtattggaaagaatgatggtcccagagtttttaaagag

SEQ ID NO: 408010 - DNA, 1679 bp, Homo sapiens
gacaccgctgtccggctcccgggctgtcctcagcaagggcgcggtctggtactcgtgcgtcttttatcgcctcagtttccctccgccgactagcgcgcggggcccggttctccatcgcgcgcacggcagcctagcgcaatgaggcgggcagcactgcggctttgtgccttgggcaaagggcagcttactcctggaagaggactgactcaaggaccccagaaccccaagaaacagggaatcttccacattcatgaagttcgagataagttgcgggagatagtaggagcatccacaaactggagagaccatgtgaaggcaatggaagaaaggaaattacttcatagtttcttggctaaatcacaggatggactgcctcctaggagaatgaaggacagttatattgaagttctcttgcctttgggcagtgagcctgaattacgagagaaatatttgactgttcaaaacaccgtaagatttggcaggattcttgaggatcttgacagcttgggagttcttatttgttacatgcacaacaaaatccactccgccaagatgtctcctttatcgatagttacagccctggtggataagattgatatgtgtaagaagagcttgagcccagaacaggacattaagttcagtggccatgttagctgggtcgggaagacatccatggaagtgaagatgcaaatgttccagttacatggtgatgaattttgtcctgttttggatgcaacatttgtaatggtggctcgtgattctgaaaataaagggccggcatttgtaaatccactcatccctgaaagcccagaggaagaggagctctttagacaaggggaattgaacaaggggagaagaattgccttcagctccacgtcgttactgaaaatggcccccagcgctgaggagaggaccaccatacatgagatgtttctcagcacactggatccaaagactataagttttcggagtcgagttttaccctctaatgcagtgtggatggagaattcaaaactgaagagtttggaaatttgccaccctcaggagcggaacattttcaatcggatctttggtggtttccttatgaggaaggcatatgaacttgcgtgggctactgcttgtagctttggtggttctcgaccgtttgtggtagcagtagatgacatcatgtttcagaaacctgttgaggttggctcattgctctttctttcttcacaggtatgctttactcagaataattatattcaagtcagagtacacagtgaagtggcctccctgcaggagaagcagcatacaaccaccaatgtctttcatttcacgttcatgtcggaaaaagaagtgccattggttttcccaaaaacatatggagagtccatgttgtacttagatgggcagcggcatttcaactccatgagtggcccagcgaccttgagaaaggactaccttgtggagccctaagaacaccacatttgttgaaaactagcactctacccacagtgacgtggtatctgatgaagacctgatcgagtgtattgattttagtattgcttcgtgtcctccacacaggaggaggatgtattcagcctttaggatgatcagaaaagcagaaagagagagtggccggatggggctgaggggagaaagaattattaaacaataaatactttcaagacaatttt

SEQ ID NO: 408011 - DNA, 1955 bp, Homo sapiens
acaccctctgccgactccaagacgctgcctcttcctgcgggcaagggcgcggtctggtactcgtgcgtcttttatcgcctcagtttccctccgccgactagcgcgcggggcccggttctccatcgcgcgcacggcagcctagcgcaatgaggcgggcagcactgcgttcgagataagttgcgggagatagtaggagcatccacaaactggagagaccatgtgaaggcaatggaagaaaggaaattacttcatagtttcttggctaaatcacaggatggactgcctcctaggagaatgaaggacagttatattgaagttctcttgcctttgggcagtgagcctgaattacgagagaaatatttgactgttcaaaacaccgtaagatttggcaggattcttgaggatcttgacagcttgggagttcttatttgttacatgcacaacaaaatccactccgccaagatgtctcctttatcgatagttacagccctggtggataagattgatatgtgtaagaagagcttgagcccagaacaggacattaagttcagtggccatgttagctgggtcgggaagacatccatggaagtgaagatgcaaatgttccagttacatggtgatgaattttgtcctgttttggatgcaacatttgtaatggtggctcgtgattctgaaaataaagggccggcatttgtaaatccactcatccctgaaagcccagaggaagaggagctctttagacaaggggaattgaacaaggggagaagaattgccttcagctccacgtcgttactgaaaatggcccccagcgctgaggagaggaccaccatacatgagatgtttctcagcacactggatccaaagactataagttttcggagtcgagttttaccctctaatgcagtgtggatggagaattcaaaactgaagagtttggaaatttgccaccctcaggagcggaacattttcaatcggatctttggtggtttccttatgaggaaggcatatgaacttgcgtgggctactgcttgtagctttggtggttctcgaccgtttgtggtagcagtagatgacatcatgtttcagaaacctgttgaggttggctcattgctctttctttcttcacaggtatgctttactcagaataattatattcaagtcagagtacacagtgaagtggcctccctgcaggagaagcagcatacaaccaccaatgtctttcatttcacgttcatgtcggaaaaagaagtgccattggttttcccaaaaacatatggagagtccatgttgtacttagatgggcagcggcatttcaactccatgagtggcccagcgaccttgagaaaggactaccttgtggagccctaagaacaccacatttgttgaaaactagcactctacccacagtgacgtggtatctgatgaagacctgatcgagtgtattgattttagtattgcttcgtgtcctccacacaggaggaggatgtattcagcctttaggatgatcagaaaagcagaaagagagagtggccggatggggctgaggggagaaagaattattaaacaataaatactttcaagacaattttaattgtgaacctaccatgttgcctcccatcttctgaaaaaacaaaaaaattgataggcatgagccactgcacccggccggtggaaagcatttttaacaaaaaatttttaggccaggcacagtggtggctcatgcctgtaatcccagcactttgggagactgagatgggaggatcgcttgagaccagcctggggaacatagtgagaccctttctctacaaaaagttaaaaaattatctgagcatggtggtgtgcacctgtagtcccagttaggaggctgaggtgagtggattgcttgagtccgggagtttgagtctgcagtgagctatgatcatgccactgcactccagtctgggtgacagcaagac

SEQ ID NO: 408012 - DNA, 487 bp, Homo sapiens
gagtgcaagcgttgaaagagtgatagcagatctagagtacaccctcgcgaacgtgttatcctcaattaattaattaattaattaattgaggataccattggatgcattcttttcttacacatattgcaactgtcagtatacaaggtttcctgccagggtatttggatgacgttctttaaacctaaccacttgctctgtgctgtctaaatcccatcagccgtacatgattcctttgcttccctctatttcccagcttttgttgtcagagggtagatgaaaagttggggcgaagggatttaacaaaagttactgcatccgtaaagatttgtgggaagatttaggtctgaaaccataccattagaaggtgtttagagatgatctagataaggaaatacaggaccatttggtcattctttcattcaccagacagctatttagcacattctgctagtggctccgcaggataacacgttcgcgagggggatcc

SEQ ID NO: 408013 - DNA, 407 bp, Homo sapiens
ttcatataaattatatttggttttgatcagttagttattgaaggactgaggattgctatagttaatttcctataactggaatgtatattttgaagtgctaggaaaaacacataaactcaacacagtatttgaaatactacagatttatcctttagttttgaattattgctggttctctaattgattttccctttattcatatagcatgttcatctatacatgtgaatcatggtgtgtgtggtaattagtatcagcttttcttttaagagcttaagttttgtaagcactaatatacgcttgcacttttgggcagtggcattaactaaaattgcattctttgccttagcttgatgtaagtctttgcttcatttttctggcttaaacttttctaacaaccaggagactat

SEQ ID NO: 408014 - DNA, 2828 bp, Homo sapiens
gacaccgctgtccggctcccgggctgtcctcagcaagggcgcggtctggtactcgtgcgtcttttatcgcctcagtttccctccgccgactagcgcgcggggcccggttctccatcgcgcgcacggcagcctagcgcaatgaggcgggcagcactgcggctttgtgccttgggcaaagggcagcttactcctggaagaggactgactcaaggaccccagaaccccaagaaacagggaatcttccacattcatgaagcatgttcatctatacatgtgaatcatgttcgagataagttgcgggagatagtaggagcatccacaaactggagagaccatgtgaaggcaatggaagaaaggaaattacttcatagtttcttggctaaatcacaggatggactgcctcctaggagaatgaaggacagttatattgaagttctcttgcctttgggcagtgagcctgaattacgagagaaatatttgactgttcaaaacaccgtaagatttggcaggattcttgaggatcttgacagcttgggagttcttatttgttacatgcacaacaaaatccactccgccaagatgtctcctttatcgatagttacagccctggtggataagattgatatgtgtaagaagagcttgagcccagaacaggacattaagttcagtggccatgttagctgggtcgggaagacatccatggaagtgaagatgcaaatgttccagttacatggtgatgaattttgtcctgttttggatgcaacatttgtaatggtggctcgtgattctgaaaataaagggccggcatttgtaaatccactcatccctgaaagcccagaggaagaggagctctttagacaaggggaattgaacaaggggagaagaattgccttcagctccacgtcgttactgaaaatggcccccagcgctgaggagaggaccaccatacatgagatgtttctcagcacactggatccaaagactataagttttcggagtcgagttttaccctctaatgcagtgtggatggagaattcaaaactgaagagtttggaaatttgccaccctcaggagcggaacattttcaatcggatctttggtggtttccttatgaggaaggcatatgaacttgcgtgggctactgcttgtagctttggtggttctcgaccgtttgtggtagcagtagatgacatcatgtttcagaaacctgttgaggttggctcattgctctttctttcttcacaggtatgctttactcagaataattatattcaagtcagagtacacagtgaagtggcctccctgcaggagaagcagcatacaaccaccaatgtctttcatttcacgttcatgtcggaaaaagaagtgccattggttttcccaaaaacatatggagagtccatgttgtacttagatgggcagcggcatttcaactccatgagtggcccagcgaccttgagaaaggactaccttgtggagccctaagaacaccacatttgttgaaaactagcactctacccacagtgacgtggtatctgatgaagacctgatcgagtgtattgattttagtattgcttcgtgtcctccacacaggaggaggatgtattcagcctttaggatgatcagaaaagcagaaagagagagtggccggatggggctgaggggagaaagaattattaaacaataaatactttcaagacaattttaattgtgaacctaccatgttgcctcccatcttctgaaaaaacaaaaaaattgataggctgggcgtggtggctcatgcctataatcccagcactttgggaggctgaggcgggcggatcatgaagtcaggagatcaagaccatcctggccaacatggtgaaaccctgtctctactaaaaatacagaaaattagccgtggtggcatgtgcctgtagtcccagctacttgggaggctgaggcaggagaattgcttgaacccgggaggtggaggttgcagtgagctgagattgcaccattgcactccagcctgggcgacagagagagactgtctcaaattaattaattaattaattaattgaggataccattggatgcattcttttcttacacatattgcaactgtcagtatacaaggtttcctgccagggtatttggatgacgttctttaaacctaaccacttgctctgtgctgtctaaatcccatcagccgtacatgattcctttgcttccctctatttcccagcttttgttgtcagagggtagatgaaaagttggggcgaagggatttaacaaaagttactgcatccgtaaagatttgtgggaagatttaggtctgaaaccataccattagaaggtgtttagagatgatctagataaggaaatacaggaccatttggtcattctttcattcaccagacagctatttagcacattctgctagtggctccgcaggatatatctgatttaaaaaataggaaccacaataataatagctgcttatgcttatggagcattgccatgtgctagataggcaccatcctcagcccttggcaggtctgagctcctttatttcttccaatcaacactatgaggcaggttctgtaaccccccttagggttaggccactcgggaaactgaagcacagagagtttaagtaacttcctggaggtccgacgcgtaacatgtggaggtgctgggattcaaaaccaggcaatgtgggtcccgggcactcttgaccagtgcctgtacttcttccaaggaatagagcaagggaggtcataccgaatatcacagtgtcacctaggaagcccaagggaggtattcccgttaatctgcagccaagg

SEQ ID NO: 408015 - DNA, 2646 bp, Homo sapiens
gacaccgctgtccggctcccgggctgtcctcagcaagggcgcggtctggtactcgtgcgtcttttatcgcctcagtttccctccgccgactagcgcgcggggcccggttctccatcgcgcgcacggcagcctagcgcaatgaggcgggcagcactgcggctttgtgccttgggcaaagggcagcttactcctggaagaggactgactcaaggaccccagaaccccaagaaacagggaatcttccacattcatgaagcatgttcatctatacatgtgaatcatgttcgagataagttgcgggagatagtaggagcatccacaaactggagagaccatgtgaaggcaatggaagaaaggaaattacttcatagtttcttggctaaatcacaggatggactgcctcctaggagaatgaaggacagttatattgaagttctcttgcctttgggcagtgagcctgaattacgagagaaatatttgactgttcaaaacaccgtaagatttggcaggattcttgaggatcttgacagcttgggagttcttatttgttacatgcacaacaaaatccactccgccaagatgtctcctttatcgatagttacagccctggtggataagattgatatgtgtaagaagagcttgagcccagaacaggacattaagttcagtggccatgttagctgggtcgggaagacatccatggaagtgaagatgcaaatgttccagttacatggtgatgaattttgtcctgttttggatgcaacatttgtaatggtggctcgtgattctgaaaataaagggccggcatttgtaaatccactcatccctgaaagcccagaggaagaggagctctttagacaaggggaattgaacaaggggagaagaattgccttcagctccacgtcgttactgaaaatggcccccagcgctgaggagaggaccaccatacatgagatgtttctcagcacactggatccaaagactataagttttcggagtcgagttttaccctctaatgcagtgtggatggagaattcaaaactgaagagtttggaaatttgccaccctcaggagcggaacattttcaatcggatctttggtggtttccttatgaggaaggcatatgaacttgcgtgggctactgcttgtagctttggtggttctcgaccgtttgtggtagcagtagatgacatcatgtttcagaaacctgttgaggttggctcattgctctttctttcttcacaggtatgctttactcagaataattatattcaagtcagagtacacagtgaagtggcctccctgcaggagaagcagcatacaaccaccaatgtctttcatttcacgttcatgtcggaaaaagaagtgccattggttttcccaaaaacatatggagagtccatgttgtacttagatgggcagcggcatttcaactccatgagtggcccagcgaccttgagaaaggactaccttgtggagccctaagaacaccacatttgttgaaaactagcactctacccacagtgacgtggtatctgatgaagacctgatcgagtgtattgattttagtattgcttcgtgtcctccacacaggaggaggatgtattcagcctttaggatgatcagaaaagcagaaagagagagtggccggatggggctgaggggagaaagaattattaaacaataaatactttcaagacaattttaattgtgaacctaccatgttgcctcccatcttctgaaaaaacaaaaaaattgataggctgggcgtggtggctcatgcctataatcccagcactttgggaggctgaggcgggcggatcatgaagtcaggagatcaagaccatcctggccaacatggtgaaaccctgtctctactaaaaatacagaaaattagccgtggtggcatgtgcctgtagtcccagctacttgggaggctgaggcaggagaattgcttgaacccgggaggtggaggttgcagtgagctgagattgcaccattgcactccagcctgggcgacagagagagactgtctcaaattaattaattaattaattaattgaggataccattggatgcattcttttcttacacatattgcaactgtcagtatacaaggtttcctgccagggtatttggatgacgttctttaaacctaaccacttgctctgtgctgtctaaatcccatcagccgtacatgattcctttgcttccctctatttcccagcttttgttgtcagagggtagatgaaaagttggggcgaagggatttaacaaaagttactgcatccgtaaagatttgtgggaagatttaggtctgaaaccataccattagaaggtgtttagagatgatctagataaggaaatacaggaccatttggtcattctttcattcaccagacagctatttagcacattctgctagtggctccgcaggatatatctgatttaaaaaataggaaccacaataataatagctgcttatgcttatggagcattgccatgtgctagataggcaccatcctcagcccttggcaggtctgagctcctttatttcttccaatcaacactatgaggcaggttctgtaaccccccttagggttaggccactcgggatacacgttcgcgagggtaccggctcgatcg

SEQ ID NO: 408016 - DNA, 2461 bp, Homo sapiens
gacaccgctgtccggctcccgggctgtcctcagcaagggcgcggtctggtactcgtgcgtcttttatcgcctcagtttccctccgccgactagcgcgcggggcccggttctccatcgcgcgcacggcagcctagcgcaatgaggcgggcagcactgcggctttgtgccttgggcaaagggcagcttactcctggaagaggactgactcaaggaccccagaaccccaagaaacagggaatcttccacattcatgaagcatgttcatctatacatgtgaatcatgttcgagataagttgcgggagatagtaggagcatccacaaactggagagaccatgtgaaggcaatggaagaaaggaaattacttcatagtttcttggctaaatcacaggatggactgcctcctaggagaatgaaggacagttatattgaagttctcttgcctttgggcagtgagcctgaattacgagagaaatatttgactgttcaaaacaccgtaagatttggcaggattcttgaggatcttgacagcttgggagttcttatttgttacatgcacaacaaaatccactccgccaagatgtctcctttatcgatagttacagccctggtggataagattgatatgtgtaagaagagcttgagcccagaacaggacattaagttcagtggccatgttagctgggtcgggaagacatccatggaagtgaagatgcaaatgttccagttacatggtgatgaattttgtcctgttttggatgcaacatttgtaatggtggctcgtgattctgaaaataaagggccggcatttgtaaatccactcatccctgaaagcccagaggaagaggagctctttagacaaggggaattgaacaaggggagaagaattgccttcagctccacgtcgttactgaaaatggcccccagcgctgaggagaggaccaccatacatgagatgtttctcagcacactggatccaaagactataagttttcggagtcgagttttaccctctaatgcagtgtggatggagaattcaaaactgaagagtttggaaatttgccaccctcaggagcggaacattttcaatcggatctttggtggtttccttatgaggaaggcatatgaacttgcgtgggctactgcttgtagctttggtggttctcgaccgtttgtggtagcagtagatgacatcatgtttcagaaacctgttgaggttggctcattgctctttctttcttcacaggtatgctttactcagaataattatattcaagtcagagtacacagtgaagtggcctccctgcaggagaagcagcatacaaccaccaatgtctttcatttcacgttcatgtcggaaaaagaagtgccattggttttcccaaaaacatatggagagtccatgttgtacttagatgggcagcggcatttcaactccatgagtggcccagcgaccttgagaaaggactaccttgtggagccctaagaacaccacatttgttgaaaactagcactctacccacagtgacgtggtatctgatgaagacctgatcgagtgtattgattttagtattgcttcgtgtcctccacacaggaggaggatgtattcagcctttaggatgatcagaaaagcagaaagagagagtggccggatggggctgaggggagaaagaattattaaacaataaatactttcaagacaattttaattgtgaacctaccatgttgcctcccatcttctgaaaaaacaaaaaaattgataggctgggcgtggtggctcatgcctataatcccagcactttgggaggctgaggcgggcggatcatgaagtcaggagatcaagaccatcctggccaacatggtgaaaccctgtctctactaaaaatacagaaaattagccgtggtggcatgtgcctgtagtcccagctacttgggaggctgaggcaggagaattgcttgaacccgggaggtggaggttgcagtgagctgagattgcaccattgcactccagcctgggcgacagagagagactgtctcaaattaattaattaattaattaattgaggataccattggatgcattcttttcttacacatattgcaactgtcagtatacaaggtttcctgccagggtatttggatgacgttctttaaacctaaccacttgctctgtgctgtctaaatcccatcagccgtacatgattcctttgcttccctctatttcccagcttttgttgtcagagggtagatgaaaagttggggcgaagggatttaacaaaagttactgcatccgtaaagatttgtgggaagatttaggtctgaaaccataccattagaaggtgtttagagatgatctagataaggaaatacaggaccatttggtcattctttcattcaccagacagctatttagcacattctgctagtggctccgcaggataacacgttcgcgagggggatcc

SEQ ID NO: 408017 - DNA, 922 bp, Homo sapiens
gacaccgctgtccggctcccgggctgtcctcagcaagggcgcggtctggtactcgtgcgtcttttatcgcctcagtttccctccgccgactagcgcgcggggcccggttctccatcgcgcgcacggcagcctagcgcaatgaggcgggcagcactgcggctttgtgccttgggcaaagggcagcttactcctggaagaggactgactcaaggaccccagaaccccaagaaacagggaatcttccacattcatgaagcatgttcatctatacatgtgaatcatgttcgagataagttgcgggagatagtaggagcatccacaaactggagagaccatgtgaaggcaatggaagaaaggaaattacttcatagtttcttggctaaatcacaggatggactgcctcctaggagaatgaaggacagttatattgaagttctcttgcctttgggcagtgagcctgaattacgagagaaatatttgactgttcaaaacaccgtaagatttggcaggattcttgaggatcttgacagcttgggagttcttatttgttacatgcacaacaaaatccactccgccaagatgtctcctttatcgatagttacagccctggtggataagattgatatgtgtaagaagagcttgagcccagaacaggacattaagttcagtggccatgttagctgggtcgggaagacatccatggaagtgaagatgcaaatgttccagttacatggtgatgaattttgtcctgttttggatgcaacatttgtaatggtggctcgtgattctgaaaataaagggccggcatttgtaaatccactcatccctgaaagcccagaggaagaggagctctttagacaaggggaatgtacattaatttgtttataataaaataaatttgaaaagcacattaattacgctg

SEQ ID NO: 408018 - DNA, 848 bp, Homo sapiens
gacaccgctgtccggctcccgggctgtcctcagcaagggcgcggtctggtactcgtgcgtcttttatcgcctcagtttccctccgccgactagcgcgcggggcccggttctccatcgcgcgcacggcagcctagcgcaatgaggcgggcagcactgcggctttgtgccttgggcaaagggcagcttactcctggaagaggactgactcaaggaccccagaaccccaagaaacagggaatcttccacattcatgaagcatgttcatctatacatgtgaatcatgttcgagataagttgcgggagatagtaggagcatccacaaactggagagaccatgtgaaggcaatggaagaaaggaaattacttcatagtttcttggctaaatcacaggatggactgcctcctaggagaatgaaggacagttatattgaagttctcttgcctttgggcagtgagcctgaattacgagagaaatatttgactgttcaaaacaccgtaagatttggcaggattcttgaggatcttgacagcttgggagttcttatttgttacatgcacaacaaaatccactccgccaagatgtctcctttatcgatagttacagccctggtggataagattgatatgtgtaagaagagcttgagcccagaacaggacattaagttcagtggccatgttagctgggtcgggaagacatccatggaagtgaagatgcaaatgttccaggccggcatttgtaaatccactcatccctgaaagcccagaggaagaggagctctttagacaaggggaatgtacattaatttgtttataataaaataaatttgaaaagcacattaattacgctg

SEQ ID NO: 408019 - DNA, 168 bp, Homo sapiens
atttagagagttgtgcatccatcaccacagtcaattttagaacattttcatcaccctgaagtgtgttatttatttttaaagggagaccaacatgatttgcatttaattcactgtttgctttatttcacagatttggcaggattcttgaggatcttgacagcttgggag

SEQ ID NO: 408020 - DNA, 2779 bp, Homo sapiens
  misc_feature (290)..(290): n is a, c, g, or t
aagagcagtaacacaaacagggctgaaacacgccctcctcccgtccccacacccccgcgacttgccatgttgcgggtgatgtgaaggagagaagtgctgtggcccttcagggagcacagacctaggggctccctgagccagggctgtgacaccctctttggggctctgcggtttctggtatcttcaaacttccgggcaccactgcattccccttgtccagacacaggtgcccacagcagaagccgcttgtggttcatcagatccagctgcagacttgcatagaaccggcncctttgccggcgcctggagctgcctgcccagctgcagcagctggtgtgtccggctctgcgcagtggccagaccctgcgttcgctcgcctgcacacccctcgctgttccgtgcctggctcaccctcggcaggcgtggaatcctggctggtagcatgagctgagcacagcctgccaggccacgtcagtggaacaagtctggcgggcctgatcaaaactcaggcaaaggcaccactggtcacagagctttctagctggaaaagcaacacctgaaggatcccgtgacacaatcaacctgctaggagatccctgccaccctgagaggctgcaggaagctgcctccatccaggcctcttcacagaaggagaattgcagagaccgtaggatttttctactcacaggaacagatggtgtccggtcaggaaggtaaaatgcttcaagaaaagtgcaatagggattataatactgatgatctgagactctgataatgactctgagatgattcccaattctatgatgaatcatctcagaatgactccgagatgatgattcctgattctacgatgattgaggcagagctcactggttggtgaatctagttggtagagctgaggcaccgcaataccatcatttctttctgaggaaatctaaagatgaaagaattcatcactaaaactgtactacgagaaatgctaaaggaagttgttcaaactgatggaaaattataccagatggacacttgaatttgcccaaaggaatgaagagcaccagaaatggcaaatgtgtggtcttactgtatcttcatgtcagtgtcatatcaaggacaagacagcagaaatggtccactccagttgcagatagtaaagaccctgtagctccagcatcagctcacctttctggttttgaatttcatgcttattaccatcctgtcatcacctactgtttccatggtagacgggactaagagatgggctttgtgccttgggcaaagggcagcttactcctggaagaggactgactcaaggaccccagaaccccaagaaacagggaatcttccacattcatgaagttcgagataagttgcgggagatagtaggagcatccacaaactggagagaccatgtgaaggcaatggaagaaaggaaattacttcatagtttcttggctaaatcacaggatggactgcctcctaggagaatgaaggacagttatattgaagttctcttgcctttgggcagtgagcctgaattacgagagaaatatttgactgttcaaaacaccgtaagatttggcaggattcttgaggatcttgacagcttgggagttcttatttgttacatgcacaacaaaatccactccgccaagatgtctcctttatcgatagttacagccctggtggataagattgatatgtgtaagaagagcttgagcccagaacaggacattaagttcagtggccatgttagctgggtcgggaagacatccatggaagtgaagatgcaaatgttccagttacatggtgatgaattttgtcctgttttggatgcaacatttgtaatggtggctcgtgattctgaaaataaagggccggcatttgtaaatccactcatccctgaaagcccagaggaagaggagctctttagacaaggggaattgaacaaggggagaagaattgccttcagctccacgtcgttactgaaaatggcccccagcgctgaggagaggaccaccatacatgagatgtttctcagcacactggatccaaagactataagttttcggagtcgagttttaccctctaatgcagtgtggatggagaattcaaaactgaagagtttggaaatttgccaccctcaggagcggaacattttcaatcggatctttggtggtttccttatgaggaaggcatatgaacttgcgtgggctactgcttgtagctttggtggttctcgaccgtttgtggtagcagtagatgacatcatgtttcagaaacctgttgaggttggctcattgctctttctttcttcacaggtatgctttactcagaataattatattcaagtcagagtacacagtgaagtggcctccctgcaggagaagcagcatacaaccaccaatgtctttcatttcacgttcatgtcggaaaaagaagtgccattggttttcccaaaaacatatggagagtccatgttgtacttagatgggcagcggcatttcaactccatgagtggcccagcgaccttgagaaaggactaccttgtggagccctaagaacaccacatttgttgaaaactagcactctacccacagtgacgtggtatctgatgaagacctgatcgagtgtattgattttagtattgcttcgtgtcctccacacaggaggaggatgtattcagcctttaggatgatcagaaaagcagaaagagagagtggccggatggggctgaggggagaaagaattattaaacaataaatactttcaagacaatttt

SEQ ID NO: 408021 - DNA, 1706 bp, Homo sapiens
gacaccgctgtccggctcccgggctgtcctcagcaagggcgcggtctggtactcgtgcgtcttttatcgcctcagtttccctccgccgactagcgcgcggggcccggttctccatcgcgcgcacggcagcctagcgcaatgaggcgggcagcactgcggctttgtgccttgggcaaagggcagcttactcctggaagaggactgactcaaggaccccagaaccccaagaaacagggaatcttccacattcatgaagcatgttcatctatacatgtgaatcatgttcgagataagttgcgggagatagtaggagcatccacaaactggagagaccatgtgaaggcaatggaagaaaggaaattacttcatagtttcttggctaaatcacaggatggactgcctcctaggagaatgaaggacagttatattgaagttctcttgcctttgggcagtgagcctgaattacgagagaaatatttgactgttcaaaacaccgtaagatttggcaggattcttgaggatcttgacagcttgggagttcttatttgttacatgcacaacaaaatccactccgccaagatgtctcctttatcgatagttacagccctggtggataagattgatatgtgtaagaagagcttgagcccagaacaggacattaagttcagtggccatgttagctgggtcgggaagacatccatggaagtgaagatgcaaatgttccagttacatggtgatgaattttgtcctgttttggatgcaacatttgtaatggtggctcgtgattctgaaaataaagggccggcatttgtaaatccactcatccctgaaagcccagaggaagaggagctctttagacaaggggaattgaacaaggggagaagaattgccttcagctccacgtcgttactgaaaatggcccccagcgctgaggagaggaccaccatacatgagatgtttctcagcacactggatccaaagactataagttttcggagtcgagttttaccctctaatgcagtgtggatggagaattcaaaactgaagagtttggaaatttgccaccctcaggagcggaacattttcaatcggatctttggtggtttccttatgaggaaggcatatgaacttgcgtgggctactgcttgtagctttggtggttctcgaccgtttgtggtagcagtagatgacatcatgtttcagaaacctgttgaggttggctcattgctctttctttcttcacaggtatgctttactcagaataattatattcaagtcagagtacacagtgaagtggcctccctgcaggagaagcagcatacaaccaccaatgtctttcatttcacgttcatgtcggaaaaagaagtgccattggttttcccaaaaacatatggagagtccatgttgtacttagatgggcagcggcatttcaactccatgagtggcccagcgaccttgagaaaggactaccttgtggagccctaagaacaccacatttgttgaaaactagcactctacccacagtgacgtggtatctgatgaagacctgatcgagtgtattgattttagtattgcttcgtgtcctccacacaggaggaggatgtattcagcctttaggatgatcagaaaagcagaaagagagagtggccggatggggctgaggggagaaagaattattaaacaataaatactttcaagacaatttt

SEQ ID NO: 408022 - DNA, 2699 bp, Homo sapiens
gacaccgctgtccggctcccgggctgtcctcagcaagggcgcggtctggtactcgtgcgtcttttatcgcctcagtttccctccgccgactagcgcgcggggcccggttctccatcgcgcgcacggcagcctagcgcaatgaggcgggcagcactgcggctttgtgccttgggcaaagggcagcttactcctggaagaggactgactcaaggaccccagaaccccaagaaacagggaatcttccacattcatgaagcatgttcatctatacatgtgaatcatgttcgagataagttgcgggagatagtaggagcatccacaaactggagagaccatgtgaaggcaatggaagaaaggaaattacttcatagtttcttggctaaatcacaggatggactgcctcctaggagaatgaaggacagttatattgaagttctcttgcctttgggcagtgagcctgaattacgagagaaatatttgactgttcaaaacaccgtaagatttggcaggattcttgaggatcttgacagcttgggagttcttatttgttacatgcacaacaaaatccactccgccaagatgtctcctttatcgatagttacagccctggtggataagattgatatgtgtaagaagagcttgagcccagaacaggacattaagttcagtggccatgttagctgggtcgggaagacatccatggaagtgaagatgcaaatgttccagttacatggtgatgaattttgtcctgttttggatgcaacatttgtaatggtggctcgtgattctgaaaataaagggccggcatttgtaaatccactcatccctgaaagcccagaggaagaggagctctttagacaaggggaattgaacaaggggagaagaattgccttcagctccacgtcgttactgaaaatggcccccagcgctgaggagaggaccaccatacatgagatgtttctcagcacactggatccaaagactataagttttcggagtcgagttttaccctctaatgcagtgtggatggagaattcaaaactgaagagtttggaaatttgccaccctcaggagcggaacattttcaatcggatctttggtggtttccttatgaggaaggcatatgaacttgcgtgggctactgcttgtagctttggtggttctcgaccgtttgtggtagcagtagatgacatcatgtttcagaaacctgttgaggttggctcattgctctttctttcttcacaggtatgctttactcagaataattatattcaagtcagagtacacagtgaagtggcctccctgcaggagaagcagcatacaaccaccaatgtctttcatttcacgttcatgtcggaaaaagaagtgccattggttttcccaaaaacatatggagagtccatgttgtacttagatgggcagcggcatttcaactccatgagtggcccagcgaccttgagaaaggactaccttgtggagccctaagaacaccacatttgttgaaaactagcactctacccacagtgacgtggtatctgatgaagacctgatcgagtgtattgattttagtattgcttcgtgtcctccacacaggaggaggatgtattcagcctttaggatgatcagaaaagcagaaagagagagtggccggatggggctgaggggagaaagaattattaaacaataaatactttcaagacaattttaattgtgaacctaccatgttgcctcccatcttctgaaaaaacaaaaaaattgataggctgggcgtggtggctcatgcctataatcccagcactttgggaggctgaggcgggcggatcatgaagtcaggagatcaagaccatcctggccaacatggtgaaaccctgtctctactaaaaatacagaaaattagccgtggtggcatgtgcctgtagtcccagctacttgggaggctgaggcaggagaattgcttgaacccgggaggtggaggttgcagtgagctgagattgcaccattgcactccagcctgggcgacagagagagactgtctcaaattaattaattaattaattaattgaggataccattggatgcattcttttcttacacatattgcaactgtcagtatacaaggtttcctgccagggtatttggatgacgttctttaaacctaaccacttgctctgtgctgtctaaatcccatcagccgtacatgattcctttgcttccctctatttcccagcttttgttgtcagagggtagatgaaaagttggggcgaagggatttaacaaaagttactgcatccgtaaagatttgtgggaagatttaggtctgaaaccataccattagaaggtgtttagagatgatctagataaggaaatacaggaccatttggtcattctttcattcaccagacagctatttagcacattctgctagtggctccgcaggatatatctgatttaaaaaataggaaccacaataataatagctgcttatgcttatggagcattgccatgtgctagataggcaccatcctcagcccttggcaggtctgagctcctttatttcttccaatcaacactatgaggcaggttctgtaaccccccttagggttaggccactcgggaaactgaagcacagagagtttaagtaacttcctggaggtccgacccgacaaatttaagtgatcaccgacgaatttaagtgatca

SEQ ID NO: 408023 - DNA, 784 bp, Homo sapiens
caaccaataaagaattgcaagcactggctttatccttccaaggcacactggatccaaagactataagttttcggagtcgagttttaccctctaatgcagtgtggatggagaattcaaaactgaagagtttggaaatttgccaccctcaggagcggaacattttcaatcggatctttggtggtttccttatgaggaaggcatatgaacttgcgtgggctactgcttgtagctttggtggttctcgaccgtttgtggtagcagtagatgacatcatgtttcagaaacctgttgaggttggctcattgctctttctttcttcacaggtatgctttactcagaataattatattcaagtcagagtacacagtgaagtggcctccctgcaggagaagcagcatacaaccaccaatgtctttcatttcacgttcatgtcggaaaaagaagtgccattggttttcccaaaaacatatggagagtccatgttgtacttagatgggcagcggcatttcaactccatgagtggcccagcgaccttgagaaaggactaccttgtggagccctaagaacaccacatttgttgaaaactagcactctacccacagtgacgtggtatctgatgaagacctgatcgagtgtattgattttagtattgcttcgtgtcctccacacaggaggaggatgtattcagcctttaggatgatcagaaaagcagaaagagagagtggccggatggggctgaggggagaaagaattattaaacaataaatactttcaagacaatttt

SEQ ID NO: 408024 - DNA, 1029 bp, Homo sapiens
gcatctcaatgggataactgcaggtcagggctctggatcaggatgatatcaagtgatctcacactgaaccaatataatttccatgtggaaccaaagactcactgggagttttatgtgtcctctgcagttttctcttggatacgtgtataattttcagtgagattttgaaaggcatcccaggtcagaataccgtgtgctgtagtgcgaccgtcctgatcattgctccttattctcccttgttccagtgaacaaggggagaagaattgccttcagctccacgtcgttactgaaaatggcccccagcgctgaggagaggaccaccatacatgagatgtttctcagcacactggatccaaagactataagttttcggagtcgagttttaccctctaatgcagtgtggatggagaattcgatctttggtggtttccttatgaggaaggcatatgaacttgcgtgggctactgcttgtagctttggtggttctcgaccgtttgtggtagcagtagatgacatcatgtttcagaaacctgttgaggttggctcattgctctttctttcttcacaggtatgctttactcagaataattatattcaagtcagagtacacagtgaagtggcctccctgcaggagaagcagcatacaaccaccaatgtctttcatttcacgttcatgtcggaaaaagaagtgccattggttttcccaaaaacatatggagagtccatgttgtacttagatgggcagcggcatttcaactccatgagtggcccagcgaccttgagaaaggactaccttgtggagccctaagaacaccacatttgttgaaaactagcactctacccacagtgacgtggtatctgatgaagacctgatcgagtgtattgattttagtattgcttcgtgtcctccacacaggaggaggatgtattcagcctttaggatgatcagaaaagcagaaagagagagtggccggatggggctgaggggagaaagaattattaaacaataaatactttcaagacaatttt

SEQ ID NO: 408025 - DNA, 564 bp, Homo sapiens
acaccctctgccgactccaagacgctgcctcttcctgcgggcaagggcgcggtctggtactcgtgcgtcttttatcgcctcagtttccctccgccgactagcgcgcggggcccggttctccatcgcgcgcacggcagcctagcgcaatgaggcgggcagcactgcggctttgtgccttgggcaaagggcagcttactcctggaagaggactgactcaaggaccccagaaccccaagaaacagggaatcttccacattcatgaagatatgtgtaagaagagcttgagcccagaacaggacattaagttcagtggccatgttagctgggtcgggaagacatccatggaagtgaagatgcaaatgttccagttacatggtgatgaattttgtcctgttttggatgcaacatttgtaatggtggctcgtgattctgaaaataaagggccggcatttgtaaatccactcatccctgaaagcccagaggaagaggagctctttagacaaggggaatgtacattaatttgtttataataaaataaatttgaaaagcacattaattacgctg

SEQ ID NO: 408026 - DNA, 2852 bp, Homo sapiens
  misc_feature (1574)..(1574): n is a, c, g, or t
  misc_feature (1678)..(1678): n is a, c, g, or t
  misc_feature (1734)..(1734): n is a, c, g, or t
  misc_feature (1822)..(1822): n is a, c, g, or t
  misc_feature (2027)..(2027): n is a, c, g, or t
  misc_feature (2291)..(2291): n is a, c, g, or t
  misc_feature (2402)..(2402): n is a, c, g, or t
  misc_feature (2852)..(2852): n is a, c, g, or t
gtaccaccatgccaggttaattttttgtatttttagtagagacgggctttcaccatgttagccaggatggtctccatctcctgacctcgtgatctgcctgcctcagcctcccaaagtgctgggattacagacgtgagcgactgcgcccggcatctttttatatttttaaaaggtcacatgtatgtcctttcctgtgaactgtttatattctttgccaaagtgctgggattacagacatgagccactgcacctggccttacctcttctttttttctttaatcacctgtggaggcttttagattgtgccttttgctgtcaagtctactactactcttccatcggcttgtcatacaaccatttgttgaaatttcttttgtattttgtttgccttttgggctctacactttttaaaaatttatttagctgtcaaagagatgacatactgtgtatggttaattttccatgtattctggagttctaatatattttcatggtttttaaatgtttagttctttaatcaagttggaatttttaaaatatatatgaagtaggatgctaatttaaaacttttcctccaaatggatatccatccagttgtctcaacatcatgtatagaaaaaacaaattgaaaatgctatcttatcatattatttactaaatttacatgcatatacatatacatacataacatatatctgagtttgagtctgaattcactactgtttcaattgctgtagttggtcaattctagtatgacagagttttaattgctacagttttggaatgattatggggttacttttgagacagggtctggctatcttgcccagactggtctcaaacttaccggctcaagcaatcctcccatctcagcctcttaaagtgttgggattataggtatgaaccactgcacctggccctggattgcattttgactgtggccatagaagtttccactcagatcttcaagagaacctactctggggactacaagtgactgacagccagctgccacccctttggaactaccatgcattcatgtcaatgccacatatctctggagtcgcccccagctagtggctgagcacagcaggagtactaaacttgttctttcttgcccagtgcagaactcctctaacgggcaactttggcttggggaacttctcatcagcctggatgagactatcttagaactacagtgtagtcgaggctctttctacccaatatttccttctcttctttttacagaagtcagacctgcaccacagtctgaagtctctctgccaattcctgagccttcccactttatccttcacaaacatttcccccaataaatatcttgcatgtctaatcccttcttggcatctgcttctctgaggaccagaacagacaggtggtttaccaagtggtgcaagaaaacagatagtaagatgggttttgggcaatggcttacttggtccctggcacaaagcagccatctgagtcctgatttagccagcagtgacctaggaaaacatcccagagaagggaaatcctcttgctcgtgcaatttaggcatttaaaagatatggggnatacgatgcctacaaagaaagcagagctggccaactgttactaagacaagtaatgccttgcagatggataatgagaaaccgagagcacttaaacagttaaaggntaagtgtgggagccgggggcttctctggagcttaacaaacttttatttcctgcagnggaagagcagaaatgggattggatggtcacagagctctaaagatatttgaatgctcagcctagggagatccagtatgtagtcagggcnctggttggggaaaccagcctgaagctttgaaacatggaatgggtgcccctgaggattttggctctgtagatacctctggacactcaagagcttacagaactggctcatacttcctagtaagagcaagcacttccctcattacagaaagacctcttccataattgttctcagtttttctcctggctgccaagccatggtaactggngttaacatctcagcataatctgcctaggaactgctggccctgataagaaaggaaagattacacaccgaaggaattgaaataagttaccatgactatcaggagccagagaagtatacttaggattggattttaagggtgttcaattaagggggctggaatttaagacaacataagcaagacttcatggacttggggtacttttttgggacagatttaacctcagcaagtagtcccgaggttagcttttcaaagcctggaaaaggngatggctttgaaaaagtggaaatgaattcacaccatggcagcttttaacttgaggagaagatagctatttattttggcatatttatgtggttactgctcacttactagtcncaattgttttgtaaccactttttatttattttttgagatagtctcattctgttttctagatgtgctacagcctgggcgacacagtgagactccgtctcaaaaaaagaaaaaaaaaaaaatatcatattgtattggccatcccttgtttcatattcgttaataaactttgctactttgctttctaatttcggtgaagaacaagcacaagattaaggagtaagactatgtgaaactgggttataaattgaaaggctgttggctgttgtatcttgtaaacaattcaacgcaatgccaagtgaaaatgaagttgttagtccctctatctagaattctttcccaaatagctgcatatctttttcctctgcttcatttaagtctgtgctgaaatgttatctactcagagaagacattctggatcatttcatattaaatagtaacttttatcactcn

SEQ ID NO: 408027 - DNA, 458 bp, Homo sapiens
gtttgtagggttaggtgcttcatatgaaaacagtggactgtgtgaattgctgttgcagcaggagtcagtcataaggtaaatgttcccatgtggcaggtagacttggccttaattttttgccctctcaccttgatacagggtatcactgagccaataagaccaggctggagtttacaccttctaggtgcacttagtgggatccatgtctaatgccagtaccctctaggttgcagatgtcttttggtgggtgttgggacatagctgtcttcctttccaccttcctgaaatcctaaattcaactggagggaagcccaacacacctgcttagaattgaggagacagggccggacacagtgactcaatcctgtaatcccagcactttgtgaggctgaggtgggaggattgctttgagctcagcagttcaagaccagtgggcaacatggtgaaaccccatatct

SEQ ID NO: 408028 - DNA, 502 bp, Homo sapiens
  misc_feature (496)..(497): n is a, c, g, or t
  misc_feature (499)..(499): n is a, c, g, or t
atgcaacattgtaatgtttcagttcttaagcagagtgctgaggaaatgatgttattttgtactttttggttcggttcaaatagttcatcattaagttaatggaaacaatgaacatggattttacagtcagacagacctgagttttaagttcacttctgccacttactagctgtgtgacctggagcaatcatgtaacctctctgggcttgttaatcatctgtaaaacagggctcacagggctgtgtgaggattacccttgacattcttacactccttccgggagtcccagagtgagtgagaccaaaccgggacaatcacagctctccaccaacctcaggcaggggcaggttgctaactgccttccaggcctcaaacttcgccatcacagaaagatggcaccacctcctcaggcaggaggttgtagtgagccaagatggtgccactctctgcactccaacctgggcaacagagcgagaaaagaaaaccgtctcaaagnngnaaa

SEQ ID NO: 408029 - DNA, 698 bp, Homo sapiens
atgcaacattgtaatgtttcagttcttaagcagagtgctgaggaaatgatgttattttgtactttttggttcggttcaaatagttcatcattaagttaatggaaacaatgaacatggattttacagtcagacagacctgagttttaagttcacttctgccacttactagctgtgtgacctggagcaatcatgtaacctctctgggcttgttaatcatctgtaaaacagggctcacagggctgtgtgaggattacccttgacattcttacactccttccgggagtcccagagtgagtgagaccaaaccgggacaatcacagctctccaccaacctcaggcaggggcaggttgctaactgccttccaggcctcaaacttcgccatcacagaaagatggcaccacctcctcaggcaggaggcccctaaggccggggtcagagcaaaaacaccccttccttctgggtttcttttgttaagaacagaaggagggggattctaggggaaggccgtgtagcccctgcccagatctgtttgcggatacctctgtgacctctgctaaagggtgcagcagggcaggtggcgggtcacagttctgagaaggtaacatacaaagagatcttcccttaaagatgtaggaagataaggagggggggagttgctggggaaagccccttctcccatagcccctgtgggccctca

SEQ ID NO: 408030 - DNA, 478 bp, Homo sapiens
tttaatgttcactaacatagttaaaatggatgggccaacattatcatggttctttcacctcctaagtaaatgcaaagcttttcttcactccattttgtatgtgtaattttgattgagtgggaatcttgtaaagccaaaaatggaactgaaagcccactcataagaccataagttttttttttaatttttaatttttcttttcaggcagggtattgctgtgtcgcccaggcttgagtgcagtggtgccatcatggctcactgcaacctctgcctcccaggatcaagcgatcctcccacctcagcctcctgagtagctgggacttactgttgtgcaccaccacagctggctaattgttagaattttaatttttatttttttgtagagacaaggttttaccatgttgtccaggctagtcttgaactcatggactcaggttaaccacctgccccagcctcccagagtgctgggattacaggc

SEQ ID NO: 408031 - DNA, 405 bp, Homo sapiens
aatgtggagggaagggggttttccgagggccatggatttgtacaggctgccctttgtgctacacgaagtcctttaatcaatttactcttctcagaacccctgcgaggtaggtgtcaccacccccatgtcacgcagcacacagctgctcagtaaatagtggggctggagttcggaagtccacggtcatccctcagcatcaggggcccttggatcagggcaaggggcacaagaggctcacaagcacgagagactgaaggaaagcaagaactgcctttcctaaaactgatctaagacagcgcctgctgacaggaggtcacggctgtgttccgcttcccgcttcccctttcacctgctccctgttcccacttcacaagcaacagatgcatctctcacacctagcagcac

SEQ ID NO: 408032 - DNA, 2584 bp, Homo sapiens
  misc_feature (782)..(782): n is a, c, g, or t
catgcctggctaatttttgtatcttttagtagagatgggatttcaccatgttggccaggctggtctcgaactcctgacctcaagtgatccacccacctcggcctcccaaagtgctgggattacaggtatgagccactgcacctggcccccagttcttcttttaaaggcatcacctaattaggtcaggcccactcaacagttgattaaccttaattatatttgcaaaatccctttgccatttaagatgacacaataattggaatgatatcccatcatattcacaggtcctacctatactcaaaaggtggtaggttatacagggtggatatagtgttgaaagaaggaatgaatgaaatgaatgaattctgatagctggaagcacagcaactagctttttttgtagcatgagtgagagaaggtattgagttccttattgaagaatgcagttgcaacagtttatcactagtgagctgcttcttggtaactataagacataagcagacaagaaacagcaagaaaggaaggaaggagaaaagagaacgagaaggaaatcattattttggaccgatttccggtggtggtttcaagaagttctccccaccctccagactgctgtcatttacaattgctagagaacaagagctgggagcctctccttggttctgctcctgtggcatagccatgggggatgcagaagggcagtggtgcccactaaagggaatccccgtcagctttggttttagtttccagagattgagcctctgccttaggctgagagaaanacttagtgtgagtctttatttgctcccttataatcacaggcacatgtggcacctcctcccccatctctgccccacctcttccaacagtgagatgcattaggtgtggaaaggaagccttcatttcaaaatctcctggctgcggttagctttaaaaatcaaatggaactgtggtcgtctgtgtttaatttggaagagcagaaaggatgcgtgctttgtggcgcctgcatagtgaaagtctccatgacttaataccactgcccagccttagaagcttcccatgcagacaatggccctgcttccccatcagttcttgggcttgggtgccaccttatataaacattgctgcttttagtgcatcgcagaagcaaaaggatgacacattaatagcagctggaggatctcattaaaattcggaggaaaatatgaaggctggagcctggtaatgtacagacagtaagtctttgtctgtctgattaacaattgcatgcattctaagtgccttgctggatggtaagaaccagcatttcagccagaagtaccatgttcttctccttaagaataacctatttctgtttttcaattcccttatcccctctaaaaataatatgctggtcttttggactcccttgagaactgaaacagcttagcaactggggcagtccctgagagctggtgcagaaacaactgttgctagcttggatttgaattatgcagtcagatgcttacatcgtgggagggggatgtacggggtgtgtggccttcagatgcttacattgtgggagggggatgtacagggtgtgtggccttcatgccagaaaggacagggaagcactccctggttggcgggaggaggggagatgctggggttgaggcccttacctttatttatgttgttcactggtacagccagactgcaacctctcaactcttcagacaagacctaaggccgacaaaattcactccctcatgaagaacattgggctgtttctccctggtgtgtaggtggtgggagtgaagtagaggggctcgctgtgtgcagggaaagggctgcattctcaagaatttgtatgtagcccttggactaaaaacaaaatattccaaaggaatgcttcttttggaaccctggtccagtccctcgtctaagcaggagtgcccttatatgcttgactgtggatggcatctgattacgggcagaaggttgcactggattgctgcctgatgcggacccacagaacacagtttaactctggctctgtcagcagtcatcagtgtttatttttccaactcttcagagagatattagtcgttatgaaaagtgtaccatctcagaactccatggaataagctgccaatataagacaggttgaaattattgtgtctttttgcctagagttatttttagttattttttcttccttggaatttcttttcttttttttttttaaccatatatgctaactttgtagctggtggcaaaaaaagattattttccctatattaatgacttcttcagctgaattgaggaatagggttaccagctcttttcttggagtttaacactctcaatctgataatatgaataacacctcaataaccacaacaagagcggatcatcttcagtatctttcctgaattaccttttggcttttcaccaccttgtttgtccgtttcagagtttgtctttctgtaaaatcatgggaaggcatctgattactttgttcttgatgtacctgagtaatgcgaacatctgaataattgaacaaaaatcttgtttaaacaaaacttttgtttcagaagcatct

SEQ ID NO: 408033 - DNA, 452 bp, Homo sapiens
gtttttaccacagcttttctgaaactgctattagctgaatgtcccagcctcctgaaaacatcctttaattttcttatctatttttcatccctttacatttttgttctactttctgggacagttatttaatttcatttcccaacccttctatttaaattttttggctgggcacggtagctcatgtctgtaattccagcactttgagaggctgaggcaggaggattgcttgagcccagggagttcaagaccagcctggggtaatatagtgagccacaccccccaaccccaccacatcttcaacaaaaaatttttaaaaaattaactggggcaaggtgttcacacacctttagtttccagctactcagggatgctggagggtggggagggtcacttggagttccagggaggtcaaggctgcaggggaaccatggatccaggccgtgctactccag

SEQ ID NO: 408034 - DNA, 1502 bp, Homo sapiens
ttttctataaagaaaccacaaagtattaagcccttaatcagcttaagtattagtacttgagtattaatccattccaaattgaacctaatgcctgttgccctaaagcagtggttcttaaaatgtggattcctgaatatagttgtcagataaaatatgggacatccggttaaatttaaatttcagataaacagtgtttttagtatgtgtacatgccatgtaatatttggggcacatttatactaaaaaaagtatttattgtatatctgaaattcaaatttaactgggcatcctgtatttttatttgctaagtctggcaactttatccctgaggcccttttaggagttgcctgagttcaaaaatattttctgataatactaagtgattaattgccatttttcactgtgttgacatttgcactgttggtgcagcagcattgaggagtagaactacttgtatcttagcaagaatcaaggcagaggcaataaattactagtagatgtcacaataaaaaaatgtttaatgccatttgaacttaagaacttcctttatgaagagataaaaattattaattttgttaacccttgaccctgagtacgcacctttttagtattctgtgtgacaaaatgggaagcacacaaaaagtgtgtctgccccatgcccaagtgtgatgaacaatcttgtgtaattgttcaagttggactgagctagccacttttttcaaagacaatatttatttgaaaggaatgacaactatggttatttagaagaaaacagttgatagtgtttattgccaatgaaaaaaattaaaactttcaagcaaaaattgaaattacggaaaactttgtcatcgtgagcatgatggcttctcagtacttaaaatctcttctgattaaatggatggcaacattcacaaatgtgagggccacacgcagcagctcatgcctgtcatcccagtgctttgggaggctgcggtgggagaatggcttgaagccaggggtttgagaccacctggacaatatagcaagaccttgtctctacaaaaaatacaaaaattagcctgagtatgatggcatatgccaagactcttagctactctggaggctgaggtggggggatcacttgagttcaagagttcaaagttatggtgagctctgatggtgccaccacactccagcctgggtgacagagcgagaccctgtctctttaaaaaatttttttggctgtgcacggtggctcgcgcctgtaatcccagcactttgggaggccgaggtgggtggatcatgaggtcaggagatggagaccatcctggctaacacgatgaaaccccatctctactaaaaaatacaaaaaattagccagacatggtggtatgcgcccgtagtcctagctacttgggaggctgaggcaggagaatggcatgaacctgggaggcggagcttgcagtgagccgagattgtgccactgcactccagcctgggtgacagagtgagactctgtctca

SEQ ID NO: 408035 - DNA, 1442 bp, Homo sapiens
taaatgagcgaatgaaaatgctacataggctccctgagttctttcatgtacgaatcttggttacacatcttagaacagcagagctgcctgagggagggttgtgtttaatgtcgtatgcatgctcagcacagtgctggcatggcccatccatgctttctgttgaactatggacagaattcaggaacttgtgtatggagagggtggaagtcagtcctcgcttctttccctaaacattttgcagtgacagcatatggatctttggttggaaaccccatgacactcttctctacttccccatgggccttccctggtttttgtttttcttttcttaaacaatcctggtaatgacacttccaccacaatgagcttttaaatgtcctttaatgataagccagtgtttccttcagagggcaaaggggagactgctgagtcactgtggccatttttagataaaccttttcctgtttataataacacatgctgattgtaggaaactagaaaatacatgaaagtgcagagaaaagactaaaagtcatctatacttcaggtcgtagaaataaccactctgaacagcacacttctttttacactattgttttacactgttgggattacataaatatatatgtttgtatcccactttgtgaacatcattctatgtgaactagaaatggttcctaaacattaagggctgcatatagctgtatcatagtttatagtttatacatagatgctttgtaacattattttataatgctatgaatgctatggtgaatatttttgtgaatcaacttatgtttccaccagcagtttcagagagtgcctgtctcatcccatcctccccagtattgcatattcttgagtcttttattctttgataatgacaaatgatgaatcattgatagtttttcttcataataagtaaagtttaacattttcaagtgtttgttgaccatctgtatttcttcttttgtgaagtgctgtcagttcttttgctattttaaaaataattttgagtttcagtttttgtttgttggtctgtatgaaccctttaaaaataaaggctgttagccttttgccatcttagttgtgacagtaaagtataatgctttgctgcactaggtcctctggaacaagatgcagatttagattccaggtcagcatgtaacttgaccactgtcactcaagagttacagcctgagcagggccttaggagggagatgatttctgcttaaaggcgatacaaattcctagttagggaaatagaaggaaagtattctcaggagattaatttaaggcagcttttttgttggtttaagcacctctaacattttcatactaataagggagaatgggatggcggctgaaagagacacaaatattgtatcatttaattctaaattatgtatttgtcaggttcttattgaaagagtaaattttcg

SEQ ID NO: 408036 - DNA, 1602 bp, Homo sapiens
  misc_feature (1415)..(1415): n is a, c, g, or t
taaatgagcgaatgaaaatgctacataggctccctgagttctttcatgtacgaatcttggttacacatcttagaacagcagagctgcctgagggagggttgtgtttaatgtcgtatgcatgctcagcacagtgctggcatggcccatccatgctttctgttgaactatggacagaattcaggaacttgtgtatggagagggtggaagtcagtcctcgcttctttccctaaacattttgcagtgacagcatatggatctttggttggaaaccccatgacactcttctctacttccccatgggccttccctggtttttgtttttcttttcttaaacaatcctggtaatgacacttccaccacaatgagcttttaaatgtcctttaatgataagccagtgtttccttcagagggcaaaggggagactgctgagtcactgtggccatttttagataaaccttttcctgtttataataacacatgctgattgtaggaaactagaaaatacatgaaagtgcagagaaaagactaaaagtcatctatacttcaggtcgtagaaataaccactctgaacagcacacttctttttacactattgttttacactgttgggattacataaatatatatgtttgtatcccactttgtgaacatcattctatgtgaactagaaatggttcctaaacattaagggctgcatatagctgtatcatagtttatagtttatacatagatgctttgtaacattattttataatgctatgaatgctatggtgaatatttttgtgaatcaacttatgtttccaccagcagtttcagagagtgcctgtctcatcccatcctccccagcccattcctgctgtcaaacaaacaaaaccttgcaaagcgaaaaaaaaaaaaaaaaaaaaaaaaaaaaaaaaaaaaaaaaaaaaaaaaaaagaagaaaaaaaaaaaaaagaaaaaaacaaacaaaaaaaaacgaaaagaagaaaagtcacaatacacaaccacatcacaccaagaccaagggaggggagagcgcaaaaaaaacacatacatggcagacaagacacgcacccaacacaacacttataaacaaaagcaggccacacacagcagcgcgaccacacaacacccaccgcgagcgccgcgtacacacaaccagcaggccggccggggacaacacacataacacgccgggagagatcaaccagacaagcaaccacccagcgggaggggggcgaaacctaggcgcgcacccacccaccgaacatgaacgccggacggggcatcattaacacagaaatggtggctagcagtcgactccacacacacgatcacaatcgctgcgtgacgcaaagatgtcggacgaagcgttagcaacaactaagcgccacgggtgccgcaatcaccaacangtcaggcagtccacggtagcgaaagacagaactagccagaagaaagaaggaacgcgaggatgcgtccagtcacataaagacccagctgatacgacagaatacgaccacagaagccccggacgacctgccattatctcgtgcatagccagctgaacgacaatgcacacaacacagaaaagaacgaaaa

SEQ ID NO: 408037 - DNA, 455 bp, Homo sapiens
cattgggcctgctaactgggggttccttgacgtctgaaagccaagccaagcctcctggtcttgtttagggggaggtccccaagcattccctgccccagtcctttgtgagatttgcatctgactgcaaaggatggaagaaaaccagggcaattaggtgagtgttgcctaaattaatctgcccattaaaatattctaaagagcatttccttcctttttggaggatgaggacttctacttatctgacagcaattctagtgtgtttttaacattttaatatgaagagtttccaaaacttggaaagaatcggatttggaaagaatcggatggtgaaccctcagacctaccgtctagattctatgatcatgttaagtttttctcataagagatggcatgaaaactttgtctaagcaaaataaagtggagaacccatttgggttcctcggttaaaaacattt

SEQ ID NO: 408038 - DNA, 883 bp, Homo sapiens
gatgtcttctaggcaactgatgaaaggaggaagaagaaagggacttggaacaagcaagaaaatgagcctaatggtggcccatgtgatcaaatttgcataaggacagaagacaagaccgaaggagctgatgggtagagaggagatattgctgtcaacagagtggaggtctcagtggggaaagatgaactctactggaggttcagaaaacaactgtgaaagaaatacttgaggcatgtttcaacagactgcaaatataccatctaattcttggaaacaagtacaagataaattgattctgaagctgagggctttgggcagcaaaatctgactttccggaagaggtgtaagatggtgctggtggagctttgtaaggattctctgcagggctagagttctgagtccacaggtcctctttgcaaagcccgcatgtgtgatgcccaccttcgaggcccctcgggcatcatcacctcccccaatttccccattcagtatgacaacaatgcacactgtgtgtggatcatcacagcactcaacccctccaaggtgggaggagacccagggaacatacaatgcaacaaggagggtctaagtgtggaaactcaaagtctaagactgaggaatagaagttgtcttctgggaaacagcaaggacaatggatgctgtgtgcctaaccctgttcatggaactggcctacaggtgagatacaggtgtatccaaggactgcctatccactcaccttcagacatctccttcagcaaaaagcatagtctctaagctcacagtatgttttatgagatgagcattcattcattcattgatgtagatatggcctctgcccttgaggagtgtgcacgtaagagtgaagaacaggtctgaaaaaaaa

SEQ ID NO: 408039 - DNA, 684 bp, Homo sapiens
gccttgtagtaactcaggttggtgtgtcccaaggacataatatgtgtccagaccctggcatacccgaaaggggcaaaagactaggctcggatttcaggttaggatccagcgtccagttcacctgcaacgagggctatgacctgcaagggtccaagcggatcacctgtatgaaagtgagcgacatgtttgcggcctggagcgaccacaggccagtctgccgagcccgcatgtgtgatgcccaccttcgaggcccctcgggcatcatcacctcccccaatttccccattcagtatgacaacaatgcacactgtgtgtggatcatcacagcactcaacccctccaaggtgggaggagacccagggaacatacaatgcaacaaggagggtctaagtgtggaaactcaaagtctaagactgaggaatagaagttgtcttctgggaaacagcaaggacaatggatgctgtgtgcctaaccctgttcatggaactggcctacaggtgagatacaggtgtatccaaggactgcctatccactcaccttcagacatctccttcagcaaaaagcatagtctctaagctcacagtatgttttatgagatgagcattcattcattcattgatgtagatatggcctctgcccttgaggagtgtgcacgtaagagtgaagaacaggtctgaaaaaaaa

SEQ ID NO: 408040 - DNA, 474 bp, Homo sapiens
gccttgtagtaactcaggttggtgtgtcccaaggacataatatgtgtccagaccctggcatacccgaaaggggcaaaagactaggctcggatttcaggttaggatccagcgtccagttcacctgcaacgagggctatgacctgcaagggtccaagcggatcacctgtatgaaagtgagcgacatgtttgcggcctggagcgaccacaggccagtctgccgagatttaaacaactgcttttaaaaagttagtggagaagaagaaagctaagaagaaattcggtcagaaacgtaggagaaaagccaaaaagcgtcactgaagccaaagaatcccgcatgtgtgatgcccaccttcgaggcccctcgggcatcatcacctcccccaatttccccattcagtatgacaacaatgcacactgtgtgtggatcatcacagcactcaacccctccaaggtaagcctcttggggagcggggt

SEQ ID NO: 408041 - DNA, 375 bp, Homo sapiens
gaaataatttatattttgattgaagcatggtgagaacttttatagaaaatcctatttttaaaaatttttctttcctttatcacagattacaatggctaatctacatgaatgactatttttcttctattgacaactccttctgcaaaattatttttatttattttcttgagttatagatttagggggtacaaatgcagctttgttacatggacatattgtgcatggcgaagtctgggagaaatcttccgcatacacctattcagaaacactagatttcacctaatttaaatcaccattctctaacaggtcaagaatttaaataaaaactgattacaaccaacatcatcattctaacttttaaacaaaagcatgtaa

SEQ ID NO: 408042 - DNA, 1961 bp, Homo sapiens
ggtgtaacggcccgaatctgggatgcctgctcggtgagttgtttgtttgtttgtttttgagacagagtctcactttgcttcccaggctggagtgcagtggtgcgatctcagcttactgcagcctccgcttccggggttcaagcgattctcctgcctcagcctgccaagtagctgggactaccggcgcccaccaccacgcctggctaatttttgaatttttagtagagagtgggtttcactatgttggccaggctggtctggaacgcctgacctcaagtgatccgtccgcctcggccttccaaagttctgggattacaggcgtgagccaccgcgcccggcctgagtgagtcttaatccgtggccatctgcgttcctgcaggcttcatctggccctatggtcccctggcatcatggctgccctcagatcccttgtgaagcccaagatcgtcaaaaagagaaccaagaaattcatccggcaccagtcagaccgatatgtcaaaatcaagatgagaagaataatgtctggggtgaaggtgaagcacccagcccaagactcagcagccaggaagtggcccagcgctctttataccacgggtgcaggaattcacacagaaaagtggaggccaaggcgtgagaattcctcaatgactgccctctaaaggaagaggaccaggcttcctgtcagagactgaggacccaggaagaaacatgtctcggcccctgtccccctccacaattcagaggccacattctaacaggggaggctgaccaattaaacagataatgacacctcctagagctaagagctctccgactatgaaccagatgcctggagaacacggatgaatggtctgagcatgagcaggggtgggaggcagcgttaagggaggcatcagagtcagaacctagcaaacaagtgtttgtgaagaagaattcatagaaaagggcaatgcgggcatcacatgggctaaggaacagaggggtagcagtagctgttgtgccaagctgcaggtgttatacactaccctctagatctgggtttccttaaaacaccttgagaggacaaccctgcaaagcacggcacagtggccgagagggaaaggagcattcgaggtctcagtcctcgctctgagcctacttctctgcttctgggctccagccatctttgtggaaagggggctgctagtgacaccctctcaagggtctttccagctctaggtcggctgtgctggagtctaggatttgcccactgagaaatctgtttccaagttccttcaacctgatgcatcctgcagcatcacggcagctgttcagagtggtcagaaggcccctgaatgagctcagtagagggaagcctgggaacagggaggcacctgcagctctactcatggcctggccagagctcagcagctcttctctgccatctagtggggatggcataccatcactggggaccaccctgtgcaaactggtgagcctgagtgcctgtcacagagggaaagaaaggggggggatacaggatttagatgaaatagcaactcctaccctattgtcaaaatcatccagctttttcaaaacatcatattgtactgatttttttgtgtttttgacagagtcttgctgtgtcaccaaggctggaatgcagtggcatgatctcggctcactgtagcctctgtctccctggttcaagcaattctgccccagcctcccaagtagctgggactacaggcatgcgccaccacacccagctaagttttgtatttttttagtagagtcagggttttactttggccaggctggtcttaaactcctggcctcaactgatctgcctgtctcggcctcccaaagaactgggattacaggcatgaggcaccgtgcctgtcccatgttgtacttaatagatatttaccatatacaattattttttaatttaaataaatcaatgaacagtgttatttttt

SEQ ID NO: 408043 - DNA, 1733 bp, Homo sapiens
agtattctgccagcttcggaaagggagggaaagcaagcctggcagaggcacccattccattcccagcttgctccgtagctggtgattggaagacactctgcgacagtgttcagtccctgggcgggaaagcctccttccaggattcttcctcacctggggctacttcttccccaaaaggcatcatggctgccctcagatcccttgtgaagcccaagatcgtcaaaaagagaaccaagaaattcatccggcaccagtcagaccgatatgtcaaaatcaagatgagaagaataatgtctggggtgaaggtgaagcacccagcccaagactcagcagccaggaagtggcccagcgctctttataccacgggtgcaggaattcacacagaaaagtggaggccaaggcgtgagaattcctcaatgactgccctctaaaggaagaggaccaggcttcctgtcagagactgaggacccaggaagaaacatgtctcggcccctgtccccctccacaattcagaggccacattctaacaggggaggctgaccaattaaacagataatgacacctcctagagctaagagctctccgactatgaaccagatgcctggagaacacggatgaatggtctgagcatgagcaggggtgggaggcagcgttaagggaggcatcagagtcagaacctagcaaacaagtgtttgtgaagaagaattcatagaaaagggcaatgcgggcatcacatgggctaaggaacagaggggtagcagtagctgttgtgccaagctgcaggtgttatacactaccctctagatctgggtttccttaaaacaccttgagaggacaaccctgcaaagcacggcacagtggccgagagggaaaggagcattcgaggtctcagtcctcgctctgagcctacttctctgcttctgggctccagccatctttgtggaaagggggctgctagtgacaccctctcaagggtctttccagctctaggtcggctgtgctggagtctaggatttgcccactgagaaatctgtttccaagttccttcaacctgatgcatcctgcagcatcacggcagctgttcagagtggtcagaaggcccctgaatgagctcagtagagggaagcctgggaacagggaggcacctgcagctctactcatggcctggccagagctcagcagctcttctctgccatctagtggggatggcataccatcactggggaccaccctgtgcaaactggtgagcctgagtgcctgtcacagagggaaagaaaggggggggatacaggatttagatgaaatagcaactcctaccctattgtcaaaatcatccagctttttcaaaacatcatattgtactgatttttttgtgtttttgacagagtcttgctgtgtcaccaaggctggaatgcagtggcatgatctcggctcactgtagcctctgtctccctggttcaagcaattctgccccagcctcccaagtagctgggactacaggcatgcgccaccacacccagctaagttttgtatttttttagtagagtcagggttttactttggccaggctggtcttaaactcctggcctcaactgatctgcctgtctcggcctcccaaagaactgggattacaggcatgaggcaccgtgcctgtcccatgttgtacttaatagatatttaccatatacaattattttttaatttaaataaatcaatgaacagtgttatttttt

SEQ ID NO: 408044 - DNA, 2859 bp, Homo sapiens
ttgccttttccctgtcaggacccagaggttacctcccatcagccccggcgctctctcatcccttctctcttccttggtgcttctttttcctgctcggtgagttgtttgtttgtttgtttttgagacagagtctcactttgcttcccaggctggagtgcagtggtgcgatctcagcttactgcagcctccgcttccggggttcaagcgattctcctgcctcagcctgccaagtagctgggactaccggcgcccaccaccacgcctggctaatttttgaatttttagtagagagtgggtttcactatgttggccaggctggtctggaacgcctgacctcaagtgatccgtccgcctcggccttccaaagttctgggattacaggcgtgagccaccgcgcccggcctgagtgagtcttaatccgtggccatctgcgttcctgcaggcttcatctggccctatggtcccctggcatcatggctgccctcagatcccttgtgaagcccaagatcgtcaaaaagagaaccaagaaattcatccggcaccagtcagaccgatatgtcaaaatcaagcgtaactggtggaaacccagaggcattgacaacagggttcatagaaggttcaagggccaggtcttgatatgatgcccagcattggttataggagcaaaaaaaaaaaaaaaaaaaaaaaaccagaaagcacgtgctgcccagtggcttccggaagttcctggtccacaatgtcaaggagctgagagtgctgctgatatgcaacaaatgagaagaataatgtctggggtgaaggtgaagcacccagcccaagactcagcagccaggaagtggcccagcgctctttataccacgggtgcaggaattcacacagaaaagtggaggccaaggcgtgagaattcctcaatgactgccctctaaaggaagaggaccaggcttcctgtcagagactgaggacccaggaagaaacatgtctcggcccctgtccccctccacaattcagaggccacattctaacaggggaggctgaccaattaaacagataatgacacctcctagagctaagagctctccgactatgaaccagatgcctggagaacacggatgaatggtctgagcatgagcaggggtgggaggcagcgttaagggaggcatcagagtcagaacctagcaaacaagtgtttgtgaagaagaattcatagaaaagggcaatgcgggcatcacatgggctaaggaacagaggggtagcagtagctgttgtgccaagctgcaggtgttatacactaccctctagatctgggtttccttaagagcattcgaggtctcagtcctcgctctgagcctacttctctgcttctgggctccagccatctttgtggaaagggggctgctagtgacaccctctcaagggtctttccagctctaggtcggctgtgctggagtctaggatttgcccactgagaaatctgtttccaagttccttcaacctgatgcatcctgcagcatcacggcagctgttcagagtggtcagaaggcccctgaatgagctcagtagagggaagcctgggaacagggaggcacctgcagctctactcatggcctggccagagctcagcagctcttctctgccatctagtggggatggcataccatcactggggaccaccctgtgcaaactggtgagcctgagtgcctgtcacagagggaaagaaaggggggggatacaggatttagatgaaatagcaactcctaccctattgtcaaaatcatccagctttttcaaaacatcatattgtactgatttttttgtgtttttgacagagtcttgctgtgtcaccaaggctggaatgcagtggcatgatctcggctcactgtagcctctgtctccctggttcaagcaattctgccccagcctcccaagtagctgggactacaggcatgcgccaccacacccagctaagttttgtatttttttagtagagtcagggttttactttggccaggctggtcttaaactcctggcctcaactgatctgcctgtctcggcctcccaaagaactgggattacaggcatgaggcaccgtgcctgtcccatgttgtacttaatagatatttaccatatacaattattttttaatttaaataaatcaatgaacagtgttattttttaaatcttgtggctttaatacaccctttcaattctcagggagtgttttggtgatacaggctggggagttaaataaatgaacgaataaacttagttgttatccattcaaaaaaaaaaaaaaaaaaaaaaaaaaaaaaaaaaaaaaaaaaaaaaacaaaaaaaaaaaaaaaaaaaaaaaaaaaaaacaaaaaaaaagaagagagagagagaagagaagaaacaaataacaaatcaaaaaagaagaagcaacaaaaaagcaaagcgtaaacaacacagagagcgcgggcgcgagcagaggcgagccccccttgagtgagaacacattataaaataccgcagcgaagacgagggtagcgtttacagaaagacggagcagcgttcctcgagcgggagggacaacttcacctattaacaacctgaatctagcttgtggaagaacagaacaacaccactcggtcggagggaggacacaaacaaatgacgtgataacagtaacatctccatcctctgcatcgaaaggattaccacacccccgttcgggcggcgagacaaaaataaatgatagtgaaagttacatactacagcggtagcacaataaacgacacgtcagactactatgatcggctataatagtcataaatgtttgcgagcacaagccgccgagtttattcgatcacgagacctctt

SEQ ID NO: 408045 - DNA, 2015 bp, Homo sapiens
ttgccttttccctgtcaggacccagaggttacctcccatcagccccggcgctctctcatcccttctctcttccttggtgcttctttttcctgctcggtgagttgtttgtttgtttgtttttgagacagagtctcactttgcttcccaggctggagtgcagtggtgcgatctcagcttactgcagcctccgcttccggggttcaagcgattctcctgcctcagcctgccaagtagctgggactaccggcgcccaccaccacgcctggctaatttttgaatttttagtagagagtgggtttcactatgttggccaggctggtctggaacgcctgacctcaagtgatccgtccgcctcggccttccaaagttctgggattacaggcgtgagccaccgcgcccggcctgagtgagtcttaatccgtggccatctgcgttcctgcaggcttcatctggccctatggtcccctggcatcatggctgccctcagatcccttgtgaagcccaagatcgtcaaaaagagaaccaagaaattcatccggcaccagtcagaccgatatgtcaaaatcaagcgtaactggtggaaacccagaggcattgacaacagggttcatagaaggttcaagggccaggtcttgatatgatgcccagcattggttataggagcaaaaaaaaaaaaaaaaaaaaaaaaccagaaagcacgtgctgcccagtggcttccggaagttcctggtccacaatgtcaaggagctgagagtgctgctgatatgcaacaaatgagaagaataatgtctggggtgaaggtgaagcacccagcccaagactcagcagccaggaagtggcccagcgctctttataccacgggtgcaggaattcacacagaaaagtggaggccaaggcgtgagaattcctcaatgactgccctctaaaggaagaggaccaggcttcctgtcagagactgaggacccaggaagaaacatgtctcggcccctgtccccctccacaattcagaggccacattctaacaggggaggctgaccaattaaacagataatgacacctcctagagctaagagctctccgactatgaaccagatgcctggagaacacggatgaatggtctgagcatgagcaggggtgggaggcagcgttaagggaggcatcagagtcagaacctagcaaacaagtgtttgtgaagaagaattcatagaaaagggcaatgcgggcatcacatgggctaaggaacagaggggtagcagtagctgttgtgccaagctgcaggtgttatacactaccctctagatctgggtttccttaaaacaccttgagaggacaaccctgcaaagcacggcacagtggccgagagggaaaggagcattcgaggtctcagtcctcgctctgagcctacttctctgcttctgggctccagccatctttgtggaaagggggctgctagtgacaccctctcaagggtctttccagctctaggtcggctgtgctggagtctaggatttgcccactgagaaatctgtttccaagttccttcaacctgatgcatcctgcagcatcacggcagctgttcagagtggtcagaaggcccctgaatgagctcagtagagggaagcctgggaacagggaggcacctgcagctctactcatggcctggccagagctcagcagctcttctctgccatctagtggggatggcataccatcactggggaccaccctgtgcaaactggtgagcctgagtgcctgtcacagagggaaagaaaggggggggatacaggatttagatgaaatagcaactcctaccctattgtcaaaatcatccagctttttcaaaacatcatattgtactgatttttttgtgtttttgacagagtcttgctgtgtcaccaaggctggaatgcagtggcatgatctcggctcactgtagcctctgtctccctggttcaagcaattctgccccagcctcccaagtttctcataataaagacagattgcttcttcacttg

SEQ ID NO: 408046 - DNA, 1250 bp, Homo sapiens
ttgccttttccctgtcaggacccagaggttacctcccatcagccccggcgctctctcatcccttctctcttccttggtgcttctttttcctgctcggtgagttgtttgtttgtttgtttttgagacagagtctcactttgcttcccaggctggagtgcagtggtgcgatctcagcttactgcagcctccgcttccggggttcaagcgattctcctgcctcagcctgccaagtagctgggactaccggcgcccaccaccacgcctggctaatttttgaatttttagtagagagtgggtttcactatgttggccaggctggtctggaacgcctgacctcaagtgatccgtccgcctcggccttccaaagttctgggattacaggcgtgagccaccgcgcccggcctgagtgagtcttaatccgtggccatctgcgttcctgcaggcttcatctggccctatggtcccctggcatcatggctgccctcagatcccttgtgaagcccaagatcgtcaaaaagagaaccaagaaattcatccggcaccagtcagaccgatatgtcaaaatcaagcgtaactggtggaaacccagaggcattgacaacagggttcatagaaggttcaagggccaggtcttgatatgatgcccagcattggttataggagcaaaaaaaaaaaaaaaaaaaaaaaaccagaaagcacgtgctgcccagtggcttccggaagttcctggtccacaatgtcaaggagctgagagtgctgctgatatgcaacaaatgagaagaataatgtctggggtgaaggtgaagcacccagcccaagactcagcagccaggaagtggcccagcgctctttataccacgggtgcaggaattcacacagaaaagtggaggccaaggcgtgagaattcctcaatgactgccctctaaaggaagagatccaaagaaatcctgaggaagcacaacaaacaaaaacactctggatcagaacttcctgtgccagcgttacatcagggttttctagcagcaagggcgggctccacatggctgaagcaggcaaccaggaggtaggcagggcccggccctgaggggctgagttgggggagtcccaggtctcgggaagagtgatctcaggctgccctgcaggtgttcctgggggatcctgggacagcatcagggacgctggcccccagtgcttccttcccatctcacaaatgggcatttgttcatcggctaaacaacactttctagact

SEQ ID NO: 408047 - DNA, 2701 bp, Homo sapiens
ctgcaaagagaacagaaggggtgctgctgtaggaaataaatgaatggctcagaagaccacactgaggaagttgtgagttgataatggaagatctccaggtttgaggcatccttagagggatatgatggttttgtgtgtgttgggggtgtggtagcgcagctgctacctagggaattagaaggttttctttattgaacatttaccctgtgacaggtactgcaggcattcagcacacaatgtcgtctccattttacaggcatcatggctgccctcagatcccttgtgaagcccaagatcgtcaaaaagagaaccaagaaattcatccggcaccagtcagaccgatatgtcaaaatcaagcgtaactggtggaaacccagaggcattgacaacagggttcatagaaggttcaagggccaggtcttgatatgatgcccagcattggttataggagcaaaaaaaaaaaaaaaaaaaaaaaaccagaaagcacgtgctgcccagtggcttccggaagttcctggtccacaatgtcaaggagctgagagtgctgctgatatgcaacaaatgagaagaataatgtctggggtgaaggtgaagcacccagcccaagactcagcagccaggaagtggcccagcgctctttataccacgggtgcaggaattcacacagaaaagtggaggccaaggcgtgagaattcctcaatgactgccctctaaaggaagaggaccaggcttcctgtcagagactgaggacccaggaagaaacatgtctcggcccctgtccccctccacaattcagaggccacattctaacaggggaggctgaccaattaaacagataatgacacctcctagagctaagagctctccgactatgaaccagatgcctggagaacacggatgaatggtctgagcatgagcaggggtgggaggcagcgttaagggaggcatcagagtcagaacctagcaaacaagtgtttgtgaagaagaattcatagaaaagggcaatgcgggcatcacatgggctaaggaacagaggggtagcagtagctgttgtgccaagctgcaggtgttatacactaccctctagatctgggtttccttaaaacaccttgagaggacaaccctgcaaagcacggcacagtggccgagagggaaaggagcattcgaggtctcagtcctcgctctgagcctacttctctgcttctgggctccagccatctttgtggaaagggggctgctagtgacaccctctcaagggtctttccagctctaggtcggctgtgctggagtctaggatttgcccactgagaaatctgtttccaagttccttcaacctgatgcatcctgcagcatcacggcagctgttcagagtggtcagaaggcccctgaatgagctcagtagagggaagcctgggaacagggaggcacctgcagctctactcatggcctggccagagctcagcagctcttctctgccatctagtggggatggcataccatcactggggaccaccctgtgcaaactggtgagcctgagtgcctgtcacagagggaaagaaaggggggggatacaggatttagatgaaatagcaactcctaccctattgtcaaaatcatccagctttttcaaaacatcatattgtactgatttttttgtgtttttgacagagtcttgctgtgtcaccaaggctggaatgcagtggcatgatctcggctcactgtagcctctgtctccctggttcaagcaattctgccccagcctcccaagtagctgggactacaggcatgcgccaccacacccagctaagttttgtatttttttagtagagtcagggttttactttggccaggctggtcttaaactcctggcctcaactgatctgcctgtctcggcctcccaaagaactgggattacaggcatgaggcaccgtgcctgtcccatgttgtacttaatagatatttaccatatacaattattttttaatttaaataaatcaatgaacagtgttattttttaaatcttgtggctttaatacaccctttcaattctcagggagtgttttggtgatacaggctggggagttaaataaatgaacgaataaacttagttgttatccattcaaaaaaaaaaaaaaaaaaaaaaaaaaaaaaaaaaaaaaaaaaaaaaacaaaaaaaaaaaaaaaaaaaaaaaaaaaaaacaaaaaaaaagaagagagagagagaagagaagaaacaaataacaaatcaaaaaagaagaagcaacaaaaaagcaaagcgtaaacaacacagagagcgcgggcgcgagcagaggcgagccccccttgagtgagaacacattataaaataccgcagcgaagacgagggtagcgtttacagaaagacggagcagcgttcctcgagcgggagggacaacttcacctattaacaacctgaatctagcttgtggaagaacagaacaacaccactcggtcggagggaggacacaaacaaatgacgtgataacagtaacatctccatcctctgcatcgaaaggattaccacacccccgttcgggcggcgagacaaaaataaatgatagtgaaagttacatactacagcggtagcacaataaacgacacgtcagactactatgatcggctataatagtcataaatgtttgcgagcacaagccgccgagtttattcgatcacgagacctctt

SEQ ID NO: 408048 - DNA, 861 bp, Homo sapiens
ggtgtaacggcccgaatctgggatgcctgctcggtgagttgtttgtttgtttgtttttgagacagagtctcactttgcttcccaggctggagtgcagtggtgcgatctcagcttactgcagcctccgcttccggggttcaagcgattctcctgcctcagcctgccaagtagctgggactaccggcgcccaccaccacgcctggctaatttttgaatttttagtagagagtgggtttcactatgttggccaggctggtctggaacgcctgacctcaagtgatccgtccgcctcggccttccaaagttctgggattacaggcgtgagccaccgcgcccggcctgagtgagtcttaatccgtggccatctgcgttcctgcaggcttcatctggccctatggtcccctgatgagaagaataatgtctggggtgaaggtgaagcacccagcccaagactcagcagccaggaagtggcccagcgctctttataccacgggtgcaggaattcacacagaaaagtggaggccaaggcgtgagaattcctcaatgactgccctctaaaggaagagcttttctggagaggctgacactttttaaggtcagacaagagacatttgccatctattctctctgaagtttgctacctgaaggcttcatctacatgaaaagaacctgggcttggctgggcactgtggctgacgcctgtggtcccagcactttgggaggccgagatggagtctcgctctgttgccggggctggagtgcagtggcgtgatctcagctcactgcagcattcacctcacgggtcaggccgattctgtgcctcagctcccgagtactgggattgccagcctgcgcaccaag

SEQ ID NO: 408049 - DNA, 2024 bp, Homo sapiens
ttgccttttccctgtcaggacccagaggttacctcccatcagccccggcgctctctcatcccttctctcttccttggtgcttctttttcctgctcggtgagttgtttgtttgtttgtttttgagacagagtctcactttgcttcccaggctggagtgcagtggtgcgatctcagcttactgcagcctccgcttccggggttcaagcgattctcctgcctcagcctgccaagtagctgggactaccggcgcccaccaccacgcctggctaatttttgaatttttagtagagagtgggtttcactatgttggccaggctggtctggaacgcctgacctcaagtgatccgtccgcctcggccttccaaagttctgggattacaggcgtgagccaccgcgcccggcctgagtgagtcttaatccgtggccatctgcgttcctgcaggcttcatctggccctatggtcccctggcatcatggctgccctcagatcccttgtgaagcccaagatcgtcaaaaagagaaccaagaaattcatccggcaccagtcagaccgatatgtcaaaatcaagatgagaagaataatgtctggggtgaaggtgaagcacccagcccaagactcagcagccaggaagtggcccagcgctctttataccacgggtgcaggaattcacacagaaaagtggaggccaaggcgtgagaattcctcaatgactgccctctaaaggaagaggaccaggcttcctgtcagagactgaggacccaggaagaaacatgtctcggcccctgtccccctccacaattcagaggccacattctaacaggggaggctgaccaattaaacagataatgacacctcctagagctaagagctctccgactatgaaccagatgcctggagaacacggatgaatggtctgagcatgagcaggggtgggaggcagcgttaagggaggcatcagagtcagaacctagcaaacaagtgtttgtgaagaagaattcatagaaaagggcaatgcgggcatcacatgggctaaggaacagaggggtagcagtagctgttgtgccaagctgcaggtgttatacactaccctctagatctgggtttccttaaaacaccttgagaggacaaccctgcaaagcacggcacagtggccgagagggaaaggagcattcgaggtctcagtcctcgctctgagcctacttctctgcttctgggctccagccatctttgtggaaagggggctgctagtgacaccctctcaagggtctttccagctctaggtcggctgtgctggagtctaggatttgcccactgagaaatctgtttccaagttccttcaacctgatgcatcctgcagcatcacggcagctgttcagagtggtcagaaggcccctgaatgagctcagtagagggaagcctgggaacagggaggcacctgcagctctactcatggcctggccagagctcagcagctcttctctgccatctagtggggatggcataccatcactggggaccaccctgtgcaaactggtgagcctgagtgcctgtcacagagggaaagaaaggggggggatacaggatttagatgaaatagcaactcctaccctattgtcaaaatcatccagctttttcaaaacatcatattgtactgatttttttgtgtttttgacagagtcttgctgtgtcaccaaggctggaatgcagtggcatgatctcggctcactgtagcctctgtctccctggttcaagcaattctgccccagcctcccaagtagctgggactacaggcatgcgccaccacacccagctaagttttgtatttttttagtagagtcagggttttactttggccaggctggtcttaaactcctggcctcaactgatctgcctgtctcggcctcccaaagaactgggattacaggcatgaggcaccgtgcctgtcccatgttgtacttaatagatatttaccatatacaattattttttaatttaaataaatcaatgaacagtgttatttttt

SEQ ID NO: 408050 - DNA, 2913 bp, Homo sapiens
ttgccttttccctgtcaggacccagaggttacctcccatcagccccggcgctctctcatcccttctctcttccttggtgcttctttttcctgctcggtgagttgtttgtttgtttgtttttgagacagagtctcactttgcttcccaggctggagtgcagtggtgcgatctcagcttactgcagcctccgcttccggggttcaagcgattctcctgcctcagcctgccaagtagctgggactaccggcgcccaccaccacgcctggctaatttttgaatttttagtagagagtgggtttcactatgttggccaggctggtctggaacgcctgacctcaagtgatccgtccgcctcggccttccaaagttctgggattacaggcgtgagccaccgcgcccggcctgagtgagtcttaatccgtggccatctgcgttcctgcaggcttcatctggccctatggtcccctggcatcatggctgccctcagatcccttgtgaagcccaagatcgtcaaaaagagaaccaagaaattcatccggcaccagtcagaccgatatgtcaaaatcaagcgtaactggtggaaacccagaggcattgacaacagggttcatagaaggttcaagggccaggtcttgatatgatgcccagcattggttataggagcaaaaaaaaaaaaaaaaaaaaaaaaccagaaagcacgtgctgcccagtggcttccggaagttcctggtccacaatgtcaaggagctgagagtgctgctgatatgcaacaaatgagaagaataatgtctggggtgaaggtgaagcacccagcccaagactcagcagccaggaagtggcccagcgctctttataccacgggtgcaggaattcacacagaaaagtggaggccaaggcgtgagaattcctcaatgactgccctctaaaggaagaggaccaggcttcctgtcagagactgaggacccaggaagaaacatgtctcggcccctgtccccctccacaattcagaggccacattctaacaggggaggctgaccaattaaacagataatgacacctcctagagctaagagctctccgactatgaaccagatgcctggagaacacggatgaatggtctgagcatgagcaggggtgggaggcagcgttaagggaggcatcagagtcagaacctagcaaacaagtgtttgtgaagaagaattcatagaaaagggcaatgcgggcatcacatgggctaaggaacagaggggtagcagtagctgttgtgccaagctgcaggtgttatacactaccctctagatctgggtttccttaaaacaccttgagaggacaaccctgcaaagcacggcacagtggccgagagggaaaggagcattcgaggtctcagtcctcgctctgagcctacttctctgcttctgggctccagccatctttgtggaaagggggctgctagtgacaccctctcaagggtctttccagctctaggtcggctgtgctggagtctaggatttgcccactgagaaatctgtttccaagttccttcaacctgatgcatcctgcagcatcacggcagctgttcagagtggtcagaaggcccctgaatgagctcagtagagggaagcctgggaacagggaggcacctgcagctctactcatggcctggccagagctcagcagctcttctctgccatctagtggggatggcataccatcactggggaccaccctgtgcaaactggtgagcctgagtgcctgtcacagagggaaagaaaggggggggatacaggatttagatgaaatagcaactcctaccctattgtcaaaatcatccagctttttcaaaacatcatattgtactgatttttttgtgtttttgacagagtcttgctgtgtcaccaaggctggaatgcagtggcatgatctcggctcactgtagcctctgtctccctggttcaagcaattctgccccagcctcccaagtagctgggactacaggcatgcgccaccacacccagctaagttttgtatttttttagtagagtcagggttttactttggccaggctggtcttaaactcctggcctcaactgatctgcctgtctcggcctcccaaagaactgggattacaggcatgaggcaccgtgcctgtcccatgttgtacttaatagatatttaccatatacaattattttttaatttaaataaatcaatgaacagtgttattttttaaatcttgtggctttaatacaccctttcaattctcagggagtgttttggtgatacaggctggggagttaaataaatgaacgaataaacttagttgttatccattcaaaaaaaaaaaaaaaaaaaaaaaaaaaaaaaaaaaaaaaaaaaaaaacaaaaaaaaaaaaaaaaaaaaaaaaaaaaaacaaaaaaaaagaagagagagagagaagagaagaaacaaataacaaatcaaaaaagaagaagcaacaaaaaagcaaagcgtaaacaacacagagagcgcgggcgcgagcagaggcgagccccccttgagtgagaacacattataaaataccgcagcgaagacgagggtagcgtttacagaaagacggagcagcgttcctcgagcgggagggacaacttcacctattaacaacctgaatctagcttgtggaagaacagaacaacaccactcggtcggagggaggacacaaacaaatgacgtgataacagtaacatctccatcctctgcatcgaaaggattaccacacccccgttcgggcggcgagacaaaaataaatgatagtgaaagttacatactacagcggtagcacaataaacgacacgtcagactactatgatcggctataatagtcataaatgtttgcgagcacaagccgccgagtttattcgatcacgagacctctt

SEQ ID NO: 408051 - DNA, 1588 bp, Homo sapiens
ttgccttttccctgtcaggacccagaggttacctcccatcagccccggcgctctctcatcccttctctcttccttggtgcttctttttcctgctcggtgagttgtttgtttgtttgtttttgagacagagtctcactttgcttcccaggctggagtgcagtggtgcgatctcagcttactgcagcctccgcttccggggttcaagcgattctcctgcctcagcctgccaagtagctgggactaccggcgcccaccaccacgcctggctaatttttgaatttttagtagagagtgggtttcactatgttggccaggctggtctggaacgcctgacctcaagtgatccgtccgcctcggccttccaaagttctgggattacaggcgtgagccaccgcgcccggcctgagtgagtcttaatccgtggccatctgcgttcctgcaggcttcatctggccctatggtcccctggcatcatggctgccctcagatcccttgtgaagcccaagatcgtcaaaaagagaaccaagaaattcatccggcaccagtcagaccgatatgtcaaaatcaagcgtaactggtggaaacccagaggcattgacaacagggttcatagaaggttcaagggccaggtcttgatatgatgcccagcattggttataggagcaaaaaaaaaaaaaaaaaaaaaaaaccagaaagcacgtgctgcccagtggcttccggaagttcctggtccacaatgtcaaggagctgagagtgctgctgatatgcaacaaatgagaagaataatgtctggggtgaaggtgaagcacccagcccaagactcagcagccaggaagtggcccagcgctctttataccacgggtgcaggaattcacacagaaaagtggaggccaaggcgtgagaattcctcaatgactgccctctaaaggaagaggtgagtgtggggcctgctctgagtgctaaacacaggcagtctctgtgtctcccaaggaacccaatcgctatcacatttgctttaaatatttagagacgcacgatttgtttccttgtcagtcaaagccaagaggtggcatgtgatgacatgctgccaaatgctcagggcacagacggaaactttcatgtcaaccctgacatagtcaccacagatctcaatggccttgacgtgctctcctgctgagatttacatccccacggtgactttgggctctttcatatttctggcccagtcagcctgtttggtgattagcatctttgtttctttggggtctccagatccaaagaaatcctgaggaagcacaacaaacaaaaacactctggatcagaacttcctgtgccagcgttacatcagggttttctagcagcaagggcgggctccacatggctgaagcaggcaaccaggaggtaggcagggcccggccctgaggggctgagttgggggagtcccaggtctcgggaagagtgatctcaggctgccctgcaggtgttcctgggggatcctgggacagcatcagggacgctggcccccagtgcttccttcccatctcacaaatgggcatttgttcatcggctaaacaacactttctagact

SEQ ID NO: 408052 - DNA, 2533 bp, Homo sapiens
ttgccttttccctgtcaggacccagaggttacctcccatcagccccggcgctctctcatcccttctctcttccttggtgcttctttttgcatcatggctgccctcagatcccttgtgaagcccaagatcgtcaaaaagagaaccaagaaattcatccggcaccagtcagaccgatatgtcaaaatcaagcgtaactggtggaaacccagaggcattgacaacagggttcatagaaggttcaagggccaggtcttgatatgatgcccagcattggttataggagcaaaaaaaaaaaaaaaaaaaaaaaaccagaaagcacgtgctgcccagtggcttccggaagttcctggtccacaatgtcaaggagctgagagtgctgctgatatgcaacaaatgagaagaataatgtctggggtgaaggtgaagcacccagcccaagactcagcagccaggaagtggcccagcgctctttataccacgggtgcaggaattcacacagaaaagtggaggccaaggcgtgagaattcctcaatgactgccctctaaaggaagaggaccaggcttcctgtcagagactgaggacccaggaagaaacatgtctcggcccctgtccccctccacaattcagaggccacattctaacaggggaggctgaccaattaaacagataatgacacctcctagagctaagagctctccgactatgaaccagatgcctggagaacacggatgaatggtctgagcatgagcaggggtgggaggcagcgttaagggaggcatcagagtcagaacctagcaaacaagtgtttgtgaagaagaattcatagaaaagggcaatgcgggcatcacatgggctaaggaacagaggggtagcagtagctgttgtgccaagctgcaggtgttatacactaccctctagatctgggtttccttaaaacaccttgagaggacaaccctgcaaagcacggcacagtggccgagagggaaaggagcattcgaggtctcagtcctcgctctgagcctacttctctgcttctgggctccagccatctttgtggaaagggggctgctagtgacaccctctcaagggtctttccagctctaggtcggctgtgctggagtctaggatttgcccactgagaaatctgtttccaagttccttcaacctgatgcatcctgcagcatcacggcagctgttcagagtggtcagaaggcccctgaatgagctcagtagagggaagcctgggaacagggaggcacctgcagctctactcatggcctggccagagctcagcagctcttctctgccatctagtggggatggcataccatcactggggaccaccctgtgcaaactggtgagcctgagtgcctgtcacagagggaaagaaaggggggggatacaggatttagatgaaatagcaactcctaccctattgtcaaaatcatccagctttttcaaaacatcatattgtactgatttttttgtgtttttgacagagtcttgctgtgtcaccaaggctggaatgcagtggcatgatctcggctcactgtagcctctgtctccctggttcaagcaattctgccccagcctcccaagtagctgggactacaggcatgcgccaccacacccagctaagttttgtatttttttagtagagtcagggttttactttggccaggctggtcttaaactcctggcctcaactgatctgcctgtctcggcctcccaaagaactgggattacaggcatgaggcaccgtgcctgtcccatgttgtacttaatagatatttaccatatacaattattttttaatttaaataaatcaatgaacagtgttattttttaaatcttgtggctttaatacaccctttcaattctcagggagtgttttggtgatacaggctggggagttaaataaatgaacgaataaacttagttgttatccattcaaaaaaaaaaaaaaaaaaaaaaaaaaaaaaaaaaaaaaaaaaaaaaacaaaaaaaaaaaaaaaaaaaaaaaaaaaaaacaaaaaaaaagaagagagagagagaagagaagaaacaaataacaaatcaaaaaagaagaagcaacaaaaaagcaaagcgtaaacaacacagagagcgcgggcgcgagcagaggcgagccccccttgagtgagaacacattataaaataccgcagcgaagacgagggtagcgtttacagaaagacggagcagcgttcctcgagcgggagggacaacttcacctattaacaacctgaatctagcttgtggaagaacagaacaacaccactcggtcggagggaggacacaaacaaatgacgtgataacagtaacatctccatcctctgcatcgaaaggattaccacacccccgttcgggcggcgagacaaaaataaatgatagtgaaagttacatactacagcggtagcacaataaacgacacgtcagactactatgatcggctataatagtcataaatgtttgcgagcacaagccgccgagtttattcgatcacgagacctctt

SEQ ID NO: 408053 - DNA, 445 bp, Homo sapiens
caggatccctattttatagacaagaaaactcagaggtgctgagagcagtgtctgcacctgtgctcgccatctcaatatctacacagtcccctcgcatcccattggtgtctccatttcttgggagtgagaatggcgggggtgcctgccttcctagtggcaaaagccacgagctcctggtttttcccaccaaaaaagcatgtaaggaaatagtgaagtcctattaccaaaggcaactactgtgtggcatacttccttttcatttggtccttttttccctcccctatggaacagttggcagtctgcacagatgctaacccacctgtgtattatttccttcagcgtaactggtggaaacccagaggcattgacaacagggttcatagaaggttcaagggccaggtcttgatatgatgcccagcattggttataggagcaaaaaaaaaaa

SEQ ID NO: 408054 - DNA, 365 bp, Homo sapiens
atgattccgtatcaaattttaacttctagatgtttatttttttaactgcagtcaaggcacaaaccagtgtaaatcagctgcacaaatgtttgtcataataaatttttattaggttttatattggaagccatttagaaactagtcttataatcactcataaaacattagctatcttattgtttttcaagagtatgtagagtatagtaattttttagtaacatcccaaatccgtctttctccaaacacaatacagcaaaaatgtgttttctgtgattcagtaagtcagattgcattttgagtattcatgtagttttccccacccccctgaatcaggaattttcttcccccattattattgttttctt

SEQ ID NO: 408055 - DNA, 388 bp, Homo sapiens
  misc_feature (7)..(7): n is a, c, g, or t
tgccccntccaccatgtgaagatacagtgagaagttgcccatctggtatgggaagcaggccaccccccagataccaaatctcccagcgtctcaatcttgaacttcccagcgtccagaatggtgagaaataaatgtatgttgtttataagccaccaagtttatggtattttattatagcagcctgaacagactaagacagcctgactttaaataagttaggaggatatccagcaattggcctcctccaactgtggaaccaagaagagtgtgcaccttactcatggtttctgtcttgtaagcagtaagccttggacaatatacatactttctcttagcccctatttcctgatccaaaaagttaggatatatatatcttataggaatgtca

SEQ ID NO: 408056 - DNA, 925 bp, Homo sapiens
tagcactttgggaagccgaggtgggcggatcacttgaggtcaggagtcggagaccagcctggccaacgtgatgaaaccctgtctctactaaaaatacaaaaattaactgggcgtggtggtgtgcgcctgtaatcccagctactcgggaggctcaggcatgggaatcgcttgaacccgggagacggaggttgcagtaagccaagattgcgccactgcactccagcctgggcgacagagagagactctgtctcaaaaaggattattaaaaaaaaaaagaattgtagaatgttttaggataatataaaggagtcatgtttttttccccaaccgctacacacttaaaataaacaacctagagcaaaatactactttatcttaattctttttttttccccttaggcatctttcttgcaggatcgtcttaagtctttataagttcttagtcatttagattgaatacaagtaacctgcatagaaatcccatttgtatcaatagagaacttgactatttttagtgaattatactatctttaacatgtttatctgcatggggatgaacttttgaaacacaatagtttgagtgagtcaaatgatgaccatttggtagtcacttgaatattacacataaattgacacaatgacttttgacataaaaatttcaggagtcatttctatttgtagggactgctctgtttctttatttacataaagtatttcagaaaattttcaatttagccaagttctacatttagcataacatattgcacaaatatctttctagtttttattgttagacactgactttattctatagtgctgaatgcactgtgtgagaacagtcacgtcaagttatttaagtggtgcttcagaaggaaagactgaaattaatgccacatgtatcctgaacttaaattaaaataaaata

SEQ ID NO: 408057 - DNA, 503 bp, Homo sapiens
gtcttttttttttaactgaggcccagagaagggcagcggcccactgaaggccatgcacaagctaaggtcctctggttgatggctccaaggctgtttcctcctcccagcctccctataatcctaggcaagggtaagtacagggtcactgagtatgcatggcaggtccaaccttatgcaagctgctttccttggggtaagcagtggaaaacacttccaactaaggactttaatttcaggtcttccattaatgtggccaagtccctgcccctctctggatcccaatttccctatctgtaaagtgaagtaggcgagtttggtaatcttttgctaaaggctcagccagttctgaacctctgaggttctaattagaaagtactgcaaggggccgggcatgggtggttgcgcctgtaatcctagcactttgggaggccgaggtgggaaggtggcttgaggccaggggtttgagacaagcctagacaacatgatgaaatccatctctatta

SEQ ID NO: 408058 - DNA, 3442 bp, Homo sapiens
  misc_feature (290)..(290): n is a, c, g, or t
  misc_feature (1382)..(1382): n is a, c, g, or t
  misc_feature (3136)..(3136): n is a, c, g, or t
ctgacctcaggtgagccacccacctcagcctcccaaagtgctgggattatgggcgtgagccaccacacccagccgtctctctttttttttcaaggacaccagtcatatgggatttagtgcttacacactccagtgtggcctcatcttaagtaattacatttgcagcaaccccatttctaaatgaggtcatattctcaggttctgagggttagggcttctacatatctttctggaggatacagcacactcaattcctaatagcaactgaagcttcttcttaaacaaaaaanaaaatactcttatttcagttatcatattataaagtgttctgaatcctattggaaactttcaacctcttttttgatatttgttgtaatgactattaaaaatagcataaatttaacatagaaatttaaaaatatattacaaaaagtctgggcacggtggctcatgcctgtagtcccagcattttgggaggccgaggcaggaggatcacctgaggtcaggagttcaagaccaacctggtcaacatggtgaaactccatctctactaaaataatacaaacattagcaggtatggtggcaggcgcctgcaatcccagctacttggatggctgaggcaggaaaatcacttgaacctgggaggtgaaagttgcagtgagctgagatcgcaccattgcactacagcctgtacaacaagagtgaaactctgtctcaaaaaaaatgaataaatgaataaaaaaattaaaaaagtataatgaaaataatcacgcataaagacttgttaattataatattcatatatttgtatttatgtaaaaacattttttattatgcatacacaataatatattttatggttgtgcagcattcaatccatccagttgtattcataatatacaccgaccagctgtaaggtcttatatttagagttcttattataaatgcgtatctattttttcaaatatgacttactttaagcacttttgtagtctctttgagactaagatatttgtctacattttacagcattctgttttctctctcatggcttttcttctctttctctgatacctagcttagattatatatttatttcagttttacattgtcgtttctattcaggactgtgtacgtgctgtccatcctctcttcctgtagcagtttcccaaacttttcatataactacttctttcaggcctctacgtaacattactttgtagacaaggctttcccgcctccttgaaatatggtgtctcagtacctgtattgtaataaaacctatcacacaaatgtttctcattttattttttgtttttaatactgtagaggtaaggcctgtgacttttctatctacccagcattccccagcactcataatntatttgctcaataaatgttcctagatagtccctattttgggaatttcactgtcatcttttccctttccaagtctgaatcctagaagtctactttattacactccttctcccttaagtgaaatatacatgtatacacacacacacatatatatacacacacatatatgtgtgtataaatatatgtgtatgtaaatatgtgtgtatatgtgtgtgtgtatatatttatatatcgtttttgcctctttaatatgtcttccatatctcatttgtctttcttttgagacaaggtcttgctctgttgtacaagctggaatgcaattgcaagatctcagctaactgtagctgctgcctccaggtctcaagcaatccttccacctcagcctccagagtagctgggactataggcatgccccacaaggcctgggtaatttttctgtttttcctttttcttttcttttttattttatagagacagggtctctctgtgttgcccaggctgatcttgaactcctgggctcaagagatccacccacctggtcctcccaaagtgctaggattatagggtgagccaccccgctcagaccaatatctccgcttcttcacagccctctcaccaccttaagccttattatcacaatctcttacttgatctatgacagtactctgtaaatgatacacacttttcacacctttcctgttgtaacccattctcaattttctcaggagatactttaaaaatattatttaaatcatgtaattctattgtttaaaaccttcaatggctttaatggcttctactgcttttgcgataaagagaaaaatccttcacgttacccataggttttgactatagctactgggtttctgtccaggcaaaagtcattatttccctctttgttcctacttcaggtatatggatcttctttgagatctccaaaattttcatgttgtcttctgacttaacgaatttacacacgttgttttctatagaacaaataattctgcctgttttaattctccattcatacctaattccaactcatccttaacatattgattctaaggtcatgattcaggaaaaccttctgtaacttttcagactctatcagagtccagtatttttgcttttaaaatatattgctatattataatactgtttatagcattaattatatgttttcatatatacatatatatgcttaatttactgttagctttgcctcataatattcaaatgtaagaaatgtaaaattatttttctagagcaaaaaatacaatgcttctatttcctactgaggcttttagagaatacctccaagaaagtacaaagtttggatgagatactgaatttccagatgcgctcaaaggcatcactcactgacagccacttctgaccagagactgggacagaaatgaatacctttcctggtgtgcccaaggccttggtattaagtaactatctatcttccacctgtctctacagttatccaccatggaatgagcagtgctagacacagatgcattggtccttacatatgggaaaatgtgaaactcacttaccttttctggtcataggaaagaaattaatcatccgtcttgccagttaagtgtcattatctcatctcccagagccagacttgcttacttctctccctgagccattttagaacagagtttggcagtgaagtatgtgtgtttggagatggggggaaaggggagacatttgttgacttctgggaatcttatgtcttgtnatttcaactgtgcaaaataaaatctattgtttctcttcatcaaggaacccagaaaaataatatcaggattgtgtttgtatcttagagcacagtagtaaaagtatttcttatttaaaaataaaatcctttgggaatgtgttttttatatcacttgtttttgattcacaatatacaaacgctcatggaaaaaaaaagcaatacaaagggtcaaaccagtaaaaatacactcttttccctcatagacttagtttttctccccaaatgcagcctcaatactaattgtttgtgtagctttcaaagacacaa

SEQ ID NO: 408059 - DNA, 769 bp, Homo sapiens
tttgcttttctctctgatctgactaacctctttcattctttgccctatgttatatggcttagaccaaagcctgagacatttaaccaatttataaatattaaatgcagaaggcatactttatcagttcctggaaacatcaaagaagctggaaggggaatggaaattggatggcactttgtggaggtcactttgctgacagtcaagtattcaaagatctcctaagatacccggtctttaaagtattatacaaaatatcaggcccagtcccaaggcgcaacttgtgccagcagcccgcgccagcagcctgcaccagcaaaatagcagtagcaagaagagagccagcagaagacacctaccctggcccggaagacgcgtacccctgaagattgaggaagaggccatccgggtacaacgtagcagttacgtcagactaagacacttcctgtttataggagactataaaacctttgccctgtcctcactaggggctgacaccattttagtcctcagaccgcctgcacccaggcgctcattaaaacagcatgttgcttccaccgcctcatgttgtctgttggcgcgctctcggggttcgaaccagtacaagaaccttagatatatgatactgcacctaataaaaatagtctaaaataacaacagccaatataggcacaaacctgaaagtgtctgcatagaagtaacacatccatgtacttgataaactaaagtgtagatattttatgcggaataaactttgaagtgaggaatacca

SEQ ID NO: 408060 - DNA, 351 bp, Homo sapiens
tttgcttttctctctgatctgactaacctctttcattctttgccctatgttatatggcttagaccaaagcctgagacatttaaccaatttataaatattaaatgcagaaggcatactttatcagttcctggaaacatcaaagaagctggaaggggaatggaaattggatggcactttgtggaggtcactttgctgacagtcaagtattcaaaggatgaaggctcagatcagtttcatctatatgctatgcctgcctgacctggagaacttggtgttaaaggaaatgtgtttatcaaatgtgtcatgttatccttggagggcaactgaggatcagagcacagctgccttgaa

SEQ ID NO: 408061 - DNA, 2393 bp, Homo sapiens
aacagttctttgaaatgctatgttaagatatcactaacaatttcaatttataaatacacacccatacacattttcttttctaaattgtcatatcccaaacacgaaaacaatcgaataagagaacaggctgaatagtgatttttttctttcaattattactactgaaacaaatcaaaacaactctgagaggttgccagcaccgcagaaggcatttccacataaaaagagttaatgagcagaccacgcagttcaacagccagtgaccatttgcaagcctcctaggtatattcccagcagacacattatcagattaaaggaagtgcaaacaaactgggctgaaagtttctttgtccaaacccagcctcttcttcctgtgatgtcatattacaaatctaggaagcctttctttttcacttcagagaaagcgacctcaagatacaactggcaactgaggaaaaggcctcaattcaacaagagctaacaagcttgggagtttatttcggaatctttaaaagactcttctgcttacccacaatctgggatccactgcaggaaaacaaaaaaggaaaacttcatttaaaagaagcaagaagtaaaatgggacaaattgggaatgtttaagtctctgaaactctgcactgaaaagaaaataagattgataacttaagcttaacattctgaggcataaagaaacattaactttggagtattcatcttgactactgaaatacaagtttagaagacaagtggtttcattctggtcacagatcacagcttttctttaaatttataatcctatgggttggactcgttgactgtattttttaaaggttgctcgtcagttaactgagccttggaattcatggattttctaaagactaacaaatgaaaatattttcctgttgaagaacccagcggaaattttacagcaacaaatttcatgtttcttttgggtatttctgagaaaaaggaaatatttataaaaccatccaaagatccagataatttgcaaataaattggaggttatagaggttataatctgaatcccaaaggagactgcagctgatgaaagtgcttccaaactgaaaattggacgtgcctttacgatggtaagcgttaacagctcccactgcttctataatgactcctttaagtacactttgtatgggtgcatgttcagcatggtgtttgtgcttgggttaatatccaattgtgttgccatatacattttcatctgcgtcctcaaagtccgaaatgaaactacaacttacatgattaacttggcaatgtcagacttgctttttgtttttactttacccttcaggattttttacttcacaacacggaattggccatttggagatttactttgtaagatttctgtgatgctgttttataccaacatgtacggaagcattctgttcttaacctgtattagtgtagatcgatttctggcaattgtctacccatttaagtcaaagactctaagaaccaaaagaaatgcaaagattgtttgcactggcgtgtggttaactgtgatcggaggaagtgcacccgccgtttttgttcagtctacccactctcagggtaacaatgcctcagaagcctgctttgaaaattttccagaagccacatggaaaacatatctctcaaggattgtaattttcatcgaaatagtgggattttttattcctctaattttaaatgtaacttgttctagtatggtgctaaaaactttaaccaaacctgttacattaagtagaagcaaaataaacaaaactaaggttttaaaaatgatttttgtacatttgatcatattctgtttctgttttgttccttacaatatcaatcttattttatattctcttgtgagaacacaaacatttgttaattgctcagtagtggcagcagtaaggacaatgtacccaatcactctctgtattgctgtttccaactgttgttttgaccctatagtttactactttacatcggacacaattcagaattcaataaaaatgaaaaactggtctgtcaggagaagtgacttcagattctctgaagttcatggtgcagagaattttattcagcataacctacagaccttaaaaagtaagatatttgacaatgaatctgctgcctgaaataaaaccattaggactcactgggacagaactttcaagttccttcaactgtgaaaagtgtctttttggacaaactatttttccacctccaaaagaaattaacacatggacattttaaagtctttagtataaagaaaatttgtattcaatgtgttaagcattaacatgtattttatttgtgtatccactccatctgatttttctgagccattttgatttgttccttcattaaaaaaaatctcttaaagtta

SEQ ID NO: 408062 - DNA, 2481 bp, Homo sapiens
aacagttctttgaaatgctatgttaagatatcactaacaatttcaatttataaatacacacccatacacattttcttttctaaattgtcatatcccaaacacgaaaacaatcgaataagagaacaggctgaatagtgatttttttctttcaattattactactgaaacaaatcaaaacaactctgagaggttgccagcaccgcagaaggcatttccacataaaaagagttaatgagcagaccacgcagttcaacagccagtgaccatttgcaagcctcctaggtatattcccagcagacacattatcagattaaaggaagtgcaaacaaactgggctgaaagtttctttgtccaaacccagcctcttcttcctgtgatgtcatattacaaatctaggaagcctttctttttcacttcagagaaagcgacctcaagatacaactggcaactgaggaaaaggcctcaattcaacaagagctaacaagcttgggagtttatttcggaatctttaaaagactcttctgcttacccacaatctgggatccactgcaggaaaacaaaaaaggaaaacttcatttaaaagaagcaagaagtaaaatgggacaaattgggaatgtttaagtctctgaaactctgcactgaaaagaaaataagattgataacttaagcttaacattctgaggcataaagaaacattaactttggagtattcatcttgactactgaaatacaagtttagaagacaagtggtttcattctggtcacagatcacagcttttctttaaatttataatcctatgggttggactcgttgactgtattttttaaaggttgctcgtcagttaactgagccttggaattcatggattttctaaagactaacaaatgaaaatattttcctgttgaagaacccagcggaaattttacagcaacaaatttcatgtttcttttgggtatttctgagaaaaaggaaatatttataaaaccatccaaagatccagataatttgcaaataaattggaggttatagaggttataatctgaatcccaaaggagactgcagctgatgaaagtgcttccaaactgaaaattggacgtgcctttacgatggtaagcgttaacagctcccactgcttctataatgactcctttaagtacactttgtatgggtgcatgttcagcatggtgtttgtgcttgggttaatatccaattgtgttgccatatacattttcatctgcgtcctcaaagtccgaaatgaaactacaacttacatgattaacttggcaatgtcagacttgctttttgtttttactttacccttcaggattttttacttcacaacacggaattggccatttggagatttactttgtaagatttctgtgatgctgttttataccaacatgtacggaagcattctgttcttaacctgtattagtgtagatcgatttctggcaattgtctacccatttaagtcaaagactctaagaaccaaaagaaatgcaaagattgtttgcactggcgtgtggttaactgtgatcggaggaagtgcacccgccgtttttgttcagtctacccactctcagggtaacaatgcctcagaagcctgctttgaaaattttccagaagccacatggaaaacatatctctcaaggattgtaattttcatcgaaatagtgggattttttattcctctaattttaaatgtaacttgttctagtatggtgctaaaaactttaaccaaacctgttacattaagtagaagcaaaataaacaaaactaaggttttaaaaatgatttttgtacatttgatcatattctgtttctgttttgttccttacaatatcaatcttattttatattctcttgtgagaacacaaacatttgttaattgctcagtagtggcagcagtaaggacaatgtacccaatcactctctgtattgctgtttccaactgttgttttgaccctatagtttactactttacatcggacacaattcagaattcaataaaaatgaaaaactggtctgtcaggagaagtgacttcagattctctgaagttcatggtgcagagaattttattcagcataacctacagaccttaaaaagtaagatatttgacaatgaatctgctgcctgaaataaaaccattaggactcactgggacagaactttcaagttccttcaactgtgaaaagtgtctttttggacaaactatttttccacctccaaaagaaattaacacatggacattttaaagtctttagtataaagaaaatttgtattcaatgtgttaagcattaacatgtattttatttgtgtatccactccatctgatttttctgagccattttgatttgttccttcattaaaaaaaatctcttaaagttaaaaaaaaaaaaaaaaaaaaaaaaaaaaaaaaaaaaaaaaaaaaaaaaaaaaaaaaaaaaaaaaaaaaaaaaaaaaaaaccccgggggg

SEQ ID NO: 408063 - DNA, 2335 bp, Homo sapiens
aacagttctttgaaatgctatgttaagatatcactaacaatttcaatttataaatacacacccatacacattttcttttctaaattgtcatatcccaaacacgaaaacaatcgaataagagaacaggctgaatagtgatttttttctttcaattattactactgaaacaaatcaaaacaactctgagaggttgccagcaccgcagaaggcatttccacataaaaagagttaatgagcagaccacgcagttcaacagccagtgaccatttgcaagcctcctaggtatattcccagcagacacattatcagattaaaggaagtgcaaacaaactgggctgaaagtttctttgtccaaacccagcctcttcttcctgtgatgtcatattacaaatctaggaagcctttctttttcacttcagagaaagcgacctcaagatacaactggcaactgaggaaaaggcctcaattcaacaagagctaacaagcttgggagtttatttcggaatctttaaaagactcttctgcttacccacaatctgggatccactgcaggaaaacaaaaaaggaaaacttcatttaaaagaagcaagaagtaaaatgggacaaattgggaatgtttaagtctctgaaactctgcactgatttggagtattcatcttgactactgaaatacaagtttagaagacaagtggtttcattctggtcacagatcacagcttttctttaaatttataatcctatgggttggactcgttgactgtattttttaaaggttgctcgtcagttaactgagccttggaattcatggattttctaaagactaacaaatgaaaatattttcctgttgaagaacccagcggaaattttacagcaacaaatttcatgtttcttttgggtatttctgagaaaaaggaaatatttataaaaccatccaaagatccagataatttgcaaataaattggaggttatagaggttataatctgaatcccaaaggagactgcagctgatgaaagtgcttccaaactgaaaattggacgtgcctttacgatggtaagcgttaacagctcccactgcttctataatgactcctttaagtacactttgtatgggtgcatgttcagcatggtgtttgtgcttgggttaatatccaattgtgttgccatatacattttcatctgcgtcctcaaagtccgaaatgaaactacaacttacatgattaacttggcaatgtcagacttgctttttgtttttactttacccttcaggattttttacttcacaacacggaattggccatttggagatttactttgtaagatttctgtgatgctgttttataccaacatgtacggaagcattctgttcttaacctgtattagtgtagatcgatttctggcaattgtctacccatttaagtcaaagactctaagaaccaaaagaaatgcaaagattgtttgcactggcgtgtggttaactgtgatcggaggaagtgcacccgccgtttttgttcagtctacccactctcagggtaacaatgcctcagaagcctgctttgaaaattttccagaagccacatggaaaacatatctctcaaggattgtaattttcatcgaaatagtgggattttttattcctctaattttaaatgtaacttgttctagtatggtgctaaaaactttaaccaaacctgttacattaagtagaagcaaaataaacaaaactaaggttttaaaaatgatttttgtacatttgatcatattctgtttctgttttgttccttacaatatcaatcttattttatattctcttgtgagaacacaaacatttgttaattgctcagtagtggcagcagtaaggacaatgtacccaatcactctctgtattgctgtttccaactgttgttttgaccctatagtttactactttacatcggacacaattcagaattcaataaaaatgaaaaactggtctgtcaggagaagtgacttcagattctctgaagttcatggtgcagagaattttattcagcataacctacagaccttaaaaagtaagatatttgacaatgaatctgctgcctgaaataaaaccattaggactcactgggacagaactttcaagttccttcaactgtgaaaagtgtctttttggacaaactatttttccacctccaaaagaaattaacacatggacattttaaagtctttagtataaagaaaatttgtattcaatgtgttaagcattaacatgtattttatttgtgtatccactccatctgatttttctgagccattttgatttgttccttcattaaaaaaaatctcttaaagtta

SEQ ID NO: 408064 - DNA, 2178 bp, Homo sapiens
aacagttctttgaaatgctatgttaagatatcactaacaatttcaatttataaatacacacccatacacattttcttttctaaattgtcatatcccaaacacgaaaacaatcgaataagagaacaggctgaatagtgatttttttctttcaattattactactgaaacaaatcaaaacaactctgagaggttgccagcaccgcagaaggcatttccacataaaaagagttaatgagcagaccacgcagttcaacagccagtgaccatttgcaagcctcctaggtatattcccagcagacacattatcagattaaaggaagtgcaaacaaactgggctgaaagtttctttgtccaaacccagcctcttcttcctgtgatgtcatattacaaatctaggaagcctttctttttcacttcagagaaagcgacctcaagatacaactggcaactgaggaaaaggcctcaattcaacaagagctaacaagcttgggagtttatttcggaatctttaaaagactcttctgcttacccacaatctgggatccactgcaggaaaacaaaaaaggaaaacttcatttaaaagaagcaagaagtaaaatgggacaaattgggaatgtttaagtctctgaaactctgcactgaaaagaaaataagattgataacttaagcttaacattctgaggcataaagaaacattaactttggagtattcatcttgactactgaaatacaagtttagaagacaagtggtttcattctggtcacagatcacagcttttctttaaatttataatcctatgggttggactcgttgactgtattttttaaaggttgctcgtcagttaactgagccttggaattcatggattttctaaagactaacaaatgaaaatattttcctgttgaagaacccagcggaaattttacagcaacaaatttcatgtttcttttgggtatttctgagaaaaaggaaatatttataaaaccatccaaagatccagataatttgcaaataaattggaggttatagaggttataatctgaatcccaaaggagactgcagctgatgaaagtgcttccaaactgaaaattggacgtgcctttacgatggattttttacttcacaacacggaattggccatttggagatttactttgtaagatttctgtgatgctgttttataccaacatgtacggaagcattctgttcttaacctgtattagtgtagatcgatttctggcaattgtctacccatttaagtcaaagactctaagaaccaaaagaaatgcaaagattgtttgcactggcgtgtggttaactgtgatcggaggaagtgcacccgccgtttttgttcagtctacccactctcagggtaacaatgcctcagaagcctgctttgaaaattttccagaagccacatggaaaacatatctctcaaggattgtaattttcatcgaaatagtgggattttttattcctctaattttaaatgtaacttgttctagtatggtgctaaaaactttaaccaaacctgttacattaagtagaagcaaaataaacaaaactaaggttttaaaaatgatttttgtacatttgatcatattctgtttctgttttgttccttacaatatcaatcttattttatattctcttgtgagaacacaaacatttgttaattgctcagtagtggcagcagtaaggacaatgtacccaatcactctctgtattgctgtttccaactgttgttttgaccctatagtttactactttacatcggacacaattcagaattcaataaaaatgaaaaactggtctgtcaggagaagtgacttcagattctctgaagttcatggtgcagagaattttattcagcataacctacagaccttaaaaagtaagatatttgacaatgaatctgctgcctgaaataaaaccattaggactcactgggacagaactttcaagttccttcaactgtgaaaagtgtctttttggacaaactatttttccacctccaaaagaaattaacacatggacattttaaagtctttagtataaagaaaatttgtattcaatgtgttaagcattaacatgtattttatttgtgtatccactccatctgatttttctgagccattttgatttgttccttcattaaaaaaaatctcttaaagtta

SEQ ID NO: 408065 - DNA, 2507 bp, Homo sapiens
aacagttctttgaaatgctatgttaagatatcactaacaatttcaatttataaatacacacccatacacattttcttttctaaattgtcatatcccaaacacgaaaacaatcgaataagagaacaggctgaatagtgatttttttctttcaattattactactgaaacaaatcaaaacaactctgagaggttgccagcaccgcagaaggcatttccacataaaaagagttaatgagcagaccacgcagttcaacagccagtgaccatttgcaagcctcctaggtatattcccagcagacacattatcagattaaaggaagtgcaaacaaactgggctgaaagtttctttgtccaaacccagcctcttcttcctgtgatgtcatattacaaatctaggaagcctttctttttcacttcagagaaagcgacctcaagatacaactggcaactgaggaaaaggcctcaattcaacaagagctaacaagcttgggagtttatttcggaatctttaaaagactcttctgcttacccacaatctgggatccactgcaggaaaacaaaaaaggaaaacttcatttaaaagaagcaagaagtaaaatgggacaaattgggaatgtttaagtctctgaaactctgcactgaaaagaaaataagattgataacttaagcttaacattctgaggcataaagaaacattaactttggagtattcatcttgactactgaaatacaagtttagaagacaagtggtttcattctggtcacagatcacagcttttctttaaatttataatcctatgggttggactcgttgactgtattttttaaaggttgctcgtcagttaactgagccttggaattcatggattttctaaagactaacaaatgaaaatattttcctgttgaagaacccagcggaaattttacagcaacaaatttcatgtttcttttgggtatttctgagaaaaaggaaatatttataaaaccatccaaagatccagataatttgcaaataaattggaggttatagaggttataatctgaatcccaaaggagactgcagctgatgaaagtgcttccaaactgaaaattggacgtgcctttacgatggtaagcgttaacagctcccactgcttctataatgactcctttaagtacactttgtatgggtgcatgttcagcatggtgtttgtgcttgggttaatatccaattgtgttgccatatacattttcatctgcgtcctcaaagtccgaaatgaaactacaacttacatgattaacttggcaatgtcagacttgctttttgtttttactttacccttcaggattttttacttcacaacacggaattggccatttggagatttactttgtaagatttctgtgatgctgttttataccaacatgtacggaagcattctgttcttaacctgtattagtgtagatcgatttctggcaattgtctacccatttaagtcaaagactctaagaaccaaaagaaatgcaaagattgtttgcactggcgtgtggttaactgtgatcggaggaagtgcacccgccgtttttgttcagtctacccactctcagggtaacaatgcctcagaagcctgctttgaaaattttccagaagccacatggaaaacatatctctcaaggattgtaattttcatcgaaatagtgggattttttattcctctaattttaaatgtaacttgttctagtatggtgctaaaaactttaaccaaacctgttacattaagtagaagcaaaataaacaaaactaaggttttaaaaatgatttttgtacatttgatcatattctgtttctgttttgttccttacaatatcaatcttattttatattctcttgtgagaacacaaacatttgttaattgctcagtagtggcagcagtaaggacaatgtacccaatcactctctgtattgctgtttccaactgttgttttgaccctatagtttactactttacatcggacacaattcagaattcaataaaaatgaaaaactggtctgtcaggagaagtgacttcagattctctgaagttcatggtgcagagaattttattcagcataacctacagaccttaaaaagtaagatatttgacaatgaatctgctgcctgaaataaaaccattaggactcactgggacagaactttcaagttccttcaactgtgaaaagtgtctttttggacaaactatttttccacctccaaaagaaattaacacatggacattttaaagtctttagtataaagaaaatttgtattcaatgtgttaagcattaacatgtattttatttgtgtatccactccatctgatttttctgagccattttgatttgttccttcattaaaaaaaatctcttaaagttatttagtgtctaaaagtgactgacttaaattatgtggtgccaatctgtaatgtctttgaattcctttttatattaaatgatttaatttactaaattattttatactaatttatgt

SEQ ID NO: 408066 - DNA, 2339 bp, Homo sapiens
aacagttctttgaaatgctatgttaagatatcactaacaatttcaatttataaatacacacccatacacattttcttttctaaattgtcatatcccaaacacgaaaacaatcgaataagagaacaggctgaatagtgatttttttctttcaattattactactgaaacaaatcaaaacaactctgagaggttgccagcaccgcagaaggcatttccacataaaaagagttaatgagcagaccacgcagttcaacagccagtgaccatttgcaagcctcctaggtatattcccagcagacacattatcagattaaaggaagtgcaaacaaactgggctgaaagtttctttgtccaaacccagcctcttcttcctgtgatgtcatattacaaatctaggaagcctttctttttcacttcagagaaagcgacctcaagatacaactggcaactgaggaaaaggcctcaattcaacaagagctaacaagcttgggagtttatttcggaatctttaaaagactcttctgcttacccacaatctgggatccactgcaggaaaacaaaaaaggaaaacttcatttaaaagaagcaagaagtaaaatgggacaaattgggaatgtttaagtctctgaaactctgcactgaaaagaaaataagattgataacttaagcttaacattctgaggcataaagaaacattaactttggagtattcatcttgactactgaaatacaagtttagaagacaagtggtttcattctggtcacagatcacagcttttctttaaatttataatcctatgggttggactcgttgactgtattttttaaaggttgctcgtcagttaactgagccttggaattcatggattttctaaagactaacaaatgaaaatattttcctgttgaagaacccagcggaaattttacagcaacaaatttcatgtttcttttgggtatttctgagaaaaaggaaatatttatataatctgaatcccaaaggagactgcagctgatgaaagtgcttccaaactgaaaattggacgtgcctttacgatggtaagcgttaacagctcccactgcttctataatgactcctttaagtacactttgtatgggtgcatgttcagcatggtgtttgtgcttgggttaatatccaattgtgttgccatatacattttcatctgcgtcctcaaagtccgaaatgaaactacaacttacatgattaacttggcaatgtcagacttgctttttgtttttactttacccttcaggattttttacttcacaacacggaattggccatttggagatttactttgtaagatttctgtgatgctgttttataccaacatgtacggaagcattctgttcttaacctgtattagtgtagatcgatttctggcaattgtctacccatttaagtcaaagactctaagaaccaaaagaaatgcaaagattgtttgcactggcgtgtggttaactgtgatcggaggaagtgcacccgccgtttttgttcagtctacccactctcagggtaacaatgcctcagaagcctgctttgaaaattttccagaagccacatggaaaacatatctctcaaggattgtaattttcatcgaaatagtgggattttttattcctctaattttaaatgtaacttgttctagtatggtgctaaaaactttaaccaaacctgttacattaagtagaagcaaaataaacaaaactaaggttttaaaaatgatttttgtacatttgatcatattctgtttctgttttgttccttacaatatcaatcttattttatattctcttgtgagaacacaaacatttgttaattgctcagtagtggcagcagtaaggacaatgtacccaatcactctctgtattgctgtttccaactgttgttttgaccctatagtttactactttacatcggacacaattcagaattcaataaaaatgaaaaactggtctgtcaggagaagtgacttcagattctctgaagttcatggtgcagagaattttattcagcataacctacagaccttaaaaagtaagatatttgacaatgaatctgctgcctgaaataaaaccattaggactcactgggacagaactttcaagttccttcaactgtgaaaagtgtctttttggacaaactatttttccacctccaaaagaaattaacacatggacattttaaagtctttagtataaagaaaatttgtattcaatgtgttaagcattaacatgtattttatttgtgtatccactccatctgatttttctgagccattttgatttgttccttcattaaaaaaaatctcttaaagtta

SEQ ID NO: 408067 - DNA, 493 bp, Homo sapiens
taaaataaatttctcaagattgttctaagtaggttaaaagaaataaactttcttcttttacagaacattttttgaggggacatttacttcattccccatttgtttctttttgaataatttgctgaatttaagataagagcatttctgcatataaaaagttctcttgtgtggggagtatacatggaagtaacagtatgggatacaatgagggtgggagagaagtctggttttcttctcagcttccctttattgcactccaaatatgggttggatattttgtcagggagatggctgggaagaaatggagattacaagacataagtttcttaaatactgaggactcctctttattattgaatgatctttggtgattttgtatctttgggtgattttgtatccagtgtttcgaccaacaactctggtttgaaatgatgttcaccacgatgttaacaactctatttgctagtaacccctctatcttctagtaacgccg

SEQ ID NO: 408068 - DNA, 226 bp, Homo sapiens
cactgaacccacccctcgctgtcaaatgcttcaaaattcagtaggactgggatgtcgaaactcttatctctagaatgttaaagcagaaagtttaaaagctaaagaatgaaaggagttagagaataaactaaatcaagggcaatcaaaattcaatcccaggaatgaagtctaggcttaattaagactgtgatgaatattagatggttaagatttaacaaaacaaagg

SEQ ID NO: 408069 - DNA, 300 bp, Homo sapiens
gaaagtagtgggggttggatcctttgatggataaggtccttgattgcattaacatcctgtgataaaggtgtttcacatgtaacatctatgataaaggtatttcaactgcacatatctcagcaagggtgaactaaaacagcttttcactcttcaggtgcagaacagagggggcgaacctgtttggttgactgagtagtgattaggaagccagctgcaaacttgtatttcccccgaggatcaccgatgagcaccaccagccctgccaagagagcttctctttaaaacaaagctgttactttc

SEQ ID NO: 408070 - DNA, 616 bp, Homo sapiens
aaaaatacaaaaattagccaggcgtggtggcgggcgcctgtagtctcagctactcgggaggctgaggcaggagaatcgcttgaacccgggaggtggaggttgcagtgagccgaaattgtgccactgcactccagcctggtgacagagccagcctccgtctccaacaaaaacaaacaaaaaaagaattacttcttccagagattctctgccagaactcctaggtggtgttggacccatatcttttacttccatagcatcccaggctcagctcacttgtcctacttgttctgtgtcttcatcactagaatgtaagttctaagagggcagatgccaagctgttcagccattcacagaacctggcacagtgcaggcatatgacagatgttcctttattattatacttgggtgagtggatgggacctgcagcaagtgcagatcttctcagtgggctctggaacagaaaagtattgtttgtttgctcagcatatttttatttgtcccatgttgctgtggccaggatttgagctctgagacaatgcagcaaggtgagacccagatttcttttgttttgttttgttttttgagacagagtcttgctctgtcgcccaggctggag

SEQ ID NO: 408071 - DNA, 848 bp, Homo sapiens
aaaaatacaaaaattagccaggcgtggtggcgggcgcctgtagtctcagctactcgggaggctgaggcaggagaatcgcttgaacccgggaggtggaggttgcagtgagccgaaattgtgccactgcactccagcctggtgacagagccagcctccgtctccaacaaaaacaaacaaaaaaagaattacttcttccagagattctctgccagaactcctaggtggtgttggacccatatcttttacttccatagcatcccaggctcagctcacttgtcctacttgttctgtgtcttcatcactagaatgtaagttctaagagggcagatgccaagctgttcagccattcacagaacctggcacagtgcaggcatatgacagatgttcctttattattatacttgggtgagtggatgggacctgcagcaagtgcagatcttctcagtgggctctggaacagaaaagtattgtttgtttgctcagcatatttttatttgtcccatgttgctgtggccaggatttgagctctgagacaatgcagcaaggtgagacccagatttcttttgttttgttttgttttttgagactgtctcaaaaacaaacaaaaaaaagatgttaacatttgggaaatctgagggaatgatgtacatgaattctttgtattgtttttgcaacttttaagtataaagttatttcaggccaggcatggtagtgcatgcctgtatacccagctactcgaggctgaggtggaagattccttgagtctaggagtatgaggttacagtgagctatgatcatgccactgcactccaggctgggtggcagagtgacaccctatctcttaaaaa

SEQ ID NO: 408072 - DNA, 498 bp, Homo sapiens
acactttgggaggcccaggcaggtggatcacctaggtctggagttcgagaccagcctggacaacatggtgaaacccctctttattaaagtacaaaaattagccggacatagtggcacatgccggtaattccagctatttgggaggctgaggcacaggaatcccttgaacctggaggcagaggttgtagtgagcctacatcacaccactgcactccagcctggatgacagagtgagactgtctcaaaaacaaacaaaaaaaagatgttaacatttgggaaatctgagggaatgatgtacatgaattctttgtattgtttttgcaacttttaagtataaagttatttcaggccaggcatggtagtgcatgcctgtatacccagctactcgaggctgaggtggaagattccttgagtctaggagtatgaggttacagtgagctatgatcatgccactgcactccaggctgggtggcagagtgacaccctatctcttaaaaa

SEQ ID NO: 408073 - DNA, 406 bp, Homo sapiens
taacttacagaaggaaggttgggtggatcacagcaaaatgataaatgtgtgtgttacccaaacatgtcattgagaagaagcaatgcttttctttttcagctttataaggaagtggaatgaacattttggttagacagaaacatgttgtttaattttgtatttggcaggatagactgaatctcagtctgattatgtgatataagctattataatatccattaaaaagtcattctgctaatggcaacaaatgtgcgaatgccgcttcttttacaaatgatgaaatactactataatagttcttattatctcattaggtaggataccaagaagtttttgttttatgtattttaagaaatgtgttgctaatttaagatcactctcccctggatgtgagtaaaaattccga

SEQ ID NO: 408074 - DNA, 349 bp, Homo sapiens
ggcctttacagtacttgtcagaactcctatgcctcctgtactttctaacttcttataaattacccagtctcagatatttctttagagcagtgcaagaatagcctaacagaaaattgatactgaggagtgcggcattgctataaagatacctgaaaatgtagaagtgatttttgaaccgggcaacaggcagaggctggaagagtttggagggctcagaagaagatgggaagataagagaaagtttggaacttcttagagactggttaaatggttgtgaccaaaatgctgatggttacatggacagtaaagtccaggctgccaaagtctcaggtggaaatgagaaacttat

SEQ ID NO: 408075 - DNA, 421 bp, Homo sapiens
cagcaatttgggaggccaaaacaaaaggatcacttgagcccagggattccagaccagcctgggcaacataacaacaccctgtctctacaaaaagtaaaataataataataaacaattgctaggtgtagcggcacctgcctgtagtcctagctactcaagaggctgaggtgggaggattgctttgagcccaggtggttgaggctgcagtgagtggtgattgtgccactgcactccagcctgggtgacaggtcaaggccctctctcaaaacaatagaaaaaaccttcaggtctaaatatgaattctattataacatttaaggaaaatgtattctcggttttatgtcaacactggcagaaagtacaaaaaagcatttagtatcttatgtcctgagatgaactttgacctcgtgccaaaaccaga

SEQ ID NO: 408076 - DNA, 317 bp, Homo sapiens
gtgtctcataacctctagtctctcaactcttcttctctcagtgacccattgcatttggactcactgccatcccaatacaaacccaacccagtgctagccatttcactctgccctaaccagcactcctcaccctccacccgccacacctttgctaggtctgcctgcctggccccaccttgattacacctttcattttttccctcaccaggtactgtgtactgctatagaaagccatagtacattgtgaaaccattatgcattccttttaacctcagccatggcttcactacgtatgtgtagatgtccccatcagcacc

SEQ ID NO: 408077 - DNA, 821 bp, Homo sapiens
aaatccaggttattttgttctgctcacgagttgagcctgtaagcctttctgtttgcctttctgcagaaagctgtttgtgagaaccctgtcttgagtacatgactggactgcacatgcagcaggcctgggccttcaactccaactacatctggaggaggggtcccagtgtgaaggggttggataatagtcatagtggttctgtacaatcagaataaatcctggctcctgaagagaagaggggcaggcagcagggctcacactgtgcgtgctgggtgttgtgattctgccatctgtcctcaacttcttggggaggggctgatggaacttgtagagaaggtggacctttagggggcttcatgggccttctcacagtgagaatccagccctgtccagaagcagcctcaagctccgcactttcagtccagtgctgtctcccaaagccccctccgccaaatgaatcccacagccagcttcagcctcagatgctgcccactgccccctccgtagaagtcctttcacctgtgtctctactaggtctgaccaatgtttcttggattttattggctaagctggataaagacaggccatttaaagtaggaaagtgggatcctgggtgatgtagcaagaccccatctctatgaaaaaaataagaaaattagccaggtatggtggtatatgcctgtagtcccacctacttgggagactgaggttgaaggatcccatgagcccaggagttggaggctgtagcgatggagtgagccattatcacaccactgcactacagcatgggtgcagagcgagaccccgtgtccaattgaaaa

SEQ ID NO: 408078 - DNA, 539 bp, Homo sapiens
tatcttctattacaatcaatttttaataaaataaagataggtttaacaccaaaaatgtagcaaagaaaagctctgaattgagcacattctgtatttcttctcatcttgccataaacaagtgaaaacctccccaggactggcccagttctgaggacccctatttaggaatcctactatgggcaactccaggcagggtgggatggaaggccatgtctctgtcctcaacaactgcctatgcccacccgcaccacgtaccagaacacagggctgctgcactctctgccagggttcctggggcaggatgcccccaagggcctccaaggcattttgagtgaactggtcaacggacatgtgtcacccaggaggttaacccatgctcctgcccaggacttaaggtcctactgctccctggtttaagctcttgttgccaaccttctggctcaaaacagaactcaggaagaaaaacattttgaaaaaaggtagatggggcagggtgcggtggctcacgcctgtaatcccagcactttgggaggccgaag

SEQ ID NO: 408079 - DNA, 1287 bp, Homo sapiens
ggagcctgggctcaggtgtgtcctgtgggaagtgattgctccctggctagcagagacagaggaaagcggattgttggccccaggacccagctctgagaggctgggcttgtttccctgactctgccttggaggaaagcaatggaaggggaaggggtaagaaacttcaaggaacttcgagccaaatttcaaaatcttgatgctccacctcttccaggacctattaaattcccagcaggtgtttctccaaagggtgacattggaggcacacagtcaactcaaattttggccaatgggaaacccctctcatccaaccacaagcagcgcacaccatactgttccagtagtgagtcccagcctcttcaacctcagaaaataaagttggctcagaagagtgaaattccaaaatgttctaactccccagggcctctgggaaagtctactgtatgttctgcaacaagttcacagaaggcttctctgctgttagaggtgactcaatcaaatgttgagataatcactaaggaaaaagtaatggtggccaatagcttcagaaacaaactctggaactgggagaaggtttcatctcagaaaagtgaaatgtcttcagcccttctccttgccaactatggaagtaaggccatccatctggaagggcaaaaaggcatggggcttactccagaggaacccaggaaaaagctggaaacaaaaggagcccagactcttccttcccagaagcacgtggtggcccccaaaatattacataacgtctctgaagatccctcttttgtaatttctcaacatatcagaaaaagctgggaaaacccacctcctgagaggagcccggcaagcagcccctgccagcccatctatgagtgtgagcttgccagtcaggccccagaaaaacagccagatgtcaggcatcaccaccttcccaaaacaaagccattgccctccatcgactccctgggtcctcctcccccaaagccttcaagacctcccatcgtgaacctccaggcctttcagaggcagccagctgctgttcccaagactcagggggaagtgactgtggaagagggctccctgtctccagagaggcttttcaatgcagaatttgaagaaccacataattacgaggcaacaatttcatatctgagacactctggcaactccattaacctgtgcactgcaaaagaaattgctgatccaacttatgaagttggaattgaagaactccaaaagcctgggaagaattttccctatccagaacctagtgctaaacatgaagataaa

SEQ ID NO: 408080 - DNA, 1233 bp, Homo sapiens
ggagcctgggctcaggtgtgtcctgtgggaagtgattgctccctggctagcagagacagaggaaagcggattgttggccccaggacccagctctgagaggctgggcttgtttccctgactctgccttggaggaaagcaatggaaggggaaggggtaagaaacttcaaggaacttcgagccaaatttcaaaatcttgatgctccacctcttccaggacctattaaattcccagcaggtgtttctccaaagggtgacattggaggcacacagtcaactcaaattttggccaatgggaaacccctctcatccaaccacaagcagcgcacaccatactgttccagtagtgagtcccagcctcttcaacctcagaaaataaagttggctcagaagagtgaaattccaagttcacagaaggcttctctgctgttagaggtgactcaatcaaatgttgagataatcactaaggaaaaagtaatggtggccaatagcttcagaaacaaactctggaactgggagaaggtttcatctcagaaaagtgaaatgtcttcagcccttctccttgccaactatggaagtaaggccatccatctggaagggcaaaaaggcatggggcttactccagaggaacccaggaaaaagctggaaacaaaaggagcccagactcttccttcccagaagcacgtggtggcccccaaaatattacataacgtctctgaagatccctcttttgtaatttctcaacatatcagaaaaagctgggaaaacccacctcctgagaggagcccggcaagcagcccctgccagcccatctatgagtgtgagcttgccagtcaggccccagaaaaacagccagatgtcaggcatcaccaccttcccaaaacaaagccattgccctccatcgactccctgggtcctcctcccccaaagccttcaagacctcccatcgtgaacctccaggcctttcagaggcagccagctgctgttcccaagactcagggggaagtgactgtggaagagggctccctgtctccagagaggcttttcaatgcagaatttgaagaaccacataattacgaggcaacaatttcatatctgagacactctggcaactccattaacctgtgcactgcaaaagaaattgctgatccaacttatgaagttggaattgaagaactccaaaagcctgggaagaattttccctatccagaacctagtgctaaacatgaagataaa

SEQ ID NO: 408081 - DNA, 887 bp, Homo sapiens
cccagtgaccctaacatgtgcagtctggggacatgggaggacatgagcgcagccagagaaaacccatgcagacctgccgagaaggtgtaatctgcacagacagtagccccggcctgggataataagatgacgctgaacgaaagtcgttggaggacctgccattatcagcctgtaggctgaaaacagatgggaatctcagcaatcagactcgctctaacagcccacgctcagaggctccggctgtccatgctctgtcaggctttccctgcctcatcacgcctctccatgaagctcctgagtgaatgaatactgttattcttatccccgttttacagatgagaagccatagcctgtaagcactgatttgctggaggccacagttgaatccgcacagtgtcatgtaattgttttggggggttgtgttgttgttgttgttgttgttgttgttgttgttgttgttttgagacatggtcttgctctgtcacccaggttggagtgcattagtgcaatcatagttcactgcagcctcgatttcccaggctcaagcagtcctcctgcctcagcctcccaagtagctaggactacaagaacgctctaccatgcctggataatttttaaaactttttgtagagacagacagggtctcgctttgttgctgaggctggtctcacattcctgggctcaagtgatcctcccacctcggcctcccaaagtgctgggattacagatgcgagtcacggtacccataattgtttaaattgacacaaaagatggagaaaaatgtgtctttaatctgttgagtacaaagtgcatacataaacatagaagggcaatgtatctgattttcttcaaacatttaagaaattttgttacgtttatccaaaaag

SEQ ID NO: 408082 - DNA, 919 bp, Homo sapiens
tattgcttttggtttttttggcgaacaccgtctctggaagacacaaggaggaaagtaatcgcacctccaagacaggaggtgggattactttcctccttgtgtcattcaggacgactgctccgctctttcttgtaagccctttcttttttgaaatcacatcatcagtcttcactacctcatcttcctcttggcaaccttcagctccccttccctgtatccctctccctgcacgtgaagaccagcagccagttcctggtctgtctgtctgtctccatacaatcattattccctgtattttctctccatccacagacaccactcctgtttttacatcctttatccaatccctggcctggcattatagtcactcactcatgaatacccttaactgctcactccttcattcttccatcagtctcaaacttagaggaactctgcctccaccttccctatgcctgcgcatgagcaccttaccatggctggtgaacgtcccataccaagggcacagttaacatgcgtctgctggtcagggccagctgagcatcctacactgggcagaagggttgctgtttctctgataacttctcctcccttatcctcagtgattccttcctgtcttcaccactgtattcacatgtcccacgctcctgctgcagctgacactacttctgaatgtccctcttctctataccaccagggctctagatctgatcaccatgacttttagttttatttcctctaattcattgtccaagctatagcctgcatgatctttcaaaaatggacagtgtggctcacacctgtaatcgcagcactttgggaggccgaggtgggcagagatcaggagttcgagaccagcctggccaacatggtgaaaccccgtctctactaaaaatacaaaatattagccgggcatggt

SEQ ID NO: 408083 - DNA, 471 bp, Homo sapiens
ccttttataatatttcccaacttagtctctatcttttcttcaattttaatttggagatttcttaaagtattcttgtgagcactgaggattttatggcaattaccatgtactatgaacactgaacacttctagattgacctcagttttattgacatcaattcctttggctctttctttacatccaggatcagtagatcagaaatgattgaaaataacagaatccttcatattcacaaaatactgtaaaagcaaaacctgcaggaagagatgtccctatttaataagaatggaattggagataatagaagatggcaaaaaggccttctgtggagggcaacggacacaaacttatcaccaaagtcagtatgaatcggtagcccctaaacaggcagctcaggacattggttagacacctctgcatgaaagtatttttaggacaattaaatctgtcaatgattgaatttataaaaa

SEQ ID NO: 408084 - DNA, 427 bp, Homo sapiens
tcaggaggaaggtaatgagttttaagtaacaaaacaggaaattagctcctctgtgacctttgatgagtttgtgaagctggcgttgtgagtgcaggattgaaattgtgaagagcattatatttagtttgctttgttgcttttgcagagtatctatttgccaggaaaacctaggaattgaagttaaagactctgctacctttgtgggaaatgaacaatactcttccttctgctggcaaaatctgggtgtctacttttcagtggctggtttttgctttcacgtagggtcagagtatccttttcctggaaccaagcttgactcaaagccattgtaagttctcttgttctttatccttctaatcaactattttaggagcaattttaaagttgacaccctttcccttctaacctttctgctcaatacaaagca

SEQ ID NO: 408085 - DNA, 526 bp, Homo sapiens
tcatttctgaatctgaggatttttagctgttacttcctccagcaacccccagtttctagagtctgtagctaggcagagacattttcttgttattcctttgctgttggttgatttttttttttaaccagcctcccctgtccattcttgcactgagaatgtgtaaaaaatggtgaaaccctcaataccagctctgcgcttcatgcagacaaggtttctgaggccttgtctactttaagggcattaaaagccaaaaatcttagttactcatattgacaggttcctccagggttgctgaaagctttactcttttgtgagctcagcatttgacagactaatttatccagcatttctagatgttttattaagatgacattttcatattagttactgtgttgccaaaaaaaaagaaagttgcatttcttttttataattaatttatttcccttttctcctctttttcctttggaattccatgtagttggacctcctggatggaagaactcttctcaagcttttctactttaaa

SEQ ID NO: 408086 - DNA, 644 bp, Homo sapiens
atacactttcctaaaagaggatctagaagtgtttttaatacctgacaagctattctctctccacagctttttattccagggttcttctagttgttcttatgtttaatttttttcatatggactttggtatcaacttttcaagctccatttaaaaaagaaagcttgtggaatttttataggattgcactaaattgatggtgttgctaagattcaaacataggcagtttgctccaacacctacatgaagtttggggcgaaaaagaaaaaagtaacatttttgtagtggtattcagtttttattaatagagttcggttttgttgttataactaggctactttgtattaacccctggaattgaaacttattatgaaaataatttgcatgtaggtttactaacaaagaatcaggctcaaatgcactaaaagacagacatgaaaattgtgtttagactactctgaaaattcttatccctataatagaaaataattcatctgtgaaatgaaataataatctagaaaccctctgatggcatgtagaacttgttctcagtggaaaactcagtcaactaattctcaaatgtttgcatacttaaattataccccaagtcataaataacaacctattaaataaatttgctttgtgt

SEQ ID NO: 408087 - DNA, 614 bp, Homo sapiens
agggtgcactcccagagactgtgtcaggctgagtcccctgcctcctgggaattctgtcccacctccccagtccctacccaggggctggtcagcagcattcatgcttgggagcagagccaggttctctgtgccttgctcccctggtaaccacagattccggacaccatgcactctctggataggagaaaaattaatgaccctgaattctgtggtgtgggctaccaggccccaaagggatgttttgtggtgataatccataatataaggtctgtccagaaaagctgtgtgcatgtgtgcatgcgtgttggcaacggggctgcttccaatagcaattcctggaaaaagttctgcttttcccccgctccctggccccgtgctgagggccatcaagttcagaagagcgcagagcgacagagattaagacccaggaacagctctctttgtgtcctagagagaggaaaggtatctactggcaccccgtcagtagctgaactgaagccagagcatgaacatcctgcctcccagttctggcttgagtgtgggacctcttttcccatcactgcctctctccgagggctgttactactaatttggggtcagcctgaaaaaaaaaa

SEQ ID NO: 408088 - DNA, 560 bp, Homo sapiens
tgatagaagactttacctatcaggccttgctgcgataaagcaaaccccaattacaaaccatccggaccaaacggggaggttgtgggaagcataaacaaactttacctacaccctccagtaccgtaaacatcacaaggtgatatgtggcagaattaaccagcagacaaccccgggatgcagccataccaaaggactccctcaaactccctgccccaatgtaaaccccctattctgtaagcttggggctgctttccttgactgttaagggggcagccgacaggttaataaaggcttgcctgaacttggggctctctctctctggtcctttctctcggctaaccttacattctcactctctaagttcacatgagatctggttgctttaaaaagcctggcagctctttgttctctctcgccatgtgatatgctgattacccttttgccttctgccatgactgcaagcttcctgagcccttaccagaagcagatgccagtgccatgcctcctgtacgccctgcagaagcatgagccaaaataaacatttttctttataaattacc

SEQ ID NO: 408089 - DNA, 370 bp, Homo sapiens
agtggctcagtgtggtggggtgtgagagggagaaatgaccctgctggggaggagggaggaacacaccacggccaccctccaggccatgcaacagcacttggactttatcctgaggcaatgggcggtctccaaaggccaatcacatggagaggccatccagtactccaagtgtttccagacacatcccttccttgcacaaaccgaaaattggcattcatgcaggacaaataaacataatccctacaacggctattccagagcaccatgtctggactctaaggcaaaaaaataaaagctatcagcccattacatatggtccacagtaacatccttctatgaacacacacacacacacacacacacacacacc

SEQ ID NO: 408090 - DNA, 390 bp, Homo sapiens
tcctggctattctttcttgtttatttctacagatgaacccaatattatcttgtaaaatgttgaaaagaaatttttaaatttagcaagaattaataccccttaatagagattttatattttctttatatggtcctgcctatttctagttaagtttattttcagataaattgatgatagtattgctatttaaatgggatcttttctttcactgtattttctaactagccattttgtacagtaattatacaaaaagtaactactaaaattgtcttataatttctgttagcttttctggcaaaacaaaccacccaatacttagtgtcttaaaataagaaacgttatttctcaactctgtgggccaactcggtttatttctgcagaaacctggca

SEQ ID NO: 408091 - DNA, 163 bp, Homo sapiens
tttacctccatcttctaaaactattaattaatccagagaagtgtgttgctataaaatattctgtgaagcattttcacttatttttcttttctttcaaagaaaacaatatggcccagttcctggcttttgaagaactagagaaaatcatcatcattggtgcctc

SEQ ID NO: 408092 - DNA, 1135 bp, Homo sapiens
gagagcccttgattttcctgttagatttattgccagtacttctaactggtgggtcgggctttctgcctgagtttgtggtgaggtattgctgagaagaacacaggaatcattcattgctttcccttgcttggagatatggtacactagtggcaggccagtggcccagcctcacgtcatctcacatccactgtgcagtagacagaaaggcaacatttgaataggaagttctgttacattttctgccaggtgaatgaggctgagagcaacttgtagtcctgggttgaatcttcaaagctgtcccagctgccatgagaagacatttagttgagatctgtgcatattcacatatcccacccatatttagctataagtgatgttaattttttattgttaatattctttaaaactaagcaaataatacagcttaaagttctcatgaaaaattgttaataaaggtgatgaaaatgatgaaaaaagtaaccttacataaaagaaagggtataatacttcagatttttaatactcatttcttaaatactcttttagaagtgaagaaatactaaatttttgtttaccagtgatttgaggaagattattcagttggtgaaaagttttcagaaaaaagaaattcactctttttgagacttacggcttaaatcagttaaaattcatttgtacaggcacaatgtatcatctgcagtctgaagctttctctaccactagaaagtgggtataggtctacattgtattattctatggttgccttcttggaatatcttctattaattacattttcttttttaaagcactttaacttacaatagaatttcagaggtacatttccacagcaataatttactctaagacataatgatcatacttatgaatgcagaaaaaattaaatactgttgatagaaaaatcatgctttggggacaaataatagtaatttgtaaattatttctacattggcaagtgtcatattgtcggcttctagtataataaagtgatacattcaagcatgccaaagaagaaaagttgatttacaaagaaccacgtgggagaaatggttctttctgatagttcacatctcatgaaagtatgtaagattgaaacccgtttctgcgtgtcatttaa

SEQ ID NO: 408093 - DNA, 411 bp, Homo sapiens
tttaactttgaggaccctagggtccatttgctcatccagtttctgtgtagccaacattaaaacacagctttggaaataaatagattgccagtagcctcttagctgttatccatttaaaaatgggattccagtctttaaaagtcttattaggataaaagatttatttttctttgatcattggttgaaagtcattatttatttccaacactggattgtcacataaattcctaaggaagagttaccttgtgtgtactcagtgcagtcagagtagactttttaaaatgacaaattattaaagagatattcagtaataaaagaaagcctataagaatacctataagggtaggcacatcaccactgagagaaaaaaaaaaatcaagggagtttatgttaaagtgagccctatttaag

SEQ ID NO: 408094 - DNA, 400 bp, Homo sapiens
ggtgatatagacaggataattatagacaatgttcaaattcttggttaattgtaagcttgaaattgttcattttttaaagaggaaatgaaataagtttactccaaataatgatagcttagatgactaactaatgataggtgaaaagcaaggattgatagttaaaatgcctctcttttgttattatcttctttgctctgtacttagaatggacgtacttgttctgatttgaggacttcttcatggtcacatgttctgtttgcaccatgcttagggaaggagcatgtgtaccaatgtgagtgacagtcagatttcttggcatttctttggggtgggtttattttaaggagggactccaatgttactgtggaattaaacatgtaatataatcaaagatggtgaa

SEQ ID NO: 408095 - DNA, 400 bp, Homo sapiens
ctgttggggagagaatagggcccaaggagaagcctaaagaagagtacagctatgccttccagtgattcacttcactgttatttgattcattaaggttttactggggaaatgccttatcattgaggcttctgggaaaaaaaacattcaggtgattgatgaaatttcaaaaagtaaaagaagaataagatgaagacaatgacaccaggttttgcatccttgcttgcaggaggtctaaggtttcaactcacacactggatcttactgattgaaagcagcaaatatgccatgattgactaatgatgtctgccatgggtgtggaatagacaaatgaagacaaaaattcaaatacctcactgagcagcagagtcttaatccatcaggaaagcctatgaaaaaaaaa

SEQ ID NO: 408096 - DNA, 461 bp, Homo sapiens
aacacattcaaatggtcagtttctgctgttcggctgccagttgcgacttctgctttaatcaatctgaaggccaaactcatccagacccttaggcttcttcctttggaagtcctgtattttcttactttcttaaaatatactccatggagttgacatcagttatgttatggtgctagtatcctaagattgtcactactaataatttagtccagattttattctttctgtcaactaattttatcatgagtacctcatttcagtgtggttaactaaaatatccaaatttttttttggatatttgctatgcttaaaacatagcaaatttttttcctggtagtataaaatttacttgtttttgttatttttaaacttttgcatggcttttgcatatttttaagtaaatatatttacctttgaagaaataagagtttttaatgagtgaactctaaactatttaattt

SEQ ID NO: 408097 - DNA, 300 bp, Homo sapiens
atgaatttttgaaatcatgcaacaaaggtgcatcccattatatcagggtgtatgtgacatctagatgacattacagtgacattaacctttatcagtttggtaagggggctttcgccaggattcttcttagtaaacctatcacttttcctgcttttttctctattctttggaaataagctacaaagcctagaatgccctagcaggtagaaggaattaaacttcacttcttgtactggggagtatctacatatgttatttgaaattcttctgtaagaaacagttgtttcttttcctcattta

SEQ ID NO: 408098 - DNA, 538 bp, Homo sapiens
tctatccaatgagtgaaggctctggccagctcagtattactggagcatagaacactggtcctaaacctgaaattacacattgaaattatctgggagctttaaaaagtactgattcttgggccccagatgggtctccatcccagagtttctgacttaatcagattggggtgcaacctggctgggcattggggtttttagagctccccaatgacgatggtgggagctggggttgacgcccactggtgtagacagagcattgattgactttcctgattgccctgttttgcctgcagagttctttaacaatgccttttcctggccttcactctgaggttctaatatgattggtctggagtggaggccctggcattgtgggttttaaaactccctgaactattctgacgtgaggccagggatacaaacccctggtgcatgggtgtccaaccttttggcttccctgggccacattggaagaagaagaattgtcttaggccacacataaaatacattaacactaacgatagctgatgagcggaaa

SEQ ID NO: 408099 - DNA, 428 bp, Homo sapiens
ttgtagccctgggcacaaggcagctgaagaaatcagtgctggattggttccaagtaaaaggatggcgtatgtatctagctcactttctctgataaacagtaccttttactggatattctccaagtgtggcaaagttttaaaggttactgttatgaaagaaaaagaagaggccaggtgtggtggctcacacctgtaatcccaacactttgtggggctgaggcgggtggattacttgaggtcaggaattcaagatcagcctgaccaatatggtgaaaccctgtctctactaaaaaatacaaaaaattagctggacatggttgtgtgcacctgtagtcccagctactcaggaagctgaggcaagagaatagcttgaactcgagattatgccaccgtactccagcctaggtgacagagcaagactcaatctc

SEQ ID NO: 408100 - DNA, 355 bp, Homo sapiens
ccttatcagtatatttacaaatgttttctttcattctgtgggttgggttgtcttttcactttcttcgttctttcttttgtctttctttgtcatcatatttcatgatttcttgtgaacaaagtattgtctagaggacaagcattgtaagtattaacatcggaatcagtgaaaacaatcagtatagatcaagtttttaagtgatactttctcagaaatgtatgtgtacaggtcattgaagattatctataagcaattggtcttggaaaagcataatttttgaagaactctcttgccctgtgagagtgatctaatatgaatgaataaaatatatttctgtagttgaactgaaaatagg

SEQ ID NO: 408101 - DNA, 162 bp, Homo sapiens
gcttgagtaccaaaaggctatgaagcatgcttaataactatatgcttgaaacaacaacttgtacaaacaaatgtaaatgtgttaatttgtgtttgggatttcaataatcacctcatgtataatagctgtaggaaactacttggccctctatctggtttcttt

SEQ ID NO: 408102 - DNA, 414 bp, Homo sapiens
ctgatcgcaaactcctgggctcaagcaattctcccaccttggcttcccaaagtatcaggattataggtgtgagccaccacacccagctgacattgggcatttatggtacaaaacctccctcaggtacaacgctccaaaagagccagtttccagcattgaattcatcgtggacttacccatgtgtggttctggcaccctgcccggggctggaggctgttcttggccttggtcctttagaataggagtaaatttggcaacataggaggacacccaggatacattgttaagttaaaaaaaaagagattctaaaatagaatgtatgtatggttctatttttgttaaaagttatgttctctaagtctttttaaaaagtttgaactgtcacagccaagaagggtctaaagagacatgaca

SEQ ID NO: 408103 - DNA, 699 bp, Homo sapiens
tcccaggaccagtcttaatacttctctctgttctcacacttccctgctagttttctacccttataattttgcaaaaagtcaaaagaagaaaaagtactaaaacttacaccatttgatttttctctttgctactgctagtttgaaagggccctctgcatagcctgttttcacatttcctttgcattgctttattttctttcactgttggcgtgatgatctgatttgaggaggtgccgccgtgggctttcctgatagtagttcatcttttacagtttctgtctctcagggtgtgagtctctctttgacactgaacacagcagccattccactgaactgacttgcttccaagagaccatcctcacttcactaagacagtagctcattcctggagagatttcctgccttgatggtttttaggcaaatctttagtcctagggagttttattgagaccctgacagaagtattaagacacaaaaacacattcacttgagactagcctgggcagcatagggagactgtgtctctacaacaaatttaaaaataagctgggtgtggtggggcatacctgtagtcccagctacttgggaggctgaggtgggaggatctcttgatcctgagaggttgatgctgcggtaagccatgattgcaccactacactccagccctgggtgacagagcacgaccctgtcttaaaaaag

SEQ ID NO: 408104 - DNA, 778 bp, Homo sapiens
gggccgcctactactactactgctcgaattcaagcttctaacgatgtacggggacatgatatatatagtttaaatctgattgtatgaccccaaatcccccttctctctgttctcacacttccctgctagttttctacccttataattttgcaaaaagtcaaaagaagaaaaagtactaaaacttacaccatttgatttttctctttgctactgctagtttgaaagggccctctgcatagcctgttttcacatttcctttgcattgctttattttctttcactgttggcgtgatgatctgatttgaggaggtgccgccgtgggctttcctgatagtagttcatcttttacagtttctgtctctcagggtgtgagtctctctttgacactgaacacagcagccattccactgaactgacttgcttccaagagaccatcctcacttcactaagacagtagctcattcctggagagatttcctgccttgatggtttttaggcaaatctttagtcctagggagttttattgagaccctgacagaagtattaagacacaaaaacacattcacttgagactagcctgggcagcatagggagactgtgtctctacaacaaatttaaaaataagctgggtgtggtggggcatacctgtagtcccagctacttgggaggctgaggtgggaggatctcttgatcctgagaggttgatgctgcggtaagccatgattgcaccactacactccagccctgggtgacagagcacgaccctgtcttaaaaaag

SEQ ID NO: 408105 - DNA, 1780 bp, Homo sapiens
aagcattaactgtaaagttgtcatcagtactgtactttatagtacagtaaattgtcatcaatacagtgatatagaaacatgccacagggatgactggggtgagaggtgagaatcaggaaaaccttcccaaataagtgacagaaatagaatggggaacactatgactgtcaggcaataggccaggaattattcttacatgttattttatttgaaaagctcatagagccatttctcactccattttctactgcttataacagaatacctgaaactgggtaatttatagacaaacaaacttttttttttttttactgttctggaggctgtagagttcaatgtcagggggacatctgacgagtgccttcttactggtggggcctcttgccgtcctgaggcggcaaagggaatcacatggtgaggcggctaagtgtgttcactggggtctctcttctctttataaaaccaccagtcccactcccatgatgacccattcattcattcactcattaatccattaattcatgagggctctcatgacccaactaccttttaaagactctgcctctcaatactgccgcattggggattaaatttcaacatgacttttagaggggacattcaaaccacagcagccacattaaggaaatttttgaaaaatttaatttttagacagctctgtacatttcttgcttattattcatccagttggaatcacagaatacatgaaacacaattacaatcttcttgtctcttatcttctattttttccactttgtattaaatcaaatgcatcatctcaattccaaacccttttgtttatactctgatatttactccagtgaattcttcatgtataaagttgtttttcacagccacacacttgtaccacaaatctagggggtattctttcttttagtgtccttaatattgtattactttctaatattcacactttaactttacaaatgagtagaatggaatagctgtgtttcagtacagaacttttttcttatgtttgcttgggccttcctcctctctgttacctatgttgataatctaggatttgttgtctcacatttttcccgatgttcatatgatattcaatgaaataaaatacatgtgacacaaaaaaaagttgttttccagatacccaaatataatggggagtggcgagttagagagacagacattttcatgagctttgcttcacaggctctggttcttggctgaaaggtaccagccgcctacagcaccctgtatcccattcaacagaccctaaaagaatctctagtcaaattaacaggtctcctttcctaattcctgaccaggagttggggattaggcccttgtcttactattttacatattctctcacctccaagccatggaggtttatatttcttcttttcaggttcgctaaaagtaactcttccagctgctagttctggctaagtaagcacactccaccctatttctcccactgatcataactagcaaccctgggcagaatcgtaatgaaaacatgtaaggactctgaaaaataaattatatcaggcaaattgaagagagaaaccaaaacccaaagtatagttaatatggcagtgagtatctcctggcttatactccaggacagggcagttttagaaactgtgcaatggacatggactgaaaaagctgcaggagacatctcctgcctcgatcccttcccagagtgacaggaaaggggtggcccttgggggaaaaaaatgtgatcaaactgatgaaaatcaaatataaagga

SEQ ID NO: 408106 - DNA, 1153 bp, Homo sapiens
tcatatccttcactcccccaacataagcaatttaatttttagacagctctgtacatttcttgcttattattcatccagttggaatcacagaatacatgaaacacaattacaatcttcttgtctcttatcttctattttttccactttgtattaaatcaaatgcatcatctcaattccaaacccttttgtttatactctgatatttactccagtgaattcttcatgtataaagttgtttttcacagccacacacttgtaccacaaatctagggggtattctttcttttagtgtccttaatattgtattactttctaatattcacactttaactttacaaatgagtagaatggaatagctgtgtttcagtacagaacttttttcttatgtttgcttgggccttcctcctctctgttacctatgttgataatctaggatttgttgtctcacatttttcccgatgttcatatgatattcaatgaaataaaatacatgtgacacaaaaaaaagttgttttccagatacccaaatataatggggagtggcgagttagagagacagacattttcatgagctttgcttcacaggctctggttcttggctgaaaggtaccagccgcctacagcaccctgtatcccattcaacagaccctaaaagaatctctagtcaaattaacaggtctcctttcctaattcctgaccaggagttggggattaggcccttgtcttactattttacatattctctcacctccaagccatggaggtttatatttcttcttttcaggttcgctaaaagtaactcttccagctgctagttctggctaagtaagcacactccaccctatttctcccactgatcataactagcaaccctgggcagaatcgtaatgaaaacatgtaaggactctgaaaaataaattatatcaggcaaattgaagagagaaaccaaaacccaaagtatagttaatatggcagtgagtatctcctggcttatactccaggacagggcagttttagaaactgtgcaatggacatggactgaaaaagctgcaggagacatctcctgcctcgatcccttcccagagtgacaggaaaggggtggcccttgggggaaaaaaatgtgatcaaactgatgaaaatcaaatataaagga

SEQ ID NO: 408107 - DNA, 778 bp, Homo sapiens
ggagtgagactctgcctcaaaaaaaaaaaaaaaaaattcttagagcacagtataatggtcttagatagtgatcgaatttacactgttatcaattgatcatttacttgttctggactattttacttcttagcttatggccgagctttttagtatttttagtttccttcatgttactttagttgtaaaatagttagtcattccctaattggcacactttaacttagtccaaatatcatttattaataaaatgacttcatagaaattattgttggccgggcgtggcagctcatgcctgtaatcccagcactttgggaggccgaggcaggtagagcacctgggctcaggagttcgagaccagcctgggcaacatggtgaaaccctgtctttgccaaaaaaaaatatcaaaaaaattagccaggtgtggtggcatacacctgtggttccagctactcgggaggccgaggccggaggatcaacttgagcctgggaggcagaggttgcagtgagctgagatcacaccactgcacttcagcctgggtaacagagtgagaccctgtctctcacacagacacaagtttgaaaaagaaagagagagagaaaatacttaaaaaaagaaattattatccaaatgtacttttgagcacattgtaaaatatttgacattttaagaagtgcatgcttttatatgaatctaaaattgtattataaataagctgtttacagttctacgtacatttccatttttttcgtcttttttcactaaggttgtcactctgta

SEQ ID NO: 408108 - DNA, 295 bp, Homo sapiens
aataatcagctgaaggaaatggcatttaagagcatcgaacaataataaatgtttgattaaataaaaaccgtgacaagagagtagggaggagaaggtcctatgtcgctcactgatgcacttaacaaacatttgtcaactcctaggagttgcattctgtacaaaatgcacaacaattcttacttaagttcataatatagtaattcatttgagctgaatttccttccagtcctaaagacacagccaaaactattcgaaaagtgggggaaggtgttttgttttgtactttaacaaaaag

SEQ ID NO: 408109 - DNA, 587 bp, Homo sapiens
tctttgtactgtgtcacactgataagtgaattttttataagcgtaattgattttattaagtacacagtattactcaagactttcgcttctgtgtcaagtgagtgaaactgaacccacagtggcttaaacatacaagcaaatgaaatggcatctgttggctcatgaaactgaaatccaggcacagctggatctgtggcctgaagttaccatcattctcataccccaccccacccccagcctccactttttcagtcaggccatccttcccgcatggaagcaaggtgcccccgcagctctgggctgccaccctgacctctcagctgaccagacagaaaaggggcttctcttcctcctacgtttcaaggggtgaggtcaacttcatctaaactctgtaacctagaaggaaggggatgagaggataccccaggggaaagccagggctagtaacaatagaaatggcaatagaggccgggtgcagtggctcacacctgtaatcccaacactttgggaggccaaggtgagtggatcaactgaagtctggagttcgagaccggcctaaccaacatggaaaaaccctgtctctacta

SEQ ID NO: 408110 - DNA, 212 bp, Homo sapiens
caaaagcaatttctactaatactttgggagtattaatctccagggtatatgtctttgtttttgtttcagtttcaatgcatgctctttcagtatgcttcatgtatttacggtctatttatggtatatatccagatttgtataatactctttcttaatatgctatattgcaagtatatctccatgttataataaatactttgttaacattattt

SEQ ID NO: 408111 - DNA, 634 bp, Homo sapiens
agacggtgtgcacaaatgggaggggatgggctgaaaggaactggatcctgaaacacaggaatgagcaaaggcagccacagccctcatactgggagttcacagtggtggggagaagctatcaccccacagacacagctgcagggagcccaggacagaaggcagtggggcaatgaggacttcgctctgggggccttctagtctgggagacatggaaaaaggcaggggccccaagacccaccaggggaagaggagtcatcaggctcagggcagagggcagagacagcaacacagcagaacaagccacggtacccacaggcctgggtgggggccgagaaaagccagtgggttgagggaggaaggagagggctgtcacacccgcaaagtgctttatgtaggaaaagagaatagggttgttctcggttacttcaaagggcaaaatcaagagctgtggcattgtgtggatggcagcttgtgaggggcagaacaccagggtggcagcattctcagccacctggcagtgaggccagggcactcagccacagctgatgtgcatatgatgcattagtagtgtgcatgtgtgtgtgtgtgcctgtgcacgctcttgtgtaaggagctgcatcactggtgtggccag

SEQ ID NO: 408112 - DNA, 634 bp, Homo sapiens
cttcccaggaactccgggccgcgttgttcgctggtacctccttctgacttccggtattgctgcggtctgtagggccaatcgggagcctggaattgctttcccggcgctctgattggtgcattcgactaggctgcctgggttcaaaatttcaacgatactgaatgagtcccgcggcgggttggctcgcgcttcgttgtcagatctgaggcgaggctaggtgagccgtgggaagaaaagagggagcagctagggcgcgggtctccctcctcccggagtttggaacggctgaagttcaccttccagcccctagcgccgttcgcgccgctaggcctggcttctgaggcggttgcggtgctcggtcgccgcctaggcggggcagggtgcgagcaggggcttcgggccacgcttctcttggcgacaggattttgctgtgaagtccgtccgggaaacggaggaaaaaaagagttgcgggaggctgtcggctaataacggttcttgatacatatttgccagacttcaagatttcagaaaaggggtgaaagagaagattgcaactttgagtcagacctgtaggcctgatagactgattaaaccacagggtcttgctctgtcacccaggctggagtgtgcactt

SEQ ID NO: 408113 - DNA, 233 bp, Homo sapiens
  misc_feature (1)..(1): n is a, c, g, or t
ngcacgaggtgaggttttctaccctcacagcaaagggatccttaactataaattcacggtatgcagagaagaagactgcgtggattcatggggagcctcacagcagccacgcagcaggctctgggtggggctgccgttaaggcacgttctttccttactggtgctgataacaacagggaaccgtgcagtgtgcattttaagacctggcctggaataaatacgttttgtctttc

SEQ ID NO: 408114 - DNA, 3628 bp, Homo sapiens
cttcccaggaactccgggccgcgttgttcgctggtacctccttctgacttccggtattgctgcggtctgtagggccaatcgggagcctggaattgctttcccggcgctctgattggtgcattcgactaggctgcctgggttcaaaatttcaacgatactgaatgagtcccgcggcgggttggctcgcgcttcgttgtcagatctgaggcgaggctaggtgagccgtgggaagaaaagagggagcagctagggcgcgggtctccctcctcccggagtttggaacggctgaagttcaccttccagcccctagcgccgttcgcgccgctaggcctggcttctgaggcggttgcggtgctcggtcgccgcctaggcggggcagggtgcgagcaggggcttcgggccacgcttctcttggcgacaggattttgctgtgaagtccgtccgggaaacggaggaaaaaaagagttgcgggaggctgtcggctaataacggttcttgatacatatttgccagacttcaagatttcagaaaaggggtgaaagagaagattgcaactttgagtcagacctgtaggcctgatagactgattaaaccacagaaggtgacctgctgagaaaagtggtacaaatactgggaaaaacctgctcttctgcgttaagtgggagacaatgtcacaagttaaaagctcttattcctatgatgccccctcggatttcatcaatttttcatccttggatgatgaaggagatactcaaaacatagattcatggtttgaggagaaggccaatttggagaataagttactggggaagaatggaactggagggctttttcagggcaaaactcctttgagaaaggctaatcttcagcaagctattgtcacacctttgaaaccagttgacaacacttactacaaagaggcagaaaaagaaaatcttgtggaacaatccattccgtcaaatgcttgttcttccctggaagttgaggcagccatatcaagaaaaactccagcccagcctcagagaagatctcttaggctttctgctcagaaggatttggaacagaaagaaaagcatcatgtaaaaatgaaagccaagagatgtgccactcctgtaatcatcgatgaaattctaccctctaagaaaatgaaagtttctaacaacaaaaagaagccagaggaagaaggcagtgctcatcaagatactgctgaaaagaatgcatcttccccagagaaagccaagggtagacatactgtgccttgtatgccacctgcaaagcagaagtttctaaaaagtactgaggagcaagagctggagaagagtatgaaaatgcagcaagaggtggtggagatgcggaaaaagaatgaagaattcaagaaacttgctctggctggaatagggcaacctgtgaagaaatcagtgagccaggtcaccaaatcagttgacttccacttccgcacagatgagcgaatcaaacaacatcctaagaaccaggaggaatataaggaagtgaactttacatctgaactacgaaagcatccttcatctcctgcccgagtgactaagggatgtaccattgttaagcctttcaacctgtcccaaggaaagaaaagaacatttgatgaaacagtttctacatatgtgccccttgcacagcaagttgaagacttccataaacgaacccctaacagatatcatttgaggagcaagaaggatgatattaacctgttaccctccaaatcttctgtgaccaagatttgcagagacccacagactcctgtactgcaaaccaaacaccgtgcacgggctgtgacctgcaaaagtacagcagagctggaggctgaggagctcgagaaattgcaacaatacaaattcaaagcacgtgaacttgatcccagaatacttgaaggtgggcccatcttgcccaagaaaccacctgtgaaaccacccaccgagcctattggctttgatttggaaattgagaaaagaatccaggagcgagaatcaaagaagaaaacagaggatgaacactttgaatttcattccagaccttgccctactaagattttggaagatgttgtgggtgttcctgaaaagaaggtacttccaatcaccgtccccaagtcaccagcctttgcattgaagaacagaattcgaatgcccaccaaagaagatgaggaagaggacgaaccggtagtgataaaagctcaacctgtgccacattatggggtgccttttaagccccaaatcccagaggcaagaactgtggaaatatgccctttctcgtttgattctcgagacaaagaacgtcagttacagaaggagaagaaaataaaagaactgcagaaaggggaggtgcccaagttcaaggcacttcccttgcctcattttgacaccattaacctgccagagaagaaggtaaagaatgtgacccagattgaacctttctgcttggagactgacagaagaggtgctctgaaggcacagacttggaagcaccagctggaagaagaactgagacagcagaaagaagcagcttgtttcaaggctcgtccaaacaccgtcatctctcaggagccctttgttcccaagaaagagaagaaatcagttgctgagggcctttctggttctctagttcaggaaccttttcagctggctactgagaagagagccaaagagcggcaggagctggagaagagaatggctgaggtagaagcccagaaagcccagcagttggaggaggccagactacaggaggaagagcagaaaaaagaggagctggccaggctacggagagaactggtgcataaggcaaatccaatacgcaagtaccagggtctggagataaagtcaagtgaccagcctctgactgtgcctgtatctcccaaattctccactcgattccactgctaaactcagctgtgagctgcggataccgcccggcaatgggacctgctcttaacctcaaacctaggaccgtcttgctttgtcattgggcatggagagaacccatttctccagacttttacctacccgtgcctgagaaagcatacttgacaactgtggactccagttttgttgagaattgttttcttacattactaaggctaataatgagatgtaactcatgaatgtctcgattagactccatgtagttacttcctttaaaccatcagccggccttttatatgggtcttcactctgactagaatttagtctctgtgtcagcacagtgtaatctctattgctattgccccttacgactctcaccctctccccactttttttaaaaattttaaccagaaaataaagatagttaaatcctaagatagagattaagtcatggtttaaatgaggaacaatcagtaaatcagattctgtcctcttctctgcataccgtgaatttatagttaaggatccctttgctgtgagggtagaaaacctcaccaactgcaccagtgaggaagaagactgcgtggattcatggggagcctcacagcagccacgcagcaggctctgggtggggctgccgttaaggcacgttctttccttactggtgctgataacaacagggaaccgtgcagtgtgcattttaagacctggcctggaataaatacgttttgtctttc

SEQ ID NO: 408115 - DNA, 3521 bp, Homo sapiens
cttcccaggaactccgggccgcgttgttcgctggtacctccttctgacttccggtattgctgcggtctgtagggccaatcgggagcctggaattgctttcccggcgctctgattggtgcattcgactaggctgcctgggttcaaaatttcaacgatactgaatgagtcccgcggcgggttggctcgcgcttcgttgtcagatctgaggcgaggctaggtgagccgtgggaagaaaagagggagcagctagggcgcgggtctccctcctcccggagtttggaacggctgaagttcaccttccagcccctagcgccgttcgcgccgctaggcctggcttctgaggcggttgcggtgctcggtcgccgcctaggcggggcagggtgcgagcaggggcttcgggccacgcttctcttggcgacaggattttgctgtgaagtccgtccgggaaacggaggaaaaaaagagttgcgggaggctgtcggctaataacgaaggtgacctgctgagaaaagtggtacaaatactgggaaaaacctgctcttctgcgttaagtgggagacaatgtcacaagttaaaagctcttattcctatgatgccccctcggatttcatcaatttttcatccttggatgatgaaggagatactcaaaacatagattcatggtttgaggagaaggccaatttggagaataagttactggggaagaatggaactggagggctttttcagggcaaaactcctttgagaaaggctaatcttcagcaagctattgtcacacctttgaaaccagttgacaacacttactacaaagaggcagaaaaagaaaatcttgtggaacaatccattccgtcaaatgcttgttcttccctggaagttgaggcagccatatcaagaaaaactccagcccagcctcagagaagatctcttaggctttctgctcagaaggatttggaacagaaagaaaagcatcatgtaaaaatgaaagccaagagatgtgccactcctgtaatcatcgatgaaattctaccctctaagaaaatgaaagtttctaacaacaaaaagaagccagaggaagaaggcagtgctcatcaagatactgctgaaaagaatgcatcttccccagagaaagccaagggtagacatactgtgccttgtatgccacctgcaaagcagaagtttctaaaaagtactgaggagcaagagctggagaagagtatgaaaatgcagcaagaggtggtggagatgcggaaaaagaatgaagaattcaagaaacttgctctggctggaatagggcaacctgtgaagaaatcagtgagccaggtcaccaaatcagttgacttccacttccgcacagatgagcgaatcaaacaacatcctaagaaccaggaggaatataaggaagtgaactttacatctgaactacgaaagcatccttcatctcctgcccgagtgactaagggatgtaccattgttaagcctttcaacctgtcccaaggaaagaaaagaacatttgatgaaacagtttctacatatgtgccccttgcacagcaagttgaagacttccataaacgaacccctaacagatatcatttgaggagcaagaaggatgatattaacctgttaccctccaaatcttctgtgaccaagatttgcagagacccacagactcctgtactgcaaaccaaacaccgtgcacgggctgtgacctgcaaaagtacagcagagctggaggctgaggagctcgagaaattgcaacaatacaaattcaaagcacgtgaacttgatcccagaatacttgaaggtgggcccatcttgcccaagaaaccacctgtgaaaccacccaccgagcctattggctttgatttggaaattgagaaaagaatccaggagcgagaatcaaagaagaaaacagaggatgaacactttgaatttcattccagaccttgccctactaagattttggaagatgttgtgggtgttcctgaaaagaaggtacttccaatcaccgtccccaagtcaccagcctttgcattgaagaacagaattcgaatgcccaccaaagaagatgaggaagaggacgaaccggtagtgataaaagctcaacctgtgccacattatggggtgccttttaagccccaaatcccagaggcaagaactgtggaaatatgccctttctcgtttgattctcgagacaaagaacgtcagttacagaaggagaagaaaataaaagaactgcagaaaggggaggtgcccaagttcaaggcacttcccttgcctcattttgacaccattaacctgccagagaagaaggtaaagaatgtgacccagattgaacctttctgcttggagactgacagaagaggtgctctgaaggcacagacttggaagcaccagctggaagaagaactgagacagcagaaagaagcagcttgtttcaaggctcgtccaaacaccgtcatctctcaggagccctttgttcccaagaaagagaagaaatcagttgctgagggcctttctggttctctagttcaggaaccttttcagctggctactgagaagagagccaaagagcggcaggagctggagaagagaatggctgaggtagaagcccagaaagcccagcagttggaggaggccagactacaggaggaagagcagaaaaaagaggagctggccaggctacggagagaactggtgcataaggcaaatccaatacgcaagtaccagggtctggagataaagtcaagtgaccagcctctgactgtgcctgtatctcccaaattctccactcgattccactgctaaactcagctgtgagctgcggataccgcccggcaatgggacctgctcttaacctcaaacctaggaccgtcttgctttgtcattgggcatggagagaacccatttctccagacttttacctacccgtgcctgagaaagcatacttgacaactgtggactccagttttgttgagaattgttttcttacattactaaggctaataatgagatgtaactcatgaatgtctcgattagactccatgtagttacttcctttaaaccatcagccggccttttatatgggtcttcactctgactagaatttagtctctgtgtcagcacagtgtaatctctattgctattgccccttacgactctcaccctctccccactttttttaaaaattttaaccagaaaataaagatagttaaatcctaagatagagattaagtcatggtttaaatgaggaacaatcagtaaatcagattctgtcctcttctctgcataccgtgaatttatagttaaggatccctttgctgtgagggtagaaaacctcaccaactgcaccagtgaggaagaagactgcgtggattcatggggagcctcacagcagccacgcagcaggctctgggtggggctgccgttaaggcacgttctttccttactggtgctgataacaacagggaaccgtgcagtgtgcattttaagacctggcctggaataaatacgttttgtctttc

SEQ ID NO: 408116 - DNA, 3736 bp, Homo sapiens
cttcccaggaactccgggccgcgttgttcgctggtacctccttctgacttccggtattgctgcggtctgtagggccaatcgggagcctggaattgctttcccggcgctctgattggtgcattcgactaggctgcctgggttcaaaatttcaacgatactgaatgagtcccgcggcgggttggctcgcgcttcgttgtcagatctgaggcgaggctaggtgagccgtgggaagaaaagagggagcagctagggcgcgggtctccctcctcccggagtttggaacggctgaagttcaccttccagcccctagcgccgttcgcgccgctaggcctggcttctgaggcggttgcggtgctcggtcgccgcctaggcggggcagggtgcgagcaggggcttcgggccacgcttctcttggcgacaggattttgctgtgaagtccgtccgggaaacggaggaaaaaaagagttgcgggaggctgtcggctaataacggttcttgatacatatttgccagacttcaagatttcagaaaaggggtgaaagagaagattgcaactttgagtcagacctgtaggcctgatagactgattaaaccacagaaggtgacctgctgagaaaagtggtacaaatactgggaaaaacctgctcttctgcgttaagtgggagacaatgtcacaagttaaaagctcttattcctatgatgccccctcggatttcatcaatttttcatccttggatgatgaaggagatactcaaaacatagattcatggtttgaggagaaggccaatttggagaataagttactggggaagaatggaactggagggctttttcagggcaaaactcctttgagaaaggctaatcttcagcaagctattgtcacacctttgaaaccagttgacaacacttactacaaagaggcagaaaaagaaaatcttgtggaacaatccattccgtcaaatgcttgttcttccctggaagttgaggcagccatatcaagaaaaactccagcccagcctcagagaagatctcttaggctttctgctcagaaggatttggaacagaaagaaaagcatcatgtaaaaatgaaagccaagagatgtgccactcctgtaatcatcgatgaaattctaccctctaagaaaatgaaagtttctaacaacaaaaagaagccagaggaagaaggcagtgctcatcaagatactgctgaaaagaatgcatcttccccagagaaagccaagggtagacatactgtgccttgtatgccacctgcaaagcagaagtttctaaaaagtactgaggagcaagagctggagaagagtatgaaaatgcagcaagaggtggtggagatgcggaaaaagaatgaagaattcaagaaacttgctctggctggaatagggcaacctgtgaagaaatcagtgagccaggtcaccaaatcagttgacttccacttccgcacagatgagcgaatcaaacaacatcctaagaaccaggaggaatataaggaagtgaactttacatctgaactacgaaagcatccttcatctcctgcccgagtgactaagggatgtaccattgttaagcctttcaacctgtcccaaggaaagaaaagaacatttgatgaaacagtttctacatatgtgccccttgcacagcaagttgaagacttccataaacgaacccctaacagatatcatttgaggagcaagaaggatgatattaagacagggtcttgctccgtcacccaggctggagtgcagtggcgtgatcatggctcacttcagtgtccaactcctgggctcaagcaatcctcctgccttagccttccaaacctgttaccctccaaatcttctgtgaccaagatttgcagagacccacagactcctgtactgcaaaccaaacaccgtgcacgggctgtgacctgcaaaagtacagcagagctggaggctgaggagctcgagaaattgcaacaatacaaattcaaagcacgtgaacttgatcccagaatacttgaaggtgggcccatcttgcccaagaaaccacctgtgaaaccacccaccgagcctattggctttgatttggaaattgagaaaagaatccaggagcgagaatcaaagaagaaaacagaggatgaacactttgaatttcattccagaccttgccctactaagattttggaagatgttgtgggtgttcctgaaaagaaggtacttccaatcaccgtccccaagtcaccagcctttgcattgaagaacagaattcgaatgcccaccaaagaagatgaggaagaggacgaaccggtagtgataaaagctcaacctgtgccacattatggggtgccttttaagccccaaatcccagaggcaagaactgtggaaatatgccctttctcgtttgattctcgagacaaagaacgtcagttacagaaggagaagaaaataaaagaactgcagaaaggggaggtgcccaagttcaaggcacttcccttgcctcattttgacaccattaacctgccagagaagaaggtaaagaatgtgacccagattgaacctttctgcttggagactgacagaagaggtgctctgaaggcacagacttggaagcaccagctggaagaagaactgagacagcagaaagaagcagcttgtttcaaggctcgtccaaacaccgtcatctctcaggagccctttgttcccaagaaagagaagaaatcagttgctgagggcctttctggttctctagttcaggaaccttttcagctggctactgagaagagagccaaagagcggcaggagctggagaagagaatggctgaggtagaagcccagaaagcccagcagttggaggaggccagactacaggaggaagagcagaaaaaagaggagctggccaggctacggagagaactggtgcataaggcaaatccaatacgcaagtaccagggtctggagataaagtcaagtgaccagcctctgactgtgcctgtatctcccaaattctccactcgattccactgctaaactcagctgtgagctgcggataccgcccggcaatgggacctgctcttaacctcaaacctaggaccgtcttgctttgtcattgggcatggagagaacccatttctccagacttttacctacccgtgcctgagaaagcatacttgacaactgtggactccagttttgttgagaattgttttcttacattactaaggctaataatgagatgtaactcatgaatgtctcgattagactccatgtagttacttcctttaaaccatcagccggccttttatatgggtcttcactctgactagaatttagtctctgtgtcagcacagtgtaatctctattgctattgccccttacgactctcaccctctccccactttttttaaaaattttaaccagaaaataaagatagttaaatcctaagatagagattaagtcatggtttaaatgaggaacaatcagtaaatcagattctgtcctcttctctgcataccgtgaatttatagttaaggatccctttgctgtgagggtagaaaacctcaccaactgcaccagtgaggaagaagactgcgtggattcatggggagcctcacagcagccacgcagcaggctctgggtggggctgccgttaaggcacgttctttccttactggtgctgataacaacagggaaccgtgcagtgtgcattttaagacctggcctggaataaatacgttttgtctttc

SEQ ID NO: 408117 - DNA, 4005 bp, Homo sapiens
cttcccaggaactccgggccgcgttgttcgctggtacctccttctgacttccggtattgctgcggtctgtagggccaatcgggagcctggaattgctttcccggcgctctgattggtgcattcgactaggctgcctgggttcaaaatttcaacgatactgaatgagtcccgcggcgggttggctcgcgcttcgttgtcagatctgaggcgaggctaggtgagccgtgggaagaaaagagggagcagctagggcgcgggtctccctcctcccggagtttggaacggctgaagttcaccttccagcccctagcgccgttcgcgccgctaggcctggcttctgaggcggttgcggtgctcggtcgccgcctaggcggggcagggtgcgagcaggggcttcgggccacgcttctcttggcgacaggattttgctgtgaagtccgtccgggaaacggaggaaaaaaagagttgcgggaggctgtcggctaataacggttcttgatacatatttgccagacttcaagatttcagaaaaggggtgaaagagaagattgcaactttgagtcagacctgtaggcctgatagactgattaaaccacagaaggtgacctgctgagaaaagtggtacaaatactgggaaaaacctgctcttctgcgttaagtgggagacaatgtcacaagttaaaagctcttattcctatgatgccccctcggatttcatcaatttttcatccttggatgatgaaggagatactcaaaacatagattcatggtttgaggagaaggccaatttggagaataagttactggggaagaatggaactggagggctttttcagggcaaaactcctttgagaaaggctaatcttcagcaagctattgtcacacctttgaaaccagttgacaacacttactacaaagaggcagaaaaagaaaatcttgtggaacaatccattccgtcaaatgcttgttcttccctggaagttgaggcagccatatcaagaaaaactccagcccagcctcagagaagatctcttaggctttctgctcagaaggatttggaacagaaagaaaagcatcatgtaaaaatgaaagccaagagatgtgccactcctgtaatcatcgatgaaattctaccctctaagaaaatgaaagtttctaacaacaaaaagaagccagaggaagaaggcagtgctcatcaagatactgctgaaaagaatgcatcttccccagagaaagccaagggtagacatactgtgccttgtatgccacctgcaaagcagaagtttctaaaaagtactgaggagcaagagctggagaagagtatgaaaatgcagcaagaggtggtggagatgcggaaaaagaatgaagaattcaagaaacttgctctggctggaatagggcaacctgtgaagaaatcagtgagccaggtcaccaaatcagttgacttccacttccgcacagatgagcgaatcaaacaacatcctaagaaccaggaggaatataaggaagtgaactttacatctgaactacgaaagcatccttcatctcctgcccgagtgactaagggatgtaccattgttaagcctttcaacctgtcccaaggaaagaaaagaacatttgatgaaacagtttctacatatgtgccccttgcacagcaagttgaagacttccataaacgaacccctaacagatatcatttgaggagcaagaaggatgatattaacctgttaccctccaaatcttctgtgaccaagatttgcagagacccacagactcctgtactgcaaaccaaacaccgtgcacgggctgtgacctgcaaaagtacagcagagctggaggctgaggagctcgagaaattgcaacaatacaaattcaaagcacgtgaacttgatcccagaatacttgaaggtgggcccatcttgcccaagaaaccacctgtgaaaccacccaccgagcctattggctttgatttggaaattgagaaaagaatccaggagcgagaatcaaagaagaaaacagaggatgaacactttgaatttcattccagaccttgccctactaagattttggaagatgttgtgggtgttcctgaaaagaaggtacttccaatcaccgtccccaagtcaccagcctttgcattgaagaacagaattcgaatgcccaccaaagaagatgaggaagaggacgaaccggtagtgataaaagctcaacctgtgccacattatggggtgccttttaagccccaaatcccagaggcaagaactgtggaaatatgccctttctcgtttgattctcgagacaaagaacgtcagttacagaaggagaagaaaataaaagaactgcagaaaggggaggtgcccaagttcaaggcacttcccttgcctcattttgacaccattaacctgccagagaagaaggtaaagaatgtgacccagattgaacctttctgcttggagactgacagaagaggtgctctgaaggcacagacttggaagcaccagctggaagaagaactgagacagcagaaagaagcagcttgtttcaaggctcgtccaaacaccgtcatctctcaggagccctttgttcccaagaaagagaagaaatcagttgctgagggcctttctggttctctagttcaggaaccttttcagctggctactgagaagagagccaaagagcggcaggagctggagaagagaatggctgaggtagaagcccagaaagcccagcagttggaggaggccagactacaggaggaagagcagaaaaaagaggagctggccaggctacggagagaactggtgcataaggcaaatccaatacgcaagtaccagggtctggagataaagtcaagtgaccagcctctgactgtgcctgtatctcccaaattctccactcgattccactgctaaactcagctgtgagctgcggataccgcccggcaatgggacctgctcttaacctcaaacctaggaccgtcttgctttgtcattgggcatggagagaacccatttctccagacttttacctacccgtgcctgagaaagcatacttgacaactgtggactccagttttgttgagaattgttttcttacattactaaggctaataatgagatgtaactcatgaatgtctcgattagactccatgtagttacttcctttaaaccatcagccggccttttatatgggtcttcactctgactagaatttagtctctgtgtcagcacagtgtaatctctattgctattgccccttacgactctcaccctctccccactttttttaaaaattttaaccagaaaataaagatagttaaatcctaagatagagattaagtcatggtttaaatgaggaacaatcagtaaatcagattctgtcctcttctctgcataccgtgaatttatagttaaggatccctttgctgtgagggtagaaaacctcaccaactgcaccagtgaggaagaagactgcgtggattcatggggagcctcacagcagccacgcagcaggctctgggtggggctgccgttaaggcacgttctttccttactggtgctgataacaacagggaaccgtgcagtgtgcattttaagacctggcctggaataaatacgttttgtctttcaaaaaaaaaaaaaaaaaaaaaaaaaaacaaaaaaacaagatgtgtgtgggggcgcacgacgggcgcccacgagaaaaagttttttcaaacaccatgcgggggggcggacgggggcacccaggaggaggagagacgaaacaggggggacaaaagggtgctcccagggaggaggacaccgggcgaaaaaaagaaaaaagcaggggcgagaggaatctctctccacaagataaaacaaaaacgagcgcgggggggaacacaacgaaggctgggtgaaaaagaaaacacaccgaaggagggggataggagaggggacaaaaaaggggggactaaacaaaaggagggataccaagagacacgcgaaacacaaattacccccc

SEQ ID NO: 408118 - DNA, 2991 bp, Homo sapiens
tgctagaactttgcttgtacttgccacatgagttggaagtgtactggtagggagctttagtttgcattttaaatgcgtgatagtgatttgttttgcttccttgctgatcagacaatgatgatcttcccttttcacagaggagaaggccaatttggagaataagttactggggaagaatggaactggagggctttttcagggcaaaactcctttgagaaaggctaatcttcagcaagctattgtcacacctttgaaaccagttgacaacacttactacaaagaggcagaaaaagaaaatcttgtggaacaatccattccgtcaaatgcttgttcttccctggaagttgaggcagccatatcaagaaaaactccagcccagcctcagagaagatctcttaggctttctgctcagaaggatttggaacagaaagaaaagcatcatgtaaaaatgaaagccaagagatgtgccactcctgtaatcatcgatgaaattctaccctctaagaaaatgaaagtttctaacaacaaaaagaagccagaggaagaaggcagtgctcatcaagatactgctgaaaagaatgcatcttccccagagaaagccaagggtagacatactgtgccttgtatgccacctgcaaagcagaagtttctaaaaagtactgaggagcaagagctggagaagagtatgaaaatgcagcaagaggtggtggagatgcggaaaaagaatgaagaattcaagaaacttgctctggctggaatagggcaacctgtgaagaaatcagtgagccaggtcaccaaatcagttgacttccacttccgcacagatgagcgaatcaaacaacatcctaagaaccaggaggaatataaggaagtgaactttacatctgaactacgaaagcatccttcatctcctgcccgagtgactaagggatgtaccattgttaagcctttcaacctgtcccaaggaaagaaaagaacatttgatgaaacagtttctacatatgtgccccttgcacagcaagttgaagacttccataaacgaacccctaacagatatcatttgaggagcaagaaggatgatattaacctgttaccctccaaatcttctgtgaccaagatttgcagagacccacagactcctgtactgcaaaccaaacaccgtgcacgggctgtgacctgcaaaagtacagcagagctggaggctgaggagctcgagaaattgcaacaatacaaattcaaagcacgtgaacttgatcccagaatacttgaaggtgggcccatcttgcccaagaaaccacctgtgaaaccacccaccgagcctattggctttgatttggaaattgagaaaagaatccaggagcgagaatcaaagaagaaaacagaggatgaacactttgaatttcattccagaccttgccctactaagattttggaagatgttgtgggtgttcctgaaaagaaggtacttccaatcaccgtccccaagtcaccagcctttgcattgaagaacagaattcgaatgcccaccaaagaagatgaggaagaggacgaaccggtagtgataaaagctcaacctgtgccacattatggggtgccttttaagccccaaatcccagaggcaagaactgtggaaatatgccctttctcgtttgattctcgagacaaagaacgtcagttacagaaggagaagaaaataaaagaactgcagaaaggggaggtgcccaagttcaaggcacttcccttgcctcattttgacaccattaacctgccagagaagaaggtaaagaatgtgacccagattgaacctttctgcttggagactgacagaagaggtgctctgaaggcacagacttggaagcaccagctggaagaagaactgagacagcagaaagaagcagcttgtttcaaggctcgtccaaacaccgtcatctctcaggagccctttgttcccaagaaagagaagaaatcagttgctgagggcctttctggttctctagttcaggaaccttttcagctggctactgagaagagagccaaagagcggcaggagctggagaagagaatggctgaggtagaagcccagaaagcccagcagttggaggaggccagactacaggaggaagagcagaaaaaagaggagctggccaggctacggagagaactggtgcataaggcaaatccaatacgcaagtaccagggtctggagataaagtcaagtgaccagcctctgactgtgcctgtatctcccaaattctccactcgattccactgctaaactcagctgtgagctgcggataccgcccggcaatgggacctgctcttaacctcaaacctaggaccgtcttgctttgtcattgggcatggagagaacccatttctccagacttttacctacccgtgcctgagaaagcatacttgacaactgtggactccagttttgttgagaattgttttcttacattactaaggctaataatgagatgtaactcatgaatgtctcgattagactccatgtagttacttcctttaaaccatcagccggccttttatatgggtcttcactctgactagaatttagtctctgtgtcagcacagtgtaatctctattgctattgccccttacgactctcaccctctccccactttttttaaaaattttaaccagaaaataaagatagttaaatcctaagatagagattaagtcatggtttaaatgaggaacaatcagtaaatcagattctgtcctcttctctgcataccgtgaatttatagttaaggatccctttgctgtgagggtagaaaacctcaccaactgcaccagtgaggaagaagactgcgtggattcatggggagcctcacagcagccacgcagcaggctctgggtggggctgccgttaaggcacgttctttccttactggtgctgataacaacagggaaccgtgcagtgtgcattttaagacctggcctggaataaatacgttttgtctttc

SEQ ID NO: 408119 - DNA, 2659 bp, Homo sapiens
tctgacggcaatgtgtctcctggagtgggcgcatatcagaaaactcagcccagctaagatctcttaggctttctgctcagaaggatttggaacagaaagaaaagcatcatgtaaaaatgaaagccaagagatgtgccactcctgtaatcatcgatgaaattctaccctctaagaaaatgaaagtttctaacaacaaaaagaagccagaggaagaaggcagtgctcatcaagatactgctgaaaagaatgcatcttccccagagaaagccaagggtagacatactgtgccttgtatgccacctgcaaagcagaagtttctaaaaagtactgaggagcaagagctggagaagagtatgaaaatgcagcaagaggtggtggagatgcggaaaaagaatgaagaattcaagaaacttgctctggctggaatagggcaacctgtgaagaaatcagtgagccaggtcaccaaatcagttgacttccacttccgcacagatgagcgaatcaaacaacatcctaagaaccaggaggaatataaggaagtgaactttacatctgaactacgaaagcatccttcatctcctgcccgagtgactaagggatgtaccattgttaagcctttcaacctgtcccaaggaaagaaaagaacatttgatgaaacagtttctacatatgtgccccttgcacagcaagttgaagacttccataaacgaacccctaacagatatcatttgaggagcaagaaggatgatattaacctgttaccctccaaatcttctgtgaccaagatttgcagagacccacagactcctgtactgcaaaccaaacaccgtgcacgggctgtgacctgcaaaagtacagcagagctggaggctgaggagctcgagaaattgcaacaatacaaattcaaagcacgtgaacttgatcccagaatacttgaaggtgggcccatcttgcccaagaaaccacctgtgaaaccacccaccgagcctattggctttgatttggaaattgagaaaagaatccaggagcgagaatcaaagaagaaaacagaggatgaacactttgaatttcattccagaccttgccctactaagattttggaagatgttgtgggtgttcctgaaaagaaggtacttccaatcaccgtccccaagtcaccagcctttgcattgaagaacagaattcgaatgcccaccaaagaagatgaggaagaggacgaaccggtagtgataaaagctcaacctgtgccacattatggggtgccttttaagccccaaatcccagaggcaagaactgtggaaatatgccctttctcgtttgattctcgagacaaagaacgtcagttacagaaggagaagaaaataaaagaactgcagaaaggggaggtgcccaagttcaaggcacttcccttgcctcattttgacaccattaacctgccagagaagaaggtaaagaatgtgacccagattgaacctttctgcttggagactgacagaagaggtgctctgaaggcacagacttggaagcaccagctggaagaagaactgagacagcagaaagaagcagcttgtttcaaggctcgtccaaacaccgtcatctctcaggagccctttgttcccaagaaagagaagaaatcagttgctgagggcctttctggttctctagttcaggaaccttttcagctggctactgagaagagagccaaagagcggcaggagctggagaagagaatggctgaggtagaagcccagaaagcccagcagttggaggaggccagactacaggaggaagagcagaaaaaagaggagctggccaggctacggagagaactggtgcataaggcaaatccaatacgcaagtaccagggtctggagataaagtcaagtgaccagcctctgactgtgcctgtatctcccaaattctccactcgattccactgctaaactcagctgtgagctgcggataccgcccggcaatgggacctgctcttaacctcaaacctaggaccgtcttgctttgtcattgggcatggagagaacccatttctccagacttttacctacccgtgcctgagaaagcatacttgacaactgtggactccagttttgttgagaattgttttcttacattactaaggctaataatgagatgtaactcatgaatgtctcgattagactccatgtagttacttcctttaaaccatcagccggccttttatatgggtcttcactctgactagaatttagtctctgtgtcagcacagtgtaatctctattgctattgccccttacgactctcaccctctccccactttttttaaaaattttaaccagaaaataaagatagttaaatcctaagatagagattaagtcatggtttaaatgaggaacaatcagtaaatcagattctgtcctcttctctgcataccgtgaatttatagttaaggatccctttgctgtgagggtagaaaacctcaccaactgcaccagtgaggaagaagactgcgtggattcatggggagcctcacagcagccacgcagcaggctctgggtggggctgccgttaaggcacgttctttccttactggtgctgataacaacagggaaccgtgcagtgtgcattttaagacctggcctggaataaatacgttttgtctttc

SEQ ID NO: 408120 - DNA, 3574 bp, Homo sapiens
cttcccaggaactccgggccgcgttgttcgctggtacctccttctgacttccggtattgctgcggtctgtagggccaatcgggagcctggaattgctttcccggcgctctgattggtgcattcgactaggctgcctgggttcaaaatttcaacgatactgaatgagtcccgcggcgggttggctcgcgcttcgttgtcagatctgaggcgaggctaggtgagccgtgggaagaaaagagggagcagctagggcgcgggtctccctcctcccggagtttggaacggctgaagttcaccttccagcccctagcgccgttcgcgccgctaggcctggcttctgaggcggttgcggtgctcggtcgccgcctaggcggggcagggtgcgagcaggggcttcgggccacgcttctcttggcgacaggattttgctgtgaagtccgtccgggaaacggaggaaaaaaagagttgcgggaggctgtcggctaataacggttcttgatacatatttgccagacttcaagatttcagaaaaggggtgaaagagaagattgcaactttgagtcagacctgtaggcctgatagactgattaaaccacagaaggtgacctgctgagaaaagtggtacaaatactgggaaaaacctgctcttctgcgttaagtgggagacaatgtcacaagttaaaagctcttattcctatgatgccccctcggatttcatcaatttttcatccttggatgatgaaggagatactcaaaacatagattcatggtttgaggagaaggccaatttggagaataagttactggggaagaatggaactggagggctttttcagggcaaaactcctttgagaaaggctaatcttcagcaagctattgtcacacctttgaaaccagttgacaacacttactacaaagaggcagaaaaagaaaatcttgtggaacaatccattccgtcaaatgcttgttcttccctggaagttgaggcagccatatcaagaaaaactccagcccagcctcagagaagatctcttaggctttctgctcagaaggatttggaacagaaagaaaagcatcatgtaaaaatgaaagccaagagatgtgccactcctgtaatcatcgatgaaattctaccctctaagaaaatgaaagtttctaacaacaaaaagaagccagaggaagaaggcagtgctcatcaagatactgctgaaaagaatgcatcttccccagagaaagccaagggtagacatactgtgccttgtatgccacctgcaaagcagaagtttctaaaaagtactgaggagcaagagctggagaagagtatgaaaatgcagcaagaggtggtggagatgcggaaaaagaatgaagaattcaagaaacttgctctggctggaatagggcaacctgtgaagaaatcagtgagccaggtcaccaaatcagttgacttccacttccgcacagatgagcgaatcaaacaacatcctaagaaccaggaggaatataaggaagtgaactttacatctgaactacgaaagcatccttcatctcctgcccgagtgactaagggatgtaccattgttaagcctttcaacctgtcccaaggaaagaaaagaacatttgatgaaacagtttctacatatgtgccccttgcacagcaagttgaagacttccataaacgaacccctaacagatatcatttgaggagcaagaaggatgatattaacctgttaccctccaaatcttctgtgaccaagatttgcagagacccacagactcctgtactgcaaaccaaacaccgtgcacgggctgtgacctgcaaaagtacagcagagctggaggctgaggagctcgagaaattgcaacaatacaaattcaaagcacgtgaacttgatcccagaatacttgaaggtgggcccatcttgcccaagaaaccacctgtgaaaccacccaccgagcctattggctttgatttggaaattgagaaaagaatccaggagcgagaatcaaagaagaaaacagaggatgaacactttgaatttcattccagaccttgccctactaagattttggaagatgttgtgggtgttcctgaaaagaaggtacttccaatcaccgtccccaagtcaccagcctttgcattgaagaacagaattcgaatgcccaccaaagaagatgaggaagaggacgaaccggtagtgataaaagctcaacctgtgccacattatggggtgccttttaagccccaaatcccagaggcaagaactgtggaaatatgccctttctcgtttgattctcgagacaaagaacgtcagttacagaaggagaagaaaatttttgacaccattaacctgccagagaagaaggtaaagaatgtgacccagattgaacctttctgcttggagactgacagaagaggtgctctgaaggcacagacttggaagcaccagctggaagaagaactgagacagcagaaagaagcagcttgtttcaaggctcgtccaaacaccgtcatctctcaggagccctttgttcccaagaaagagaagaaatcagttgctgagggcctttctggttctctagttcaggaaccttttcagctggctactgagaagagagccaaagagcggcaggagctggagaagagaatggctgaggtagaagcccagaaagcccagcagttggaggaggccagactacaggaggaagagcagaaaaaagaggagctggccaggctacggagagaactggtgcataaggcaaatccaatacgcaagtaccagggtctggagataaagtcaagtgaccagcctctgactgtgcctgtatctcccaaattctccactcgattccactgctaaactcagctgtgagctgcggataccgcccggcaatgggacctgctcttaacctcaaacctaggaccgtcttgctttgtcattgggcatggagagaacccatttctccagacttttacctacccgtgcctgagaaagcatacttgacaactgtggactccagttttgttgagaattgttttcttacattactaaggctaataatgagatgtaactcatgaatgtctcgattagactccatgtagttacttcctttaaaccatcagccggccttttatatgggtcttcactctgactagaatttagtctctgtgtcagcacagtgtaatctctattgctattgccccttacgactctcaccctctccccactttttttaaaaattttaaccagaaaataaagatagttaaatcctaagatagagattaagtcatggtttaaatgaggaacaatcagtaaatcagattctgtcctcttctctgcataccgtgaatttatagttaaggatccctttgctgtgagggtagaaaacctcaccaactgcaccagtgaggaagaagactgcgtggattcatggggagcctcacagcagccacgcagcaggctctgggtggggctgccgttaaggcacgttctttccttactggtgctgataacaacagggaaccgtgcagtgtgcattttaagacctggcctggaataaatacgttttgtctttc

SEQ ID NO: 408121 - DNA, 1719 bp, Homo sapiens
gcactttgcgaggccaaggcaggaagattgcctgagcccaggagtttgagaccagctgggcaacatagtgagaccctgtctctacccaaaggggaaaaaaggatttaatcttctcatacagcttagtggagatcattttgtgatatctaattgagttgcttactcctttcagggtgttcctgaaaagaaggtacttccaatcaccgtccccaagtcaccagcctttgcattgaagaacagaattcgaatgcccaccaaagaagatgaggaagaggacgaaccggtagtgataaaagctcaacctgtgccacattatggggtgccttttaagccccaaatcccagaggcaagaactgtggaaatatgccctttctcgtttgattctcgagacaaagaacgtcagttacagaaggagaagaaaataaaagaactgcagaaaggggaggtgcccaagttcaaggcacttcccttgcctcattttgacaccattaacctgccagagaagaaggtaaagaatgtgacccagattgaacctttctgcttggagactgacagaagaggtgctctgaaggcacagacttggaagcaccagctggaagaagaactgagacagcagaaagaagcagcttgtttcaaggctcgtccaaacaccgtcatctctcaggagccctttgttcccaagaaagagaagaaatcagttgctgagggcctttctggttctctagttcaggaaccttttcagctggctactgagaagagagccaaagagcggcaggagctggagaagagaatggctgaggtagaagcccagaaagcccagcagttggaggaggccagactacaggaggaagagcagaaaaaagaggagctggccaggctacggagagaactggtgcataaggcaaatccaatacgcaagtaccagggtctggagataaagtcaagtgaccagcctctgactgtgcctgtatctcccaaattctccactcgattccactgctaaactcagctgtgagctgcggataccgcccggcaatgggacctgctcttaacctcaaacctaggaccgtcttgctttgtcattgggcatggagagaacccatttctccagacttttacctacccgtgcctgagaaagcatacttgacaactgtggactccagttttgttgagaattgttttcttacattactaaggctaataatgagatgtaactcatgaatgtctcgattagactccatgtagttacttcctttaaaccatcagccggccttttatatgggtcttcactctgactagaatttagtctctgtgtcagcacagtgtaatctctattgctattgccccttacgactctcaccctctccccactttttttaaaaattttaaccagaaaataaagatagttaaatcctaagatagagattaagtcatggtttaaatgaggaacaatcagtaaatcagattctgtcctcttctctgcataccgtgaatttatagttaaggatccctttgctgtgagggtagaaaacctcaccaactgcaccagtgaggaagaagactgcgtggattcatggggagcctcacagcagccacgcagcaggctctgggtggggctgccgttaaggcacgttctttccttactggtgctgataacaacagggaaccgtgcagtgtgcattttaagacctggcctggaataaatacgttttgtctttc

SEQ ID NO: 408122 - DNA, 2433 bp, Homo sapiens
cttcccaggaactccgggccgcgttgttcgctggtacctccttctgacttccggtattgctgcggtctgtagggccaatcgggagcctggaattgctttcccggcgctctgattggtgcattcgactaggctgcctgggttcaaaatttcaacgatactgaatgagtcccgcggcgggttggctcgcgcttcgttgtcagatctgaggcgaggctaggtgagccgtgggaagaaaagagggagcagctagggcgcgggtctccctcctcccggagtttggaacggctgaagttcaccttccagcccctagcgccgttcgcgccgctaggcctggcttctgaggcggttgcggtgctcggtcgccgcctaggcggggcagggtgcgagcaggggcttcgggccacgcttctcttggcgacaggattttgctgtgaagtccgtccgggaaacggaggaaaaaaagagttgcgggaggctgtcggctaataacggttcttgatacatatttgccagacttcaagatttcagaaaaggggtgaaagagaagattgcaactttgagtcagacctgtaggcctgatagactgattaaaccacagaaggtgacctgctgagaaaagtggtacaaatactgggaaaaacctgctcttctgcgttaagtgggagacaatgtcacaagttaaaagctcttattcctatgatgccccctcggatttcatcaatttttcatccttggatgatgaaggagatactcaaaacatagattcatggtttgaggagaaggccaatttggagaataagttactggggaagaatggaactggagggctttttcagggcaaaactcctttgagaaaggctaatcttcagcaagctattgtcacacctttgaaaccagttgacaacacttactacaaagaggcagaaaaagaaaatcttgtggaacaatccattccgtcaaatgcttgttcttccctggaagttgaggcagccatatcaagaaaaactccagcccagcctcagagaagatctcttaggctttctgctcagaaggatttggaacagaaagaaaagcatcatgtaaaaatgaaagccaagagatgtgccactcctgtaatcatcgatgaaattctaccctctaagaaaatgaaagtttctaacaacaaaaagaagccagaggaagaaggcagtgctcatcaagatactgctgaaaagaatgcatcttccccagagaaagccaagggtagacatactgtgccttgtatgccacctgcaaagcagaagtttctaaaaagtactgaggagcaagagctggagaagagtatgaaaatgcagcaagaggtggtggagatgcggaaaaagaatgaagaattcaagaaacttgctctggctggaatagggcaacctgtgaagaaatcagtgagccaggtcaccaaatcagttgacttccacttccgcacagatgagcgaatcaaacaacatcctaagaaccaggaggaatataaggaagtgaactttacatctgaactacgaaagcatccttcatctcctgcccgagtgactaagggatgtaccattgttaagcctttcaacctgtcccaaggaaagaaaagaacatttgatgaaacagtttctacatatgtgccccttgcacagcaagttgaagacttccataaacgaacccctaacagatatcatttgaggagcaagaaggatgatattaacctgttaccctccaaatcttctgtgaccaagatttgcagagacccacagactcctgtactgcaaaccaaacaccgtgcacgggctgtgacctgcaaaagtacagcagagctggaggctgaggagctcgagaaattgcaacaatacaaattcaaagcacgtgaacttgatcccagaatacttgaaggtgggcccatcttgcccaagaaaccacctgtgaaaccacccaccgagcctattggctttgatttggaaattgagaaaagaatccaggagcgagaatcaaagaagaaaacagaggatgaacactttgaatttcattccagaccttgccctactaagattttggaagatgttgtgggtgttcctgaaaagaaggtacttccaatcaccgtccccaagtcaccagcctttgcattgaagaacagaattcgaatgcccaccaaagaagatgaggaagaggacgaaccggtagtgataaaagctcaacctgtgccacattatggggtgccttttaagccccaaatcccagaggcaagaactgtggaaatatgccctttctcgtttgattctcgagacaaagaacgtcagttacagaaggagaagaaaataaaagaactgcagaaaggggaggtgcccaagttcaaggcacttcccttgcctcattttgacaccattaaccttcttctctggcaggttaatggtcgacgcg

SEQ ID NO: 408123 - DNA, 1106 bp, Homo sapiens
gtgcatgtctgtgccacttgctcattccagggggcgtaggtttatgcaagtcctgcttgtgcaccaatattttttctgtttctgtacttagagggcctttctggttctctagttcaggaaccttttcagctggctactgagaagagagccaaagagcggcaggagctggagaagagaatggctgaggtagaagcccagaaagcccagcagttggaggaggccagactacaggaggaagagcagaaaaaagaggagctggccaggctacggagagaactggtgcataaggcaaatccaatacgcaagtaccagggtctggagataaagtcaagtgaccagcctctgactgtgcctgtatctcccaaattctccactcgattccactgctaaactcagctgtgagctgcggataccgcccggcaatgggacctgctcttaacctcaaacctaggaccgtcttgctttgtcattgggcatggagagaacccatttctccagacttttacctacccgtgcctgagaaagcatacttgacaactgtggactccagttttgttgagaattgttttcttacattactaaggctaataatgagatgtaactcatgaatgtctcgattagactccatgtagttacttcctttaaaccatcagccggccttttatatgggtcttcactctgactagaatttagtctctgtgtcagcacagtgtaatctctattgctattgccccttacgactctcaccctctccccactttttttaaaaattttaaccagaaaataaagatagttaaatcctaagatagagattaagtcatggtttaaatgaggaacaatcagtaaatcagattctgtcctcttctctgcataccgtgaatttatagttaaggatccctttgctgtgagggtagaaaacctcaccaactgcaccagtgaggaagaagactgcgtggattcatggggagcctcacagcagccacgcagcaggctctgggtggggctgccgttaaggcacgttctttccttactggtgctgataacaacagggaaccgtgcagtgtgcattttaagacctggcctggaataaatacgttttgtctttc

SEQ ID NO: 408124 - DNA, 1918 bp, Homo sapiens
cttcccaggaactccgggccgcgttgttcgctggtacctccttctgacttccggtattgctgcggtctgtagggccaatcgggagcctggaattgctttcccggcgctctgattggtgcattcgactaggctgcctgggttcaaaatttcaacgatactgaatgagtcccgcggcgggttggctcgcgcttcgttgtcagatctgaggcgaggctaggtgagccgtgggaagaaaagagggagcagctagggcgcgggtctccctcctcccggagtttggaacggctgaagttcaccttccagcccctagcgccgttcgcgccgctaggcctggcttctgaggcggttgcggtgctcggtcgccgcctaggcggggcagggtgcgagcaggggcttcgggccacgcttctcttggcgacaggattttgctgtgaagtccgtccgggaaacggaggaaaaaaagagttgcgggaggctgtcggctaataacggttcttgatacatatttgccagacttcaagatttcagaaaaggggtgaaagagaagattgcaactttgagtcagacctgtaggcctgatagactgattaaaccacagaaggtgacctgctgagaaaagtggtacaaatactgggaaaaacctgctcttctgcgttaagtgggagacaatgtcacaagttaaaagctcttattcctatgatgccccctcggatttcatcaatttttcatccttggatgatgaaggagatactcaaaacatagattcatggtttgaggagaaggccaatttggagaataagttactggggaagaatggaactggagggctttttcagggcaaaactcctttgagaaaggctaatcttcagcaagctattgtcacacctttgaaaccagttgacaacacttactacaaagaggcagaaaaagaaaatcttgtggaacaatccattccgtcaaatgcttgttcttccctggaagttgaggcagccatatcaagaaaaactccagcccagcctcagagaagatctcttaggctttctgctcagaaggatttggaacagaaagaaaagcatcatgtaaaaatgaaagccaagagatgtgccactcctgtaatcatcgatgaaattctaccctctaagaaaatgaaagtttctaacaacaaaaagaagccagaggaagaaggcagtgctcatcaagatactgctgaaaagaatgcatcttccccagagaaagccaagggtagacatactgtgccttgtatgccacctgcaaagcagaagtttctaaaaagtactgaggagcaagagctggagaagagtatgaaaatgcagcaagaggtggtggagatgcggaaaaagaatgaagaattcaagaaacttgctctggctggaatagggcaacctgtgaagaaatcagtgagccaggtcaccaaatcagttgacttccacttccgcacagatgagcgaatcaaacaacatcctaagaaccaggaggaatataaggaagtgaactttacatctgaactacgaaagcatccttcatctcctgcccgagtgactaagggatgtaccattgttaagcctttcaacctgtcccaaggaaagaaaagaacatttgatgaaacagtttctacatatgtgccccttgcacagcaagttgaagacttccataaacgaacccctaacagatatcatttgaggagcaagaaggatgatattaacctgttaccctccaaatcttctgtgaccaagatttgcagagacccacagactcctgtactgcaaaccaaacaccgtgcacgggctgtgacctgcaaaagtacagcagagctggaggctgaggagctcgagaaattgcaacaatacaaattcaaagcacttaaacttgatgcccagccaagcttgggtactcactc

SEQ ID NO: 408125 - DNA, 475 bp, Homo sapiens
tatatagttttgtgcaagctactttatgtctttgcctttttcccaattacaccagacgatttccaggggccctttgaactcttaaaattctaaaactttttgtatttagttggctctacctttctcccaatggggcttgtttagagcacagtcttcctgttagtgtgcatgtctgtgccacttgctcattccagggggcgtaggtttatgcaagtcctgcttgtgcaccaatattttttctgtttctgtacttagagggcctttctggttctctagttcaggaaccttttcagctggctactgagaagagagccaaagagcggcaggagctggagaagagaatggctgaggtagaagcccagaaagcccagcagttggaggaggccagactacaggaggaagagcagaaaaaagaggagctggccaggctacggagagaactggtaactgggagcatgagcactgacgaacacaa

SEQ ID NO: 408126 - DNA, 3324 bp, Homo sapiens
cttcccaggaactccgggccgcgttgttcgctggtacctccttctgacttccggtattgctgcggtctgtagggccaatcgggagcctggaattgctttcccggcgctctgattggtgcattcgactaggctgcctgggttcaaaatttcaacgatactgaatgagtcccgcggcgggttggctcgcgcttcgttgtcagatctgaggcgaggctaggtgagccgtgggaagaaaagagggagcagctagggcgcgggtctccctcctcccggagtttggaacggctgaagttcaccttccagcccctagcgccgttcgcgccgctaggcctggcttctgaggcggttgcggtgctcggtcgccgcctaggcggggcagggtgcgagcaggggcttcgggccacgcttctcttggcgacaggattttgctgtgaagtccgtccgggaaacggaggaaaaaaagagttgcgggaggctgtcggctaataacggttcttgatacatatttgccagacttcaagatttcagaaaaggggtgaaagagaagattgcaactttgagtcagacctgtaggcctgatagactgattaaaccacagaaggtgacctgctgagaaaagtggtacaaatactgggaaaaacctgctcttctgcgttaagtgggagacaatgtcacaagttaaaagctcttattcctatgatgccccctcggatttcatcaatttttcatccttggatgatgaaggagatactcaaaacatagattcatggtttgaggagaaggccaatttggagaataagttactggggaagaatggaactggagggctttttcagggcaaaactcctttgagaaaggctaatcttcagcaagctattgtcacacctttgaaaccagttgacaacacttactacaaagaggcagaaaaagaaaatcttgtggaacaatccattccgtcaaatgcttgttcttccctggaagttgaggcagccatatcaagaaaaactccagcccagcctcagagaagatctcttaggctttctgctcagaaggatttggaacagaaagaaaagcatcatgtaaaaatgaaagccaagagatgtgccactcctgtaatcatcgatgaaattctaccctctaagaaaatgaaagtttctaacaacaaaaagaagccagaggaagaaggcagtgctcatcaagatactgctgaaaagaatgcatcttccccagagaaagccaagggtagacatactgtgccttgtatgccacctgcaaagcagaagtttctaaaaagtactgaggagcaagagctggagaagagtatgaaaatgcagcaagaggtggtggagatgcggaaaaagaatgaagaattcaagaaacttgctctggctggaatagggcaacctgtgaagaaatcagtgagccaggtcaccaaatcagttgacttccacttccgcacagatgagcgaatcaaacaacatcctaagaaccaggaggaatataaggaagtgaactttacatctgaactacgaaagcatccttcatctcctgcccgagtgactaagggatgtaccattgttaagcctttcaacctgtcccaaggaaagaaaagaacatttgatgaaacagtttctacatatgtgccccttgcacagcaagttgaagacttccataaacgaacccctaacagatatcatttgaggagcaagaaggatgatattaacctgttaccctccaaatcttctgtgaccaagatttgcagagacccacagactcctgtactgcaaaccaaacaccgtgcacgggctgtgacctgcaaaagtacagcagagctggaggctgaggagctcgagaaattgcaacaatacaaattcaaagcacgtgaacttgatcccagaatacttgaaggtgggcccatcttgcccaagaaaccacctgtgaaaccacccaccgagcctattggctttgatttggaaattgagaaaagaatccaggagcgagaatcaaagaagaaaacagaggatgaacactttgaatttcattccagaccttgccctactaagattttggaagatgttgtgggtgttcctgaaaagaaggtacttccaatcaccgtccccaagtcaccagcctttgcattgaagaacagaattcgaatgcccaccaaagaagatgaggaagaggacgaaccggtagtgataaaagctcaacctgtgccacattatggggtgccttttaagccccaaatcccagaggcaagaactgtggaaatatgccctttctcgtttgattctcgagacaaagaacgtcagttacagaaggagaagaaaataaaagaactgcagaaaggggaggtgcccaagttcaaggcacttcccttgcctcattttgacaccattaacctgccagagaagaaggtaaagaatgtgacccagattgaacctttctgcttggagactgacagaagaggtgctctgaaggcacagacttggaagcaccagctggaagaagaactgagacagcagaaagaagcagcttgtttcaaggctcgtccaaacaccgtcatctctcaggagccctttgttcccaagaaagagaagaaatcagttgctgagggcctttctggttctctagttcaggaaccttttcagctggctactgagaagagagccaaagagcggcaggagctggagaagagaatggctgaggtagaagcccagaaagcccagcagttggaggaggccagactacaggaggaagagcagaaaaaagaggagctggccaggctacggagagaactggtgcataaggcaaatccaatacgcaagtaccagggtctggagataaagtcaagtgaccagcctctgactgtgcctgtatctcccaaattctccactcgattccactgctaaactcagctgtgagctgcggataccgcccggcaatgggacctgctcttaacctcaaacctaggaccgtcttgctttgtcattgggcatggagagaacccatttctccagacttttacctacccgtgcctgagaaagcatacttgacaactgtggactccagttttgttgagaattgttttcttacattactaaggctaataatgagatgtaactcatgaatgtctcgattagactccatgtagttacttcctttaaaccatcagccggccttttatatgggtcttcactctgactagaatttagtctctgtgtcagcacagtgtaatctctattgctattgccccttacgactctcaccctctccccactttttttaaaaattttaaccagaaaataaagatagttaaatcct

SEQ ID NO: 408127 - DNA, 3354 bp, Homo sapiens
cttcccaggaactccgggccgcgttgttcgctggtacctccttctgacttccggtattgctgcggtctgtagggccaatcgggagcctggaattgctttcccggcgctctgattggtgcattcgactaggctgcctgggttcaaaatttcaacgatactgaatgagtcccgcggcgggttggctcgcgcttcgttgtcagatctgaggcgaggctaggttcttgatacatatttgccagacttcaagatttcagaaaaggggtgaaagagaagattgcaactttgagtcagacctgtaggcctgatagactgattaaaccacagaaggtgacctgctgagaaaagtggtacaaatactgggaaaaacctgctcttctgcgttaagtgggagacaatgtcacaagttaaaagctcttattcctatgatgccccctcggatttcatcaatttttcatccttggatgatgaaggagatactcaaaacatagattcatggtttgaggagaaggccaatttggagaataagttactggggaagaatggaactggagggctttttcagggcaaaactcctttgagaaaggctaatcttcagcaagctattgtcacacctttgaaaccagttgacaacacttactacaaagaggcagaaaaagaaaatcttgtggaacaatccattccgtcaaatgcttgttcttccctggaagttgaggcagccatatcaagaaaaactccagcccagcctcagagaagatctcttaggctttctgctcagaaggatttggaacagaaagaaaagcatcatgtaaaaatgaaagccaagagatgtgccactcctgtaatcatcgatgaaattctaccctctaagaaaatgaaagtttctaacaacaaaaagaagccagaggaagaaggcagtgctcatcaagatactgctgaaaagaatgcatcttccccagagaaagccaagggtagacatactgtgccttgtatgccacctgcaaagcagaagtttctaaaaagtactgaggagcaagagctggagaagagtatgaaaatgcagcaagaggtggtggagatgcggaaaaagaatgaagaattcaagaaacttgctctggctggaatagggcaacctgtgaagaaatcagtgagccaggtcaccaaatcagttgacttccacttccgcacagatgagcgaatcaaacaacatcctaagaaccaggaggaatataaggaagtgaactttacatctgaactacgaaagcatccttcatctcctgcccgagtgactaagggatgtaccattgttaagcctttcaacctgtcccaaggaaagaaaagaacatttgatgaaacagtttctacatatgtgccccttgcacagcaagttgaagacttccataaacgaacccctaacagatatcatttgaggagcaagaaggatgatattaacctgttaccctccaaatcttctgtgaccaagatttgcagagacccacagactcctgtactgcaaaccaaacaccgtgcacgggctgtgacctgcaaaagtacagcagagctggaggctgaggagctcgagaaattgcaacaatacaaattcaaagcacgtgaacttgatcccagaatacttgaaggtgggcccatcttgcccaagaaaccacctgtgaaaccacccaccgagcctattggctttgatttggaaattgagaaaagaatccaggagcgagaatcaaagaagaaaacagaggatgaacactttgaatttcattccagaccttgccctactaagattttggaagatgttgtgggtgttcctgaaaagaaggtacttccaatcaccgtccccaagtcaccagcctttgcattgaagaacagaattcgaatgcccaccaaagaagatgaggaagaggacgaaccggtagtgataaaagctcaacctgtgccacattatggggtgccttttaagccccaaatcccagaggcaagaactgtggaaatatgccctttctcgtttgattctcgagacaaagaacgtcagttacagaaggagaagaaaataaaagaactgcagaaaggggaggtgcccaagttcaaggcacttcccttgcctcattttgacaccattaacctgccagagaagaaggtaaagaatgtgacccagattgaacctttctgcttggagactgacagaagaggtgctctgaaggcacagacttggaagcaccagctggaagaagaactgagacagcagaaagaagcagcttgtttcaaggctcgtccaaacaccgtcatctctcaggagccctttgttcccaagaaagagaagaaatcagttgctgagggcctttctggttctctagttcaggaaccttttcagctggctactgagaagagagccaaagagcggcaggagctggagaagagaatggctgaggtagaagcccagaaagcccagcagttggaggaggccagactacaggaggaagagcagaaaaaagaggagctggccaggctacggagagaactggtgcataaggcaaatccaatacgcaagtaccagggtctggagataaagtcaagtgaccagcctctgactgtgcctgtatctcccaaattctccactcgattccactgctaaactcagctgtgagctgcggataccgcccggcaatgggacctgctcttaacctcaaacctaggaccgtcttgctttgtcattgggcatggagagaacccatttctccagacttttacctacccgtgcctgagaaagcatacttgacaactgtggactccagttttgttgagaattgttttcttacattactaaggctaataatgagatgtaactcatgaatgtctcgattagactccatgtagttacttcctttaaaccatcagccggccttttatatgggtcttcactctgactagaatttagtctctgtgtcagcacagtgtaatctctattgctattgccccttacgactctcaccctctccccactttttttaaaaattttaaccagaaaataaagatagttaaatcctaagatagagattaagtcatggtttaaatgaggaacaatcagtaaatcagattctgtcctcttctctgcataccgtgaatttatagttaaggatccctttgctgtgagggtagaaaacctcaccaactgcaccagtgaggaagaagactgcgtggattcatggggagcctcacagcagccacgcagcaggctctgggtggggctgccgttaaggcacgttctttccttactggtgctgataacaacagggaaccgtgcagtgtgcattttaagacctggcctggaataaatacgttttgtctttc

SEQ ID NO: 408128 - DNA, 3247 bp, Homo sapiens
cttcccaggaactccgggccgcgttgttcgctggtacctccttctgacttccggtattgctgcggtctgtagggccaatcgggagcctggaattgctttcccggcgctctgattggtgcattcgactaggctgcctgggttcaaaatttcaacgatactgaatgagtcccgcggcgggttggctcgcgcttcgttgtcagatctgaggcgaggctagaaggtgacctgctgagaaaagtggtacaaatactgggaaaaacctgctcttctgcgttaagtgggagacaatgtcacaagttaaaagctcttattcctatgatgccccctcggatttcatcaatttttcatccttggatgatgaaggagatactcaaaacatagattcatggtttgaggagaaggccaatttggagaataagttactggggaagaatggaactggagggctttttcagggcaaaactcctttgagaaaggctaatcttcagcaagctattgtcacacctttgaaaccagttgacaacacttactacaaagaggcagaaaaagaaaatcttgtggaacaatccattccgtcaaatgcttgttcttccctggaagttgaggcagccatatcaagaaaaactccagcccagcctcagagaagatctcttaggctttctgctcagaaggatttggaacagaaagaaaagcatcatgtaaaaatgaaagccaagagatgtgccactcctgtaatcatcgatgaaattctaccctctaagaaaatgaaagtttctaacaacaaaaagaagccagaggaagaaggcagtgctcatcaagatactgctgaaaagaatgcatcttccccagagaaagccaagggtagacatactgtgccttgtatgccacctgcaaagcagaagtttctaaaaagtactgaggagcaagagctggagaagagtatgaaaatgcagcaagaggtggtggagatgcggaaaaagaatgaagaattcaagaaacttgctctggctggaatagggcaacctgtgaagaaatcagtgagccaggtcaccaaatcagttgacttccacttccgcacagatgagcgaatcaaacaacatcctaagaaccaggaggaatataaggaagtgaactttacatctgaactacgaaagcatccttcatctcctgcccgagtgactaagggatgtaccattgttaagcctttcaacctgtcccaaggaaagaaaagaacatttgatgaaacagtttctacatatgtgccccttgcacagcaagttgaagacttccataaacgaacccctaacagatatcatttgaggagcaagaaggatgatattaacctgttaccctccaaatcttctgtgaccaagatttgcagagacccacagactcctgtactgcaaaccaaacaccgtgcacgggctgtgacctgcaaaagtacagcagagctggaggctgaggagctcgagaaattgcaacaatacaaattcaaagcacgtgaacttgatcccagaatacttgaaggtgggcccatcttgcccaagaaaccacctgtgaaaccacccaccgagcctattggctttgatttggaaattgagaaaagaatccaggagcgagaatcaaagaagaaaacagaggatgaacactttgaatttcattccagaccttgccctactaagattttggaagatgttgtgggtgttcctgaaaagaaggtacttccaatcaccgtccccaagtcaccagcctttgcattgaagaacagaattcgaatgcccaccaaagaagatgaggaagaggacgaaccggtagtgataaaagctcaacctgtgccacattatggggtgccttttaagccccaaatcccagaggcaagaactgtggaaatatgccctttctcgtttgattctcgagacaaagaacgtcagttacagaaggagaagaaaataaaagaactgcagaaaggggaggtgcccaagttcaaggcacttcccttgcctcattttgacaccattaacctgccagagaagaaggtaaagaatgtgacccagattgaacctttctgcttggagactgacagaagaggtgctctgaaggcacagacttggaagcaccagctggaagaagaactgagacagcagaaagaagcagcttgtttcaaggctcgtccaaacaccgtcatctctcaggagccctttgttcccaagaaagagaagaaatcagttgctgagggcctttctggttctctagttcaggaaccttttcagctggctactgagaagagagccaaagagcggcaggagctggagaagagaatggctgaggtagaagcccagaaagcccagcagttggaggaggccagactacaggaggaagagcagaaaaaagaggagctggccaggctacggagagaactggtgcataaggcaaatccaatacgcaagtaccagggtctggagataaagtcaagtgaccagcctctgactgtgcctgtatctcccaaattctccactcgattccactgctaaactcagctgtgagctgcggataccgcccggcaatgggacctgctcttaacctcaaacctaggaccgtcttgctttgtcattgggcatggagagaacccatttctccagacttttacctacccgtgcctgagaaagcatacttgacaactgtggactccagttttgttgagaattgttttcttacattactaaggctaataatgagatgtaactcatgaatgtctcgattagactccatgtagttacttcctttaaaccatcagccggccttttatatgggtcttcactctgactagaatttagtctctgtgtcagcacagtgtaatctctattgctattgccccttacgactctcaccctctccccactttttttaaaaattttaaccagaaaataaagatagttaaatcctaagatagagattaagtcatggtttaaatgaggaacaatcagtaaatcagattctgtcctcttctctgcataccgtgaatttatagttaaggatccctttgctgtgagggtagaaaacctcaccaactgcaccagtgaggaagaagactgcgtggattcatggggagcctcacagcagccacgcagcaggctctgggtggggctgccgttaaggcacgttctttccttactggtgctgataacaacagggaaccgtgcagtgtgcattttaagacctggcctggaataaatacgttttgtctttc

SEQ ID NO: 408129 - DNA, 3758 bp, Homo sapiens
cttcccaggaactccgggccgcgttgttcgctggtacctccttctgacttccggtattgctgcggtctgtagggccaatcgggagcctggaattgctttcccggcgctctgattggtgcattcgactaggctgcctgggttcaaaatttcaacgatactgaatgagtcccgcggcgggttggctcgcgcttcgttgtcagatctgaggcgaggctaggtgagccgtgggaagaaaagagggagcagctagggcgcgggtctccctcctcccggagtttggaacggctgaagttcaccttccagcccctagcgccgttcgcgccgctaggcctggcttctgaggcggttgcggtgctcggtcgccgcctaggcggggcagggtgcgagcaggggcttcgggccacgcttctcttggcgacaggattttgctgtgaagtccgtccgggaaacggaggaaaaaaagagttgcgggaggctgtcggctaataacggttcttgatacatatttgccagacttcaagatttcagaaaaggggtgaaagagaagattgcaactttgagtcagacctgtaggcctgatagactgattaaaccacagaaggtgacctgctgagaaaagtggtacaaatactgggaaaaacctgctcttctgcgttaagtgggagacaatgtcacaagttaaaagctcttattcctatgatgccccctcggatttcatcaatttttcatccttggatgatgaaggagatactcaaaacatagattcatggtttgaggagaaggccaatttggagaataagttactggggaagaatggaactggagggctttttcagggcaaaactcctttgagaaaggctaatcttcagcaagctattgtcacacctttgaaaccagttgacaacacttactacaaagaggcagaaaaagaaaatcttgtggaacaatccattccgtcaaatgcttgttcttccctggaagttgaggcagccatatcaagaaaaactccagcccagcctcagagaagatctcttaggctttctgctcagaaggatttggaacagaaagaaaagcatcatgtaaaaatgaaagccaagagatgtgccactcctgtaatcatcgatgaaattctaccctctaagaaaatgaaagtttctaacaacaaaaagaagccagaggaagaaggcagtgctcatcaagatactgctgaaaagaatgcatcttccccagagaaagccaagggtagacatactgtgccttgtatgccacctgcaaagcagaagtttctaaaaagtactgaggagcaagagctggagaagagtatgaaaatgcagcaagaggtggtggagatgcggaaaaagaatgaagaattcaagaaacttgctctggctggaatagggcaacctgtgaagaaatcagtgagccaggtcaccaaatcagttgacttccacttccgcacagatgagcgaatcaaacaacatcctaagaaccaggaggaatataaggaagtgaactttacatctgaactacgaaagcatccttcatctcctgcccgagtgactaagggatgtaccattgttaagcctttcaacctgtcccaaggaaagaaaagaacatttgatgaaacagtttctacatatgtgccccttgcacagcaagttgaagacttccataaacgaacccctaacagatatcatttgaggagcaagaaggatgatattaacctgttaccctccaaatcttctgtgaccaagatttgcagagacccacagactcctgtactgcaaaccaaacaccgtgcacgggctgtgacctgcaaaagtacagcagagctggaggctgaggagctcgagaaattgcaacaatacaaattcaaagcacgtgaacttgatcccagaatacttgaaggtgggcccatcttgcccaagaaaccacctgtgaaaccacccaccgagcctattggctttgatttggaaattgagaaaagaatccaggagcgagaatcaaagaagaaaacagaggatgaacactttgaatttcattccagaccttgccctactaagattttggaagatgttgtgggtgttcctgaaaagaaggtacttccaatcaccgtccccaagtcaccagcctttgcattgaagaacagaattcgaatgcccaccaaagaagatgaggaagaggacgaaccggtagtgataaaagctcaacctgtgccacattatggggtgccttttaagccccaaatcccagaggcaagaactgtggaaatatgccctttctcgtttgattctcgagacaaagaacgtcagttacagaaggagaagaaaataaaagaactgcagaaaggggaggtgcccaagttcaaggcacttcccttgcctcattttgacaccattaacctgccagagaagaaggtaaagaatgtgacccagattgaacctttctgcttggagactgacagaagaggtgctctgaaggcacagacttggaagcaccagctggaagaagaactgagacagcagaaagaagcagcttgtttcaaggctcgtccaaacaccgtcatctctcaggagccctttgttcccaagaaagagaagaaatcagttgctgagggcctttctggttctctagttcaggaaccttttcagctggctactgagaagagagccaaagagcggcaggagctggagaagagaatggctgaggtagaagcccagaaagcccagcagttggaggaggccagactacaggaggaagagcagaaaaaagaggagctggccaggctacggagagaactggtgcataaggcaaatccaatacgcaagtaccagggtctggagataaagtcaagtgaccagcctctgactgtgcctgtatctcccaaattctccactcgattccactgctaaactcagctgtgagctgcggataccgcccggcaatgggacctgctcttaacctcaaacctaggaccgtcttgctttgtcattgggcatggagagaacccatttctccagacttttacctacccgtgcctgagaaagcatacttgacaactgtggactccagttttgttgagaattgttttcttacattactaaggctaataatgagatgtaactcatgaatgtctcgattagactccatgtagttacttcctttaaaccatcagccggccttttatatgggtcttcactctgactagaatttagtctctgtgtcagcacagtgtaatctctattgctattgccccttacgactctcaccctctccccactttttttaaaaattttaaccagaaaataaagatagttaaatcctaagatagagattaagtcatggtttaaatgaggaacaatcagtaaatcagattctgtcctcttctctgcataccgtgaatttatagttaaggatccctttgctgtgagggtagaaaacctcaccaactgcaccagtgaggaagaagactgcgtggattcatggggagcctcacagcagccacgcagcaggctctgggtggggctgccgttaaggcacgttctttccttactggtgctgataacaacagggaaccgtgcagtgtgcattttaagacctggcctggaataaatacgttttgtctttcaaaaaaaaaaaaaaagggggggggatttaaaattccctgggggggccaagttaagcgttccaggttcttgacaaaggggccctaaggagtgataaaaggaggaagggcggcgttaaagtggatggaaagc

SEQ ID NO: 408130 - DNA, 3653 bp, Homo sapiens
cttcccaggaactccgggccgcgttgttcgctggtacctccttctgacttccggtattgctgcggtctgtagggccaatcgggagcctggaattgctttcccggcgctctgattggtgcattcgactaggctgcctgggttcaaaatttcaacgatactgaatgagtcccgcggcgggttggctcgcgcttcgttgtcagatctgaggcgaggctaggtgagccgtgggaagaaaagagggagcagctagggcgcgggtctccctcctcccggagtttggaacggctgaagttcaccttccagcccctagcgccgttcgcgccgctaggcctggcttctgaggcggttgcggtgctcggtcgccgcctaggcggggcagggtgcgagcaggggcttcgggccacgcttctcttggcgacaggattttgctgtgaagtccgtccgggaaacggaggaaaaaaagagttgcgggaggctgtcggctaataacggttcttgatacatatttgccagacttcaagatttcagaaaaggggtgaaagagaagattgcaactttgagtcagacctgtaggcctgatagactgattaaaccacagaaggtgacctgctgagaaaagtggtacaaatactgggaaaaacctgctcttctgcgttaagtgggagacaatgtcacaagttaaaagctcttattcctatgatgccccctcggatttcatcaatttttcatccttggatgatgaaggagatactcaaaacatagattcatggtttgaggagaaggccaatttggagaataagttactggggaagaatggaactggagggctttttcagggcaaaactcctttgagaaaggctaatcttcagcaagctattgtcacacctttgaaaccagttgacaacacttactacaaagaggcagaaaaagaaaatcttgtggaacaatccattccgtcaaatgcttgttcttccctggaagttgaggctgggctggagtttttctgatatggctgcctcaacttccagggaagaactccagcccagcctaagatctcttaggctttctgctcagaaggatttggaacagaaagaaaagcatcatgtaaaaatgaaagccaagagatgtgccactcctgtaatcatcgatgaaattctaccctctaagaaaatgaaagtttctaacaacaaaaagaagccagaggaagaaggcagtgctcatcaagatactgctgaaaagaatgcatcttccccagagaaagccaagggtagacatactgtgccttgtatgccacctgcaaagcagaagtttctaaaaagtactgaggagcaagagctggagaagagtatgaaaatgcagcaagaggtggtggagatgcggaaaaagaatgaagaattcaagaaacttgctctggctggaatagggcaacctgtgaagaaatcagtgagccaggtcaccaaatcagttgacttccacttccgcacagatgagcgaatcaaacaacatcctaagaaccaggaggaatataaggaagtgaactttacatctgaactacgaaagcatccttcatctcctgcccgagtgactaagggatgtaccattgttaagcctttcaacctgtcccaaggaaagaaaagaacatttgatgaaacagtttctacatatgtgccccttgcacagcaagttgaagacttccataaacgaacccctaacagatatcatttgaggagcaagaaggatgatattaacctgttaccctccaaatcttctgtgaccaagatttgcagagacccacagactcctgtactgcaaaccaaacaccgtgcacgggctgtgacctgcaaaagtacagcagagctggaggctgaggagctcgagaaattgcaacaatacaaattcaaagcacgtgaacttgatcccagaatacttgaaggtgggcccatcttgcccaagaaaccacctgtgaaaccacccaccgagcctattggctttgatttggaaattgagaaaagaatccaggagcgagaatcaaagaagaaaacagaggatgaacactttgaatttcattccagaccttgccctactaagattttggaagatgttgtgggtgttcctgaaaagaaggtacttccaatcaccgtccccaagtcaccagcctttgcattgaagaacagaattcgaatgcccaccaaagaagatgaggaagaggacgaaccggtagtgataaaagctcaacctgtgccacattatggggtgccttttaagccccaaatcccagaggcaagaactgtggaaatatgccctttctcgtttgattctcgagacaaagaacgtcagttacagaaggagaagaaaataaaagaactgcagaaaggggaggtgcccaagttcaaggcacttcccttgcctcattttgacaccattaacctgccagagaagaaggtaaagaatgtgacccagattgaacctttctgcttggagactgacagaagaggtgctctgaaggcacagacttggaagcaccagctggaagaagaactgagacagcagaaagaagcagcttgtttcaaggctcgtccaaacaccgtcatctctcaggagccctttgttcccaagaaagagaagaaatcagttgctgagggcctttctggttctctagttcaggaaccttttcagctggctactgagaagagagccaaagagcggcaggagctggagaagagaatggctgaggtagaagcccagaaagcccagcagttggaggaggccagactacaggaggaagagcagaaaaaagaggagctggccaggctacggagagaactggtgcataaggcaaatccaatacgcaagtaccagggtctggagataaagtcaagtgaccagcctctgactgtgcctgtatctcccaaattctccactcgattccactgctaaactcagctgtgagctgcggataccgcccggcaatgggacctgctcttaacctcaaacctaggaccgtcttgctttgtcattgggcatggagagaacccatttctccagacttttacctacccgtgcctgagaaagcatacttgacaactgtggactccagttttgttgagaattgttttcttacattactaaggctaataatgagatgtaactcatgaatgtctcgattagactccatgtagttacttcctttaaaccatcagccggccttttatatgggtcttcactctgactagaatttagtctctgtgtcagcacagtgtaatctctattgctattgccccttacgactctcaccctctccccactttttttaaaaattttaaccagaaaataaagatagttaaatcctaagatagagattaagtcatggtttaaatgaggaacaatcagtaaatcagattctgtcctcttctctgcataccgtgaatttatagttaaggatccctttgctgtgagggtagaaaacctcaccaactgcaccagtgaggaagaagactgcgtggattcatggggagcctcacagcagccacgcagcaggctctgggtggggctgccgttaaggcacgttctttccttactggtgctgataacaacagggaaccgtgcagtgtgcattttaagacctggcctggaataaatacgttttgtctttc

SEQ ID NO: 408131 - DNA, 3875 bp, Homo sapiens
cttcccaggaactccgggccgcgttgttcgctggtacctccttctgacttccggtattgctgcggtctgtagggccaatcgggagcctggaattgctttcccggcgctctgattggtgcattcgactaggctgcctgggttcaaaatttcaacgatactgaatgagtcccgcggcgggttggctcgcgcttcgttgtcagatctgaggcgaggctaggtgagccgtgggaagaaaagagggagcagctagggcgcgggtctccctcctcccggagtttggaacggctgaagttcaccttccagcccctagcgccgttcgcgccgctaggcctggcttctgaggcggttgcggtgctcggtcgccgcctaggcggggcagggtgcgagcaggggcttcgggccacgcttctcttggcgacaggattttgctgtgaagtccgtccgggaaacggaggaaaaaaagagttgcgggaggctgtcggctaataacggttcttgatacatatttgccagacttcaagatttcagaaaaggggtgaaagagaagattgcaactttgagtcagacctgtaggcctgatagactgattaaaccacagaaggtgacctgctgagaaaagtggtacaaatactgggaaaaacctgctcttctgcgttaagtgggagacaatgtcacaagttaaaagctcttattcctatgatgccccctcggatttcatcaatttttcatccttggatgatgaaggagatactcaaaacatagattcatggtttgaggagaaggccaatttggagaataagttactggggaagaatggaactggagggctttttcagggcaaaactcctttgagaaaggctaatcttcagcaagctattgtcacacctttgaaaccagttgacaacacttactacaaagaggcagaaaaagaaaatcttgtggaacaatccattccgtcaaatgcttgttcttccctggaagttgaggcagccatatcaagaaaaactccagcccagcctcagagaagatctcttaggctttctgctcagaaggatttggaacagaaagaaaagcatcatgtaaaaatgaaagccaagagatgtgccactcctgtaatcatcgatgaaattctaccctctaagaaaatgaaagtttctaacaacaaaaagaagccagaggaagaaggcagtgctcatcaagatactgctgaaaagaatgcatcttccccagagaaagccaagggtagacatactgtgccttgtatgccacctgcaaagcagaagtttctaaaaagtactgaggagcaagagctggagaagagtatgaaaatgcagcaagaggtggtggagatgcggaaaaagaatgaagaattcaagaaacttgctctggctggaatagggcaacctgtgaagaaatcagtgagccaggtcaccaaatcagttgacttccacttccgcacagatgagcgaatcaaacaacatcctaagaaccaggaggaatataaggaagtgaactttacatctgaactacgaaagcatccttcatctcctgcccgagtgactaagggatgtaccattgttaagcctttcaacctgtcccaaggaaagaaaagaacatttgatgaaacagtttctacatatgtgccccttgcacagcaagttgaagacttccataaacgaacccctaacagatatcatttgaggagcaagaaggatgatattaacctgttaccctccaaatcttctgtgaccaagatttgcagagacccacagactcctgtactgcaaaccaaacaccgtgcacgggctgtgacctgcaaaagtacagcagagctggaggctgaggagctcgagaaattgcaacaatacaaattcaaagcacgtgaacttgatcccagaatacttgaaggtgggcccatcttgcccaagaaaccacctgtgaaaccacccaccgagcctattggctttgatttggaaattgagaaaagaatccaggagcgagaatcaaagaagaaaacagaggatgaacactttgaatttcattccagaccttgccctactaagattttggaagatgttgtgggtgttcctgaaaagaaggtacttccaatcaccgtccccaagtcaccagcctttgcattgaagaacagaattcgaatgcccaccaaagaagatgaggaagaggacgaaccggtagtgataaaagctcaacctgtgccacattatggggtgccttttaagccccaaatcccagaggcaagaactgtggaaatatgccctttctcgtttgattctcgagacaaagaacgtcagttacagaaggagaagaaaataaaagaactgcagaaaggggaggtgcccaagttcaaggcacttcccttgcctcattttgacaccattaacctgccagagaagaaggtaaagaatgtgacccagattgaacctttctgcttggagactgacagaagaggtgctctgaaggcacagacttggaagcaccagctggaagaagaactgagacagcagaaagaagcagcttgtttcaaggctcgtccaaacaccgtcatctctcaggagccctttgttcccaagaaagagaagaaatcagttgctgagggcctttctggttctctagttcaggaaccttttcagctggctactgagaagagagccaaagagcggcaggagctggagaagagaatggctgaggtagaagcccagaaagcccagcagttggaggaggccagactacaggaggaagagcagaaaaaagaggagctggccaggctacggagagaactggtgcataaggcaaatccaatacgcaagtaccagggtctggagataaagtcaagtgaccagcctctgactgtgcctgtatctcccaaattctccactcgattccactgctaaactcagctgtgagctgcggataccgcccggcaatgggacctgctcttaacctcaaacctaggaccgtcttgctttgtcattgggcatggagagaacccatttctccagacttttacctacccgtgcctgagaaagcatacttgacaactggaggtgacagttgtcaagtatgctttctcaggcacgggtaggtaaaagtctggagaaatgggttctctccatgcccaatgacaaagcaagacggtcctaggtttgaggttaagagcaggtcccattgccgggcggtatccgagctcacagctgaagttacagtggaatcgagtggagaattgggagatacaggcacagtcagaggctggtcacttgactttatctccagaccctggtacttgcgtattggactccagttttgttgagaattgttttcttacattactaaggctaataatgagatgtaactcatgaatgtctcgattagactccatgtagttacttcctttaaaccatcagccggccttttatatgggtcttcactctgactagaatttagtctctgtgtcagcacagtgtaatctctattgctattgccccttacgactctcaccctctccccactttttttaaaaattttaaccagaaaataaagatagttaaatcctaagatagagattaagtcatggtttaaatgaggaacaatcagtaaatcagattctgtcctcttctctgcataccgtgaatttatagttaaggatccctttgctgtgagggtagaaaacctcaccaactgcaccagtgaggaagaagactgcgtggattcatggggagcctcacagcagccacgcagcaggctctgggtggggctgccgttaaggcacgttctttccttactggtgctgataacaacagggaaccgtgcagtgtgcattttaagacctggcctggaataaatacgttttgtctttc

SEQ ID NO: 408132 - DNA, 3109 bp, Homo sapiens
  misc_feature (3050)..(3050): n is a, c, g, or t
cttcccaggaactccgggccgcgttgttcgctggtacctccttctgacttccggtattgctgcggtctgtagggccaatcgggagcctggaattgctttcccggcgctctgattggtgcattcgactaggctgcctgggttcaaaatttcaacgatactgaatgagtcccgcggcgggttggctcgcgcttcgttgtcagatctgaggcgaggctaggtgagccgtgggaagaaaagagggagcagctagggcgcgggtctccctcctcccggagtttggaacggctgaagttcaccttccagcccctagcgccgttcgcgccgctaggcctggcttctgaggcggttgcggtgctcggtcgccgcctaggcggggcagggtgcgagcaggggcttcgggccacgcttctcttggcgacaggattttgctgtgaagtccgtccgggaaacggaggaaaaaaagagttgcgggaggctgtcggctaataacggttcttgatacatatttgccagacttcaagatttcagaaaaggggtgaaagagaagattgcaactttgagtcagacctgtaggcctgatagactgattaaaccacagaaggtgacctgctgagaaaagtggtacaaatactgggaaaaacctgctcttctgcgttaagtgggagacaatgtcacaagttaaaagctcttattcctatgatgccccctcggatttcatcaatttttcatccttggatgatgaaggagatactcaaaacatagattcatggtttgaggagaaggccaatttggagaataagttactggggaagaatggaactggagggctttttcagggcaaaactcctttgagaaaggctaatcttcagcaagctattgtcacacctttgaaaccagttgacaacacttactacaaagaggcagaaaaagaaaatcttgtggaacaatccattccgtcaaatgcttgttcttccctggaagttgaggcagccatatcaagaaaaactccagcccagcctcagagaagatctcttaggctttctgctcagaaggatttggaacagaaagaaaagcatcatgtaaaaatgaaagccaagagatgtgccactcctgtaatcatcgatgaaattctaccctctaagaaaatgaaagtttctaacaacaaaaagaagccagaggaagaaggcagtgctcatcaagatactgctgaaaagaatgcatcttccccagagaaagccaagggtagacatactgtgccttgtatgccacctgcaaagcagaagtttctaaaaagtactgaggagcaagagctggagaagagtatgaaaatgcagcaagaggtggtggagatgcggaaaaagaatgaagaattcaagaaacttgctctggctggaatagggcaacctgtgaagaaatcagtgagccaggtcaccaaatcagttgacttccacttccgcacagatgagcgaatcaaacaacatcctaagaaccaggaggaatataaggaagtgaactttacatctgaactacgaaagcatccttcatctcctgcccgagtgactaagggatgtaccattgttaagcctttcaacctgtcccaaggaaagaaaagaacatttgatgaaacagtttctacatatgtgccccttgcacagcaagttgaagacttccataaacgaacccctaacagatatcatttgaggagcaagaaggatgatattaacctgttaccctccaaatcttctgtgaccaagatttgcagagacccacagactcctgtactgcaaaccaaacaccgtgcacgggctgtgacctgcaaaagtacagcagagctggaggctgaggagctcgagaaattgcaacaatacaaattcaaagcacgtgaacttgatcccagaatacttgaaggtgggcccatcttgcccaagaaaccacctgtgaaaccacccaccgagcctattggctttgatttggaaattgagaaaagaatccaggagcgagaatcaaagaagaaaacagaggatgaacactttgaatttcattccagaccttgccctactaagattttggaagatgttgtgggtgttcctgaaaagaaggtacttccaatcaccgtccccaagtcaccagcctttgcattgaagaacagaattcgaatgcccaccaaagaagatgaggaagaggacgaaccggtagtgataaaagctcaacctgtgccacattatggggtgccttttaagccccaaatcccagaggcaagaactgtggaaatatgccctttctcgtttgattctcgagacaaagaacgtcagttacagaaggagaagaaaataaaagaactgcagaaaggggaggtgcccaagttcaaggcacttcccttgcctcattttgacaccattaacctgccagagaagaaggtaaagaatgtgacccagattgaacctttctgcttggagactgacagaagaggtgctctgaaggcacagacttggaagcaccagctggaagaagaactgagacagcagaaagaagcagcttgtttcaaggctcgtccaaacaccgtcatctctcaggagccctttgttcccaagaaagagaagaaatcagttgctgagggcctttctggttctctagttcaggaaccttttcagctggctactgagaagagagccaaagagcggcaggagctggagaagagaatggctgaggtagaagcccagaaagcccagcagttggaggaggccagactacaggaggaagagcagaaaaaagaggagctggccaggctacggagagaactggtgcataaggcaaatccaatacgcaagtaccagggtctggagataaagtcaagtgaccagcctctgactgtgcctgtatctcccaaattctccactcgattccactgctaaactcagctgtgagctgcggataccgcccggcaatgggacctgctcttaacctcaaacctaggacgcgccatcgtgcgttcaagcgcacgatggcgcgttcctccggggccccgccttcttttctgggccgccttccgnaacctcctgggggagcccctctgtttctttctcccaggaacgggtccttctcggggggc

SEQ ID NO: 408133 - DNA, 3983 bp, Homo sapiens
cttcccaggaactccgggccgcgttgttcgctggtacctccttctgacttccggtattgctgcggtctgtagggccaatcgggagcctggaattgctttcccggcgctctgattggtgcattcgactaggctgcctgggttcaaaatttcaacgatactgaatgagtcccgcggcgggttggctcgcgcttcgttgtcagatctgaggcgaggctaggtgagccgtgggaagaaaagagggagcagctagggcgcgggtctccctcctcccggagtttggaacggctgaagttcaccttccagcccctagcgccgttcgcgccgctaggcctggcttctgaggcggttgcggtgctcggtcgccgcctaggcggggcagggtgcgagcaggggcttcgggccacgcttctcttggcgacaggattttgctgtgaagtccgtccgggaaacggaggaaaaaaagagttgcgggaggctgtcggctaataacggttcttgatacatatttgccagacttcaagatttcagaaaaggggtgaaagagaagattgcaactttgagtcagacctgtaggcctgatagactgattaaaccacagaaggtgacctgctgagaaaagtggtacaaatactgggaaaaacctgctcttctgcgttaagtgggagacaatgtcacaagttaaaagctcttattcctatgatgccccctcggatttcatcaatttttcatccttggatgatgaaggagatactcaaaacatagattcatggtttgaggagaaggccaatttggagaataagttactggggaagaatggaactggagggctttttcagggcaaaactcctttgagaaaggctaatcttcagcaagctattgtcacacctttgaaaccagttgacaacacttactacaaagaggcagaaaaagaaaatcttgtggaacaatccattccgtcaaatgcttgttcttccctggaagttgaggcagccatatcaagaaaaactccagcccagcctcagagaagatctcttaggctttctgctcagaaggatttggaacagaaagaaaagcatcatgtaaaaatgaaagccaagagatgtgccactcctgtaatcatcgatgaaattctaccctctaagaaaatgaaagtttctaacaacaaaaagaagccagaggaagaaggcagtgctcatcaagatactgctgaaaagaatgcatcttccccagagaaagccaagggtagacatactgtgccttgtatgccacctgcaaagcagaagtttctaaaaagtactgaggagcaagagctggagaagagtatgaaaatgcagcaagaggtggtggagatgcggaaaaagaatgaagaattcaagaaacttgctctggctggaatagggcaacctgtgaagaaatcagtgagccaggtcaccaaatcagttgacttccacttccgcacagatgagcgaatcaaacaacatcctaagaaccaggaggaatataaggaagtgaactttacatctgaactacgaaagcatccttcatctcctgcccgagtgactaagggatgtaccattgttaagcctttcaacctgtcccaaggaaagaaaagaacatttgatgaaacagtttctacatatgtgccccttgcacagcaagttgaagacttccataaacgaacccctaacagatatcatttgaggagcaagaaggatgatattaacctgttaccctccaaatcttctgtgaccaagatttgcagagacccacagactcctgtactgcaaaccaaacaccgtgcacgggctgtgacctgcaaaagtacagcagagctggaggctgaggagctcgagaaattgcaacaatacaaattcaaagcacgtgaacttgatcccagaatacttgaaggtgggcccatcttgcccaagaaaccacctgtgaaaccacccaccgagcctattggctttgatttggaaattgagaaaagaatccaggagcgagaatcaaagaagaaaacagaggatgaacactttgaatttcattccagaccttgccctactaagattttggaagatgttgtgggtgttcctgaaaagaaggtacttccaatcaccgtccccaagtcaccagcctttgcattgaagaacagaattcgaatgcccaccaaagaagatgaggaagaggacgaaccggtagtgataaaagctcaacctgtgccacattatggggtgccttttaagccccaaatcccagaggcaagaactgtggaaatatgccctttctcgtttgattctcgagacaaagaacgtcagttacagaaggagaagaaaataaaagaactgcagaaaggggaggtgcccaagttcaaggcacttcccttgcctcattttgacaccattaacctgccagagaagaaggtaaagaatgtgacccagattgaacctttctgcttggagactgacagaagaggtgctctgaaggcacagacttggaagcaccagctggaagaagaactgagacagcagaaagaagcagcttgtttcaaggctcgtccaaacaccgtcatctctcaggagccctttgttcccaagaaagagaagaaatcagttgctgagggcctttctggttctctagttcaggaaccttttcagctggctactgagaagagagccaaagagcggcaggagctggagaagagaatggctgaggtagaagcccagaaagcccagcagttggaggaggccagactacaggaggaagagcagaaaaaagaggagctggccaggctacggagagaactggtgcataaggcaaatccaatacgcaagtaccagggtctggagataaagtcaagtgaccagcctctgactgtgcctgtatctcccaaattctccactcgattccactgccgggcggtatccgagctcacagctgagaattatagcagtgggacctagcggataccgcccggcaatgggacctgcatcttaacctcaaaacaatgacaaagcaagacggaccatagagaaacgccgaggaacccaggcatgaggcaggcagagcatcactggcaagaacaaagccaacggagccaagaccgagagggacacaacggacaacacaacagacagaagacgatactgggacagatgagacatcccgatgaacaccacaacaatacatacaacgaaacaatcatgaacgacacgaaaggactgagcccaaagcatatcagggacccaatgagaatgcatggaagaacacacaagaaaccaaaaaaggccgtaacagttacattggagagacaccaacagaaacaacaccagagaaacaaagagagaacaacgatcaaatgacagatgcacacacagaagtatcaaaatagaaagaacaaaaacaacaatgatagcaaaaggcaccacatgaggatagaccaaagagggaacaaaaaatacaagatatcatacccagaaatcacaccaccagtccacctgaatgaaagaaatcggcagcaaagaaatatcgaagatcacgcacacaaagtaacagcacaaaaacggaaacagatgacgagcaagaaaaagagacacacccagtatgaaaaaaagacaagagaaacaaaatcacactaggagcaacacagaaaataagaaagcacacacatgaggatacaagaaaggcacacccgacaaggaagagacacaacaagaagagagaaagaagaagacagagaccaaatgaagagataacgacacagaacaaacgaacagagagtacaccagacatggcagagcaacagaaaaaggctagaagaggggccagacaagtcaagaaacaaaagggtcagcaaagacaatcaagacaatagaaggaaaaacgaaacaaatacaacacaaagaactaagcaaaagagagacaagaaacatcggacagaaaggacacatagacagatagaaaagagatagaggaagacaagaaagacg

SEQ ID NO: 408134 - DNA, 2395 bp, Homo sapiens
cttcccaggaactccgggccgcgttgttcgctggtacctccttctgacttccggtattgctgcggtctgtagggccaatcgggagcctggaattgctttcccggcgctctgattggtgcattcgactaggctgcctgggttcaaaatttcaacgatactgaatgagtcccgcggcgggttggctcgcgcttcgttgtcagatctgaggcgaggctaggtgagccgtgggaagaaaagagggagcagctagggcgcgggtctccctcctcccggagtttggaacggctgaagttcaccttccagcccctagcgccgttcgcgccgctaggcctggcttctgaggcggttgcggtgctcggtcgccgcctaggcggggcagggtgcgagcaggggcttcgggccacgcttctcttggcgacaggattttgctgtgaagtccgtccgggaaacggaggaaaaaaagagttgcgggaggctgtcggctaataacggttcttgatacatatttgccagacttcaagatttcagaaaaggggtgaaagagaagattgcaactttgagtcagacctgtaggcctgatagactgattaaaccacagaaggtgacctgctgagaaaagtggtacaaatactgggaaaaacctgctcttctgcgttaagtgggagacaatgtcacaagttaaaagctcttattcctatgatgccccctcggatttcatcaatttttcatccttggatgatgaaggagatactcaaaacatagattcatggtttgaggagaaggccaatttggagaataagttactggggaagaatggaactggagggctttttcagggcaaaactcctttgagaaaggctaatcttcagcaagctattgtcacacctttgaaaccagttgacaacacttactacaaagaggcagaaaaagaaaatcttgtggaacaatccattccgtcaaatgcttgttcttccctggaagttgaggcagccatatcaagaaaaactccagcccagcctcagagaagatctcttaggctttctgctcagaaggatttggaacagaaagaaaagcatcatgtaaaaatgaaagccaagagatgtgccactcctgtaatcatcgatgaaattctaccctctaagaaaatgaaagtttctaacaacaaaaagaagccagaggaagaaggcagtgctcatcaagatactgctgaaaagaatgcatcttccccagagaaagccaagggtagacatactgtgccttgtatgccacctgcaaagcagaagtttctaaaaagtactgaggagcaagagctggagaagagtatgaaaatgcagcaagaggtggtggagatgcggaaaaagaatgaagaattcaagaaacttgctctggctggaatagggcaacctgtgaagaaatcagtgagccaggtcaccaaatcagttgacttccacttccgcacagatgagcgaatcaaacaacatcctaagaaccaggaggaatataaggaagtgaactttacatctgaactacgaaagcatccttcatctcctgcccgagtgactaagggatgtaccattgttaagcctttcaacctgtcccaaggaaagaaaagaacatttgatgaaacagtttctacatatgtgccccttgcacagcaagttgaagacttccataaacgaacccctaacagatatcatttgaggagcaagaaggatgatattaacctgttaccctccaaatcttctgtgaccaagatttgcagagacccacagactcctgtactgcaaaccaaacaccgtgcacgggctgtgacctgcaaaagtacagcagagctggaggctgaggagctcgagaaattgcaacaatacaaattcaaagcacgtgaacttgatcccagaatacttgaaggtgggcccatcttgcccaagaaaccacctgtgaaaccacccaccgagcctattggctttgatttggaaattgagaaaagaatccaggagcgagaatcaaagaagaaaacagaggatgaacactttgaatttcattccagaccttgccctactaagattttggaagatgttgtggtaaggttgaggctatgtgtgctggcagaagtgtactgctcatgaccagatatccacccattcacacaaaagtttgggtagatattatgagcagggcatcatattaggaactgcaggtgataaagagacttatcggaagtggattttgcttttagttaactcaaagtctggtatgggagacaatatatgtgtgaataatagaaaatggacagaagtgttctgagagagatgacagttaaaataggaattcagaggagaaaatggtttcttccagatagaaagttcagggtgtgctttgtagagaggcacatttg

SEQ ID NO: 408135 - DNA, 1115 bp, Homo sapiens
cttcccaggaactccgggccgcgttgttcgctggtacctccttctgacttccggtattgctgcggtctgtagggccaatcgggagcctggaattgctttcccggcgctctgattggtgcattcgactaggctgcctgggttcaaaatttcaacgatactgaatgagtcccgcggcgggttggctcgcgcttcgttgtcagatctgaggcgaggctaggtgagccgtgggaagaaaagagggagcagctagggcgcgggtctccctcctcccggagtttggaacggctgaagttcaccttccagcccctagcgccgttcgcgccgctaggcctggcttctgaggcggttgcggtgctcggtcgccgcctaggcggggcagggtgcgagcaggggcttcgggccacgcttctcttggcgacaggattttgctgtgaagtccgtccgggaaacggaggaaaaaaagagttgcgggaggctgtcggctaataacggttcttgatacatatttgccagacttcaagatttcagaaaaggggtgaaagagaagattgcaactttgagtcagacctgtaggcctgatagactgattaaaccacagaaggtgacctgctgagaaaagtggtacaaatactgggaaaaacctgctcttctgcgttaagtgggagacaatgtcacaagttaaaagctcttattcctatgatgccccctcggatttcatcaatttttcatccttggatgatgaaggagatactcaaaacatagattcatggtttgaggagaaggccaatttggagaataagttactggggaagaatggaactggagggctttttcagggcaaaactcctttgagaaaggctaatcttcagcaagctattgtcacacctttgaaaccagttgacaacacttactacaaagaggcagaaaaagaaaatcttgtggaacaatccattccgtcaaatgcttgttcttccctggaagttgaggcagccatatcaagaaaaactccagcccagcctcagagctcaaggggtaccttggtggatatttcagtacttaaaaccagactgtaatcataacctccctctgtgtggcatcaataaatagccaaactc

SEQ ID NO: 408136 - DNA, 845 bp, Homo sapiens
  misc_feature (29)..(29): n is a, c, g, or t
gtattaaaagcgagagcaattcaaccccntcatcctttcatctcaaatataagcataacccctctatcaaattctcaatactgaaaaatgaagcctaaaatgaagtattcaaccaacaaaatttccacagcaaagtggaagaacacagcaagcaaagccttgtgtttcaagctgggaagtaaggacttaagttatctctgaatgttttacgcactatttttatctgttatcaaatatttatactccaatgtttatacatgctatcttatcaaaatctactaagaatacaagaactaaaataaaaagagatggcacataagggtataatacagcagactggttttgaaccaaccatatatagccaactttggcatatttgatacatcaccaggcaggaatagctgagataatctgaacctgtgaatagtgataaacttaattatagccttttatatcaaccactttttgctccacacacctcctgctgccaaacccccaaaaccttttccctgataaactagcaaacttttaagcaggtccacttttattcaacaaatattcattaagacctttggtggtatcaggcatgtggtcttaacttgcgactactgatgaagaagagaataacagatgaagatatttgaataatcatcttagtcaatttgtgttaccatagaaatatacctgaagctgggtaatttaaccctttgtccatttagaaaaaaaaagcgttagattgcttccccagctcatttaattccacctagccatcctcctagaagcttaagcgaatatgaactgcatatgcaaactaaaactataggaggtgtatgtgtaggtgccag

SEQ ID NO: 408137 - DNA, 3253 bp, Homo sapiens
aacacagagctgcagctcttcagggaagaaatcaaaacaagatcacaagaatactgaaaaatgaagcctaaaatgaagtattcaaccaacaaaatttccacagcaaagtggaagaacacagcaagcaaagccttgtgtttcaagctgggaaaatcccaacagaaggccaaagaagtttgccccatgtactttatgaagctccgctctggccttatgataaaaaaggaggcctgttactttaggagagaaaccaccaaaaggccttcactgaaaacaggtagaaagcacaaaagacatctggtactcgctgcctgtcaacagcagtctactgtggagtgctttgcctttggtatatcaggggtccagaaatatactagagcacttcatgattcaagtatcacaggaatttcacctattacagagtatcttgcttctctaagcacatacaatgatcaatccattacttttgctttggaggatgaaagttatgagatatatgttgaagacttgaaaaaagatgaaaagaaaggtagattattttctttttctataataatgtaataatgactaataaaagtaaaacattttaataaatctaccaaactttaaacaatggattaacttagacatggcaaacaggtcatgctgtgtgctaactctaatgcattggcagtgggtgcctgaatccacttctatgtcaagatggattcagaagctttgtcaggttcatcagagaagaatgctgacattgaaatgcagtatctgttgtgaaagatggaaagaggggccacatgtatttgctatctctaaattatccaccagatctttctagccctattagtatcaccaaagtacaacctttatgccactgctatgaaaaatattttaaatattttaataacaactatattggagaattcatcagagcatattcgtgcatttttgagacctttctcaaaaccacaaaagatttgtttttattgatatataataaaaggggaggatattttctgatgttatgtgtgtgttggaactgaaaacttaacaaaattgtgtctcaccagagggattttatgcattctctttcagataaggtgttactgagttactatgagtctcaacacccctcaaatgaatcaggtgacggtgttgatggtaagatgttaatggtaaccctgagtcctacaaaagacttctggttgcatgccaacaacaaggaacactctgtggagctccataagtgtgaaaaaccactgccagaccaggccttctttgtccttcataatatgcactccaactgtgtttcatttgaatgcaagactgatcctggagtgtttataggtgtaaaggataatcatcttgctctgattaaagtagactcttctgagaatttgtgtactgaaaatatcttgtttaagctctctgaaacttagttgatggaaacctgtgagtcttgggttgagtacccaaatgctaccactggagaaggaatgagagataaagaaagagacaggtgacatctaagggaaatgaagagtgcttagcatgtgtggaatgttttccatattatgtataaaaatattttttctaatcctccagttattcttttatttccctctgtataactgcatcttcaatacaagtatcagtatattaaatagggtattggtaaagaaacggtcaacattctaaagagatacagtctgacctttacttttctctagtttcagtccagaaagaacttcatatttagagctaaggccactgaggaaagagccatagcttaagtctctctgtagacagggatccattttaaagagctacttagagaaataattttccacagttccaaacgataggctcaaacactagagctgctagtaaaaagaagaccagatgcttcacagaattatcattttttcaactggaataaaacaccaggtttgtttgtagatgtcttaggcaacactcagagcagatctcccttactgtcaggggatatggaacttcaaaggcccacatggcaagccaggtaacataaatgtgtgaaaaagtaaagataactaaaaaatttagaaaaataaatccagtatttgtaaagtgaataacttcatttctaattgtttaatttttaaaattctgatttttatatattgagtttaagcaaggcattcttacacgaggaagtgaagtaaattttagttcagacataaaatttcacttattaggaatatgtaacatgctaaaacttttttttttttaaagagtactgagtcacaacatgttttagagcatccaagtaccatataatccaactatcatggtaaggccagaaatcttctaacctaccagagcctagatgagacaccgaattaacattaaaatttcagtaactgactgtccctcatgtccatggcctaccatcccttctgaccctggcttccagggacctatgtcttttaatactcactgtcacattgggcaaagttgcttctaatccttatttcccatgtgcacaagtctttttgtattccagcttcctgataacactgcttactgtggaatattcatttgacatctgtctcttttcatttcttttaactaccatgcccttgatatatcttttgcacctgctgaacttcatttctgtatcacctgacctctggatgccaaaacgtttattctgctttgtctgttgtagaattttagataaagctattaatggcaatatttttttgctaaacgtttttgttttttactgtcactagggcaataaaatttatactcaaccatataataacattttttaactactaaaggagtagtttttattttaaagtcttagcaatttctattacaacttttcttagacttaacacttatgataaatgactaacatagtaacagaatctttatgaaatatgaccttttctgaaaatacatacttttacatttctactttattgagacctattagatgtaagtgctagtagaatataagataaaagaggctgagaattaccatacaagggtattacaactgtaaaacaatttatctttgtttcattgttctgtcaataattgttaccaaagagataaaaataaaagcagaatgtatatcatcccatctgaaaaacactaattattgacatgtgcatctgtgcaataaacttaaaatgattattaaataatcaaatatatctacattgtttatattattgaataaagtatattttccaaatgtaaaaaaaac

SEQ ID NO: 408138 - DNA, 3161 bp, Homo sapiens
aagaaatcataatcacgatcacagaatactgaaaaatgaagcctaaaatgaagtattcaaccaacaaaatttccacagcaaagtggaagaacacagcaagcaaagccttgtgtttcaagctgggaaaatcccaacagaaggccaaagaagtttgccccatgtactttatgaagctccgctctggccttatgataaaaaaggaggcctgttactttaggagagaaaccaccaaaaggccttcactgaaaacagctttggtatatcaggggtccagaaatatactagagcacttcatgattcaagtatcacaggaatttcacctattacagagtatcttgcttctctaagcacatacaatgatcaatccattacttttgctttggaggatgaaagttatgagatatatgttgaagacttgaaaaaagatgaaaagaaaggtagattattttctttttctataataatgtaataatgactaataaaagtaaaacattttaataaatctaccaaactttaaacaatggattaacttagacatggcaaacaggtcatgctgtgtgctaactctaatgcattggcagtgggtgcctgaatccacttctatgtcaagatggattcagaagctttgtcaggttcatcagagaagaatgctgacattgaaatgcagtatctgttgtgaaagatggaaagaggggccacatgtatttgctatctctaaattatccaccagatctttctagccctattagtatcaccaaagtacaacctttatgccactgctatgaaaaatattttaaatattttaataacaactatattggagaattcatcagagcatattcgtgcatttttgagacctttctcaaaaccacaaaagatttgtttttattgatatataataaaaggggaggatattttctgatgttatgtgtgtgttggaactgaaaacttaacaaaattgtgtctcaccagagggattttatgcattctctttcagataaggtgttactgagttactatgagtctcaacacccctcaaatgaatcaggtgacggtgttgatggtaagatgttaatggtaaccctgagtcctacaaaagacttctggttgcatgccaacaacaaggaacactctgtggagctccataagtgtgaaaaaccactgccagaccaggccttctttgtccttcataatatgcactccaactgtgtttcatttgaatgcaagactgatcctggagtgtttataggtgtaaaggataatcatcttgctctgattaaagtagactcttctgagaatttgtgtactgaaaatatcttgtttaagctctctgaaacttagttgatggaaacctgtgagtcttgggttgagtacccaaatgctaccactggagaaggaatgagagataaagaaagagacaggtgacatctaagggaaatgaagagtgcttagcatgtgtggaatgttttccatattatgtataaaaatattttttctaatcctccagttattcttttatttccctctgtataactgcatcttcaatacaagtatcagtatattaaatagggtattggtaaagaaacggtcaacattctaaagagatacagtctgacctttacttttctctagtttcagtccagaaagaacttcatatttagagctaaggccactgaggaaagagccatagcttaagtctctctgtagacagggatccattttaaagagctacttagagaaataattttccacagttccaaacgataggctcaaacactagagctgctagtaaaaagaagaccagatgcttcacagaattatcattttttcaactggaataaaacaccaggtttgtttgtagatgtcttaggcaacactcagagcagatctcccttactgtcaggggatatggaacttcaaaggcccacatggcaagccaggtaacataaatgtgtgaaaaagtaaagataactaaaaaatttagaaaaataaatccagtatttgtaaagtgaataacttcatttctaattgtttaatttttaaaattctgatttttatatattgagtttaagcaaggcattcttacacgaggaagtgaagtaaattttagttcagacataaaatttcacttattaggaatatgtaacatgctaaaacttttttttttttaaagagtactgagtcacaacatgttttagagcatccaagtaccatataatccaactatcatggtaaggccagaaatcttctaacctaccagagcctagatgagacaccgaattaacattaaaatttcagtaactgactgtccctcatgtccatggcctaccatcccttctgaccctggcttccagggacctatgtcttttaatactcactgtcacattgggcaaagttgcttctaatccttatttcccatgtgcacaagtctttttgtattccagcttcctgataacactgcttactgtggaatattcatttgacatctgtctcttttcatttcttttaactaccatgcccttgatatatcttttgcacctgctgaacttcatttctgtatcacctgacctctggatgccaaaacgtttattctgctttgtctgttgtagaattttagataaagctattaatggcaatatttttttgctaaacgtttttgttttttactgtcactagggcaataaaatttatactcaaccatataataacattttttaactactaaaggagtagtttttattttaaagtcttagcaatttctattacaacttttcttagacttaacacttatgataaatgactaacatagtaacagaatctttatgaaatatgaccttttctgaaaatacatacttttacatttctactttattgagacctattagatgtaagtgctagtagaatataagataaaagaggctgagaattaccatacaagggtattacaactgtaaaacaatttatctttgtttcattgttctgtcaataattgttaccaaagagataaaaataaaagcagaatgtatatcatcccatctgaaaaacactaattattgacatgtgcatctgtgcaataaacttaaaatgattattaaataatcaaatatatctacattgtttatattattgaataaagtatattttccaaatgtaaaaaaaac

SEQ ID NO: 408139 - DNA, 1944 bp, Homo sapiens
aacacagagctgcagctcttcagggaagaaatcaaaacaagatcacaagaatactgaaaaatgaagcctaaaatgaagtattcaaccaacaaaatttccacagcaaagtggaagaacacagcaagcaaagccttgtgtttcaagctgggaaaatcccaacagaaggccaaagaagtttgccccatgtactttatgaagctccgctctggccttatgataaaaaaggaggcctgttactttaggagagaaaccaccaaaaggccttcactgaaaacaggtagaaagcacaaaagacatctggtactcgctgcctgtcaacagcagtctactgtggagtgctttgcctttggtatatcaggggtccagaaatatactagagcacttcatgattcaagtatcacaggaatttcacctattacagagtatcttgcttctctaagcacatacaatgatcaatccattacttttgctttggaggatgaaagttatgagatatatgttgaagacttgaaaaaagatgaaaagaaagataaggtgttactgagttactatgagtctcaacacccctcaaatgaatcaggtgacggtgttgatggtaagatgttaatggtaaccctgagtcctacaaaagacttctggttgcatgccaacaacaaggaacactctgtggagctccataagtgtgaaaaaccactgccagaccaggccttctttgtccttcataatatgcactccaactgtgtttcatttgaatgcaagactgatcctggagtgtttataggtgtaaaggataatcatcttgctctgattaaagtagactcttctgagaatttgtgtactgaaaatatcttgtttaagctctctgaaacttagttgatggaaacctgtgagtcttgggttgagtacccaaatgctaccactggagaaggaatgagagataaagaaagagacaggtgacatctaagggaaatgaagagtgcttagcatgtgtggaatgttttccatattatgtataaaaatattttttctaatcctccagttattcttttatttccctctgtataactgcatcttcaatacaagtatcagtatattaaatagggtattggtaaagaaacggtcaacattctaaagagatacagtctgacctttacttttctctagtttcagtccagaaagaacttcatatttagagctaaggccactgaggaaagagccatagcttaagtctctctgtagacagggatccattttaaagagctacttagagaaataattttccacagttccaaacgataggctcaaacactagagctgctagtaaaaagaagaccagatgcttcacagaattatcattttttcaactggaataaaacaccaggtttgtttgtagattttagataaagctattaatggcaatatttttttgctaaacgtttttgttttttactgtcactagggcaataaaatttatactcaaccatataataacattttttaactactaaaggagtagtttttattttaaagtcttagcaatttctattacaacttttcttagacttaacacttatgataaatgactaacatagtaacagaatctttatgaaatatgaccttttctgaaaatacatacttttacatttctactttattgagacctattagatgtaagtgctagtagaatataagataaaagaggctgagaattaccatacaagggtattacaactgtaaaacaatttatctttgtttcattgttctgtcaataattgttaccaaagagataaaaataaaagcagaatgtatatcatcccatctgaaaaacactaattattgacatgtgcatctgtgcaataaacttaaaatgattattaaataatcaaatatatctacattgtttatattattgaataaagtatattttccaaatgtaaaaaaaac

SEQ ID NO: 408140 - DNA, 1651 bp, Homo sapiens
aacacagagctgcagctcttcagggaagaaatcaaaacaagatcacaagaatactgaaaaatgaagcctaaaatgaagtattcaaccaacaaaatttccacagcaaagtggaagaacacagcaagcaaagccttgtgtttcaagctgggaaaatcccaacagaaggccaaagaagtttgccccatgtactttatgaagctccgctctggccttatgataaaaaaggaggcctgttactttaggagagaaaccaccaaaaggccttcactgaaaacaggtagaaagcacaaaagacatctggtactcgctgcctgtcaacagcagtctactgtggagtgctttgcctttggtatatcaggggtccagaaatatactagagcacttcatgattcaagtatcacaggaatttcacctattacagagtatcttgcttctctaagcacatacaatgatcaatccattacttttgctttggaggatgaaagttatgagatatatgttgaagacttgaaaaaagatgaaaagaaagataaggtgttactgagttactatgagtctcaacacccctcaaatgaatcaggtgacggtgttgatggtaagatgttaatggtaaccctgagtcctacaaaagacttctggttgcatgccaacaacaaggaacactctgtggagctccataagtgtgaaaaaccactgccagaccaggccttctttgtccttcataatatgcactccaactgtgtttcatttgaatgcaagactgatcctggagtgtttataggtgtaaaggataatcatcttgctctgattaaagtagactcttctgagaatttgtgtactgaaaatatcttgtttaagctctctgaaacttagttgatggaaacctgtgagtcttgggttgagtacccaaatgctaccactggagaaggaatgagagataaagaaagagacaggtgacatctaagggaaatgaagagtgcttagcatgtgtggaatgttttccatattatgtataaaaatattttttctaatcctccagttattcttttatttccctctgtataactgcatcttcaatacaagtatcagtatattaaatagggtattggtaaagaaacggtcaacattctaaagagatacagtctgacctttacttttctctagtttcagtccagaaagaacttcatatttagagctaaggccactgaggaaagagccatagcttaagtctctctgtagacagggatccattttaaagagctacttagagaaataattttccacagttccaaacgataggctcaaacactagagctgctagtaaaaagaagaccagatgcttcacagaattatcattttttcaactggaataaaacaccaggtttgtttgtagatgtcttaggcaacactcagagcagatctcccttactgtcaggggatatggaacttcaaaggcccacatggcaagccaggtaacataaatgtgtgaaacgtcagcatccaaccttcgaaactatccgcctggaaaggaaacacaaccacggtaactccaaacggtcgcaatcggaccccggcctccccgaagaaatcaccacaacaccacccgcgcaaacaccgaccgcccagccaccgcgccaccccgcggccaccc

SEQ ID NO: 408141 - DNA, 718 bp, Homo sapiens
  misc_feature (29)..(29): n is a, c, g, or t
gtattaaaagcgagagcaattcaaccccntcatcctttcatctcaaatataagcataacccctctatcaaattctcaatactgaaaaatgaagcctaaaatgaagtattcaaccaacaaaatttccacagcaaagtggaagaacacagcaagcaaagccttgtgtttcaagctgggaagcatgtggtcttaacttgcgactactgatgaagaagagaataacagatgaagatatttgaataatcatcttagtcaatttgtgttaccatagaaatatacctgaagctgggtaatttaaccctttgtccatttagaaaaaaaagtgcagcttgctgccagcgcttatttaattttacataaacatctctttgaggctgaagcaaatctgattttcaatgcaaaaatagaatacaaaaactgttcttggagttatttctaaacagaactaccatcagcattgtctatttcagaaaaaatgagattcaccaaatgaaacttcagcaagcaactaactgttcaagaagtgttcaagaatgttaacatcacatgtaggaatgctacattttccaggatttgacattttcagcgatcaagaattactatattttatcaatgaaaataccactactaaaaacataaatagaatgatgtcttttgtttccaaagttgatatactagagagatgtaaaaataataataaaagcaagatctttcgtggc

SEQ ID NO: 408142 - DNA, 2693 bp, Homo sapiens
aacacagagctgcagctcttcagggaagaaatcaaaacaagatcacaagaatactgaaaaatgaagcctaaaatgaagtattcaaccaacaaaatttccacagcaaagtggaagaacacagcaagcaaagccttgtgtttcaagctgggaaaatcccaacagaaggccaaagaagtttgccccatgtactttatgaagctccgctctggccttatgataaaaaaggaggcctgttactttaggagagaaaccaccaaaaggccttcactgaaaacaggtagaaagcacaaaagacatctggtactcgctgcctgtcaacagcagtctactgtggagtgctttgcctttggtatatcaggggtccagaaatatactagagcacttcatgattcaagtatcacaggaatttcacctattacagagtatcttgcttctctaagcacatacaatgatcaatccattacttttgctttggaggatgaaagttatgagatatatgttgaagacttgaaaaaagatgaaaagaaagataaggtgttactgagttactatgagtctcaacacccctcaaatgaatcaggtgacggtgttgatggtaagatgttaatggtaaccctgagtcctacaaaagacttctggttgcatgccaacaacaaggaacactctgtggagctccataagtgtgaaaaaccactgccagaccaggccttctttgtccttcataatatgcactccaactgtgtttcatttgaatgcaagactgatcctggagtgtttataggtgtaaaggataatcatcttgctctgattaaagtagactcttctgagaatttgtgtactgaaaatatcttgtttaagctctctgaaacttagttgatggaaacctgtgagtcttgggttgagtacccaaatgctaccactggagaaggaatgagagataaagaaagagacaggtgacatctaagggaaatgaagagtgcttagcatgtgtggaatgttttccatattatgtataaaaatattttttctaatcctccagttattcttttatttccctctgtataactgcatcttcaatacaagtatcagtatattaaatagggtattggtaaagaaacggtcaacattctaaagagatacagtctgacctttacttttctctagtttcagtccagaaagaacttcatatttagagctaaggccactgaggaaagagccatagcttaagtctctctgtagacagggatccattttaaagagctacttagagaaataattttccacagttccaaacgataggctcaaacactagagctgctagtaaaaagaagaccagatgcttcacagaattatcattttttcaactggaataaaacaccaggtttgtttgtagatgtcttaggcaacactcagagcagatctcccttactgtcaggggatatggaacttcaaaggcccacatggcaagccaggtaacataaatgtgtgaaaaagtaaagataactaaaaaatttagaaaaataaatccagtatttgtaaagtgaataacttcatttctaattgtttaatttttaaaattctgatttttatatattgagtttaagcaaggcattcttacacgaggaagtgaagtaaattttagttcagacataaaatttcacttattaggaatatgtaacatgctaaaacttttttttttttaaagagtactgagtcacaacatgttttagagcatccaagtaccatataatccaactatcatggtaaggccagaaatcttctaacctaccagagcctagatgagacaccgaattaacattaaaatttcagtaactgactgtccctcatgtccatggcctaccatcccttctgaccctggcttccagggacctatgtcttttaatactcactgtcacattgggcaaagttgcttctaatccttatttcccatgtgcacaagtctttttgtattccagcttcctgataacactgcttactgtggaatattcatttgacatctgtctcttttcatttcttttaactaccatgcccttgatatatcttttgcacctgctgaacttcatttctgtatcacctgacctctggatgccaaaacgtttattctgctttgtctgttgtagaattttagataaagctattaatggcaatatttttttgctaaacgtttttgttttttactgtcactagggcaataaaatttatactcaaccatataataacattttttaactactaaaggagtagtttttattttaaagtcttagcaatttctattacaacttttcttagacttaacacttatgataaatgactaacatagtaacagaatctttatgaaatatgaccttttctgaaaatacatacttttacatttctactttattgagacctattagatgtaagtgctagtagaatataagataaaagaggctgagaattaccatacaagggtattacaactgtaaaacaatttatctttgtttcattgttctgtcaataattgttaccaaagagataaaaataaaagcagaatgtatatcatcccatctgaaaaacactaattattgacatgtgcatctgtgcaataaacttaaaatgattattaaataatcaaatatatctacattgtttatattattgaataaagtatattttccaaatgtaaaaaaaac

SEQ ID NO: 408143 - DNA, 2639 bp, Homo sapiens
aacacagagctgcagctcttcagggaagaaatcaaaacaagatcacaagaatactgaaaaatgaagcctaaaatgaagtattcaaccaacaaaatttccacagcaaagtggaagaacacagcaagcaaagccttgtgtttcaagctgggaaaatcccaacagaaggccaaagaagtttgccccatgtactttatgaagctccgctctggccttatgataaaaaaggaggcctgttactttaggagagaaaccaccaaaaggccttcactgaaaacaggtagaaagcacaaaagacatctggtactcgctgcctgtcaacagcagtctactgtggagtgctttgcctttggtatatcaggggtccagaaatatactagagcacttcatgattcaagtatcacaggaatttcacctattacagagtatcttgcttctctaagcacatacaatgatcaatccattacttttgctttggaggatgaaagttatgagatatatgttgaagacttgaaaaaagatgaaaagaaagataaggtgttactgagttactatgagtctcaacacccctcaaatgaatcaggtgacggtgttgatggtaagatgttaatggtaaccctgagtcctacaaaagacttctggttgcatgccaacaacaaggaacactctgtggagctccataagtgtgaaaaaccactgccagaccaggccttctttgtccttcataatatgcactccaactgtgtttcatttgaatgcaagactgatcctggagtgtttataggtgtaaaggataatcatcttgctctgattaaagtagactcttctgagaatttgtgtactgaaaatatcttgtttaagctctctgaaacttagttgatggaaacctgtgagtcttgggttgagtacccaaatgctaccactggagaaggaatgagagataaagaaagagacaggtgacatctaagggaaatgaagagtgcttagcatgtgtggaatgttttccatattatgtataaaaatattttttctaatcctccagttattcttttatttccctctgtataactgcatcttcaatacaagtatcagtatattaaatagggtattggtaaagaaacggtcaacattctaaagagatacagtctgacctttacttttctctagtttcagtccagaaagaacttcatatttagagctaaggccactgaggaaagagccatagcttaagtctctctgtagacagggatccattttaaagagctacttagagaaataattttccacagttccaaacgataggctcaaacactagagctgctagtaaaaagaagaccagatgcttcacagaattatcattttttcaactggaataaaacaccaggtttgtttgtagatgtcttaggcaacactcagagcagatctcccttactgtcaggggatatggaacttcaaaggcccacatggcaagccaggtaacataaatgtgtgaaaaagtaaagataactaaaaaatttagaaaaataaatccagtatttgtaaagtgaataacttcatttctaattgtttaatttttaaaattctgatttttatatattgagtttaagcaaggcattcttacacgaggaagtgaagtaaattttagttcagacataaaatttcacttattaggaatatgtaacatgctaaaacttttttttttttaaagagtactgagtcacaacatgttttagagcatccaagtaccatataatccaactatcatggtaaggccagaaatcttctaacctaccagagcctagatgagacaccgaattaacattcctggcttccagggacctatgtcttttaatactcactgtcacattgggcaaagttgcttctaatccttatttcccatgtgcacaagtctttttgtattccagcttcctgataacactgcttactgtggaatattcatttgacatctgtctcttttcatttcttttaactaccatgcccttgatatatcttttgcacctgctgaacttcatttctgtatcacctgacctctggatgccaaaacgtttattctgctttgtctgttgtagaattttagataaagctattaatggcaatatttttttgctaaacgtttttgttttttactgtcactagggcaataaaatttatactcaaccatataataacattttttaactactaaaggagtagtttttattttaaagtcttagcaatttctattacaacttttcttagacttaacacttatgataaatgactaacatagtaacagaatctttatgaaatatgaccttttctgaaaatacatacttttacatttctactttattgagacctattagatgtaagtgctagtagaatataagataaaagaggctgagaattaccatacaagggtattacaactgtaaaacaatttatctttgtttcattgttctgtcaataattgttaccaaagagataaaaataaaagcagaatgtatatcatcccatctgaaaaacactaattattgacatgtgcatctgtgcaataaacttaaaatgattattaaataatcaaatatatctacattgtttatattattgaataaagtatattttccaaatgtaaaaaaaac

SEQ ID NO: 408144 - DNA, 1730 bp, Homo sapiens
aacacagagctgcagctcttcagggaagaaatcaaaacaagatcacaagaatactgaaaaatgaagcctaaaatgaagtattcaaccaacaaaatttccacagcaaagtggaagaacacagcaagcaaagccttgtgtttcaagctgggaaaatcccaacagaaggccaaagaagtttgccccatgtactttatgaagctccgctctggccttatgataaaaaaggaggcctgttactttaggagagaaaccaccaaaaggccttcactgaaaacaggtagaaagcacaaaagacatctggtactcgctgcctgtcaacagcagtctactgtggagtgctttgcctttggtatatcaggggtccagaaatatactagagcacttcatgattcaagtatcacaggaatttcacctattacagagtatcttgcttctctaagcacatacaatgatcaatccattacttttgctttggaggatgaaagttatgagatatatgttgaagacttgaaaaaagatgaaaagaaaggtagattattttctttttctataataatgtaataatgactaataaaagtaaaacattttaataaatctaccaaactttaaacaatggattaacttagacatggcaaacaggtcatgctgtgtgctaactctaatgcattggcagtgggtgcctgaatccacttctatgtcaagatggattcagaagctttgtcaggttcatcagagaagaatgctgacattgaaatgcagtatctgttgtgaaagatggaaagaggggccacatgtatttgctatctctaaattatccaccagatctttctagccctattagtatcaccaaagtacaacctttatgccactgctatgaaaaatattttaaatattttaataacaactatattggagaattcatcagagcatattcgtgcatttttgagacctttctcaaaaccacaaaagatttgtttttattgatatataataaaaggggaggatattttctgatgttatgtgtgtgttggaactgaaaacttaacaaaattgtgtctcaccagagggattttatgcattctctttcagataaggtgttactgagttactatgagtctcaacacccctcaaatgaatcaggtaatttggagggctgggtagctgtagtgcttgaattcttaagtatggggtaaagataaatccaaaaaaatcctttttgccccataggaaaaaagatagtctcagaaggttatctccaacccaagctcatggtaaaaccttagattctcagaggatgcattctcatccattttacagcttaatcgttaggataaagttttggctacacttaatacagatccaaaacaagagtggtttatgctagataaaactttctgtcttagccagggctgcaatggctcaacaagttgtccagggaacccatctccttctatcttgtggttctgccaacatctacatggttcaagagtacttgggagcatgacaatgcctggtcagcaggacacagaaaaacagatgtatgcattctatttccctttaagggtacaacctagaagttgcacctaacacttcctcttatctcacattggtcagaactcagttgtattactacacttagccataagaaggcaagctggggaatgttctattactatcccaaaagaggaatgaatattgggtgacactatgagtggctttacatgcagaca

SEQ ID NO: 408145 - DNA, 343 bp, Homo sapiens
caccaagatgcatgacagtgtcttcaagtagggaagatggcccaaaagatgattccagaacaatgtggacgtatagcgacagagatatacacatgttattgtggaagctgctgggattgactgctttgtgagctctggatggccagtccttgctatgggggctgggatggctgctgacaatggtgaccttccacaggcaacccagccagaagtgctgagcccctcccaggaaaggcaccagcgggcctgacagttaattatagagcccccttttttttttaaaggaagtaactcaatccactttaatatttagctagcatttatgttacaggtctatgaggga

SEQ ID NO: 408146 - DNA, 2298 bp, Homo sapiens
agcggcgcggctgctaggaggcaccgaggcagcggcggggctctgggcgcgcggctggatgcccccggcctgcggctccctgcgcttcccgccgtccaggggcaccagtcatgggcgccgcagccgctcaggcgcctctcgggctgcctgccgcgcctccgctcgccttctgctgctagcgacgtcggtgcttctgctcttcgccttctctctgcccgggagccgcgcgtccaaccagcccccgggtggtggcggcggcacggcggggactgtcccggcggcaaaggcaagagcatcaactgctcagaattaaatgtgagggagtctgacgtaagagtttgtgatgagtcatcatgtaaatatggaggagtctgtaaagaagatggagatggtttgaaatgtgcatgccaatttcagtgccatacaaattatattcctgtctgtggatcaaatggggacacttatcaaaatgaatgctttctcagaagggctgcttgtaagcaccagaaagagataacagtaatagcaagaggaccatgctactctgataatggatctggatctggagaaggagaagaggaagggtcaggggcagaagttcacagaaaacactccaagtgtggaccctgcaaatataaagctgagtgtgatgaagatgcagaaaatgttgggtgtgtatgtaatatagattgcagtggatacagttttaatcctgtgtgtgcttctgatgggagttcctataacaatccctgttttgttcgagaagcatcttgtataaagcaagaacaaattgatataaggcatcttggtcattgcacagatacagatgacactagtttgttgggaaagaaagatgatggactacaatatcgaccagatgtgaaagatgctagtgatcaaagagaagatgtttatattggaaaccacatgccttgccctgaaaacctcaatggttactgcatccatggaaaatgtgaattcatctattctactcagaaggcttcttgtagatgtgaatctggctacactggacagcactgtgaaaagacagactttagtattctctatgtagtgccaagtaggcaaaagctcactcatgttcttattgcagcaattattggagctgtacagattgccatcatagtagcaattgtaatgtgcataacaagaaaatgccccaaaaacaatagaggacgtcgacagaagcaaaacctaggtcattttacttcagatacgtcatccagaatggtttaaactgatgacttttatatgtacactgaccatgtgatgtacatttattatgtctttttttaaagaatggaaatatttatttcagaggccttatttttggacatttttagtgtagtactgttggctcgtatttagaatattcagctacgacagttttggactgtttagtagtctttgttttatgtttttaaatacagaaattgctttcacaaatttgtaccacatggtaattctaagacttgttctttacccatggaatgtaatatttttgcaaagatggactacttcacaaatggttataaagtcatatccacttcttccacaatgaccacagcaaatgaccaagcatgaactaaaggtaaagatgtttacagattacttttcttacaaaaaaaatctagaagacactgtgtttaaatagatatttaaatgtttttgagatttagtaactgattttttagacactgcctatcgcatgaactgtaaagctgtgtgtattaggtgtaaaatatttataagatatatggactggggaatttgattattcctccctttgaaaaaatagtcctaataatttgaacaaatatgttagtaatgatggaacagatcaatgaaaagtagatatagatattgtgaaaataggctgtttaacaaacagattggaataaagcctattctaccagttaaactactttaatacacattcatttttaaagaaaatgtttgttttaacataaataaacaaatcgtatcagtgtttgtgaataaaatacaaaaatgattgttaatgattggtgctcttaaagtgagcttaaaatttatccaagacgtatatccaaatttgtcctgtagtaatagattaatattcatagattgttggtgtttaaagatctgaagtgtgagtagaatgtattcagctgtttaacatgtagtttagatattcaaaagtatgcatgtagaatttaaagaatatgttaaaaattattaattttaatattttgtttggaaaagcatgttataatataatgttttcactataaagcctct

SEQ ID NO: 408147 - DNA, 2354 bp, Homo sapiens
aaaaaaattaaaaaaaaaaaaaaaaacagaaaaaaaaacatagtacatgccaagatattattatgacaattacaaatacaaataaattatgatctttgacctcagcatatttattaactaaaagggaagataaaacaggcacataactataacaggggcaccagtcatgggcgccgcagccgctcaggcgcctctcgggctgcctgccgcgcctccgctcgccttctgctgctagcgacgtcggtgcttctgctcttcgccttctctctgcccgggagccgcgcgtccaaccagcccccgggtggtggcggcggcacggcggggactgtcccggcggcaaaggcaagagcatcaactgctcagaattaaatgtgagggagtctgacgtaagagtttgtgatgagtcatcatgtaaatatggaggagtctgtaaagaagatggagatggtttgaaatgtgcatgccaatttcagtgccatacaaattatattcctgtctgtggatcaaatggggacacttatcaaaatgaatgctttctcagaagggctgcttgtaagcaccagaaagagataacagtaatagcaagaggaccatgctactctgataatggatctggatctggagaaggagaagaggaagggtcaggggcagaagttcacagaaaacactccaagtgtggaccctgcaaatataaagctgagtgtgatgaagatgcagaaaatgttgggtgtgtatgtaatatagattgcagtggatacagttttaatcctgtgtgtgcttctgatgggagttcctataacaatccctgttttgttcgagaagcatcttgtataaagcaagaacaaattgatataaggcatcttggtcattgcacagatacagatgacactagtttgttgggaaagaaagatgatggactacaatatcgaccagatgtgaaagatgctagtgatcaaagagaagatgtttatattggaaaccacatgccttgccctgaaaacctcaatggttactgcatccatggaaaatgtgaattcatctattctactcagaaggcttcttgtagatgtgaatctggctacactggacagcactgtgaaaagacagactttagtattctctatgtagtgccaagtaggcaaaagctcactcatgttcttattgcagcaattattggagctgtacagattgccatcatagtagcaattgtaatgtgcataacaagaaaatgccccaaaaacaatagaggacgtcgacagaagcaaaacctaggtcattttacttcagatacgtcatccagaatggtttaaactgatgacttttatatgtacactgaccatgtgatgtacatttattatgtctttttttaaagaatggaaatatttatttcagaggccttatttttggacatttttagtgtagtactgttggctcgtatttagaatattcagctacgacagttttggactgtttagtagtctttgttttatgtttttaaatacagaaattgctttcacaaatttgtaccacatggtaattctaagacttgttctttacccatggaatgtaatatttttgcaaagatggactacttcacaaatggttataaagtcatatccacttcttccacaatgaccacagcaaatgaccaagcatgaactaaaggtaaagatgtttacagattacttttcttacaaaaaaaatctagaagacactgtgtttaaatagatatttaaatgtttttgagatttagtaactgattttttagacactgcctatcgcatgaactgtaaagctgtgtgtattaggtgtaaaatatttataagatatatggactggggaatttgattattcctccctttgaaaaaatagtcctaataatttgaacaaatatgttagtaatgatggaacagatcaatgaaaagtagatatagatattgtgaaaataggctgtttaacaaacagattggaataaagcctattctaccagttaaactactttaatacacattcatttttaaagaaaatgtttgttttaacataaataaacaaatcgtatcagtgtttgtgaataaaatacaaaaatgattgttaatgattggtgctcttaaagtgagcttaaaatttatccaagacgtatatccaaatttgtcctgtagtaatagattaatattcatagattgttggtgtttaaagatctgaagtgtgagtagaatgtattcagctgtttaacatgtagtttagatattcaaaagtatgcatgtagaatttaaagaatatgttaaaaattattaattttaatattttgtttggaaaagcatgttataatataatgttttcactataaagcctct

SEQ ID NO: 408148 - DNA, 2199 bp, Homo sapiens
aagaagtgctgggagaacatcaaggctcggaccaaaaaaattatggcccatgaaaggagagagaaagtgaaacggagcgtcagccctctcctgagtacccacgtcctagggaaggagaagatcgccagcatgctgccggagcagctctacttcctgcagagccccccggaggaggagcccgaataccaccccgacgcctcagcccaagaattaaatgtgagggagtctgacgtaagagtttgtgatgagtcatcatgtaaatatggaggagtctgtaaagaagatggagatggtttgaaatgtgcatgccaatttcagtgccatacaaattatattcctgtctgtggatcaaatggggacacttatcaaaatgaatgctttctcagaagggctgcttgtaagcaccagaaagagataacagtaatagcaagaggaccatgctactctgataatggatctggatctggagaaggagaagaggaagggtcaggggcagaagttcacagaaaacactccaagtgtggaccctgcaaatataaagctgagtgtgatgaagatgcagaaaatgttgggtgtgtatgtaatatagattgcagtggatacagttttaatcctgtgtgtgcttctgatgggagttcctataacaatccctgttttgttcgagaagcatcttgtataaagcaagaacaaattgatataaggcatcttggtcattgcacagatacagatgacactagtttgttgggaaagaaagatgatggactacaatatcgaccagatgtgaaagatgctagtgatcaaagagaagatgtttatattggaaaccacatgccttgccctgaaaacctcaatggttactgcatccatggaaaatgtgaattcatctattctactcagaaggcttcttgtagatgtgaatctggctacactggacagcactgtgaaaagacagactttagtattctctatgtagtgccaagtaggcaaaagctcactcatgttcttattgcagcaattattggagctgtacagattgccatcatagtagcaattgtaatgtgcataacaagaaaatgccccaaaaacaatagaggacgtcgacagaagcaaaacctaggtcattttacttcagatacgtcatccagaatggtttaaactgatgacttttatatgtacactgaccatgtgatgtacatttattatgtctttttttaaagaatggaaatatttatttcagaggccttatttttggacatttttagtgtagtactgttggctcgtatttagaatattcagctacgacagttttggactgtttagtagtctttgttttatgtttttaaatacagaaattgctttcacaaatttgtaccacatggtaattctaagacttgttctttacccatggaatgtaatatttttgcaaagatggactacttcacaaatggttataaagtcatatccacttcttccacaatgaccacagcaaatgaccaagcatgaactaaaggtaaagatgtttacagattacttttcttacaaaaaaaatctagaagacactgtgtttaaatagatatttaaatgtttttgagatttagtaactgattttttagacactgcctatcgcatgaactgtaaagctgtgtgtattaggtgtaaaatatttataagatatatggactggggaatttgattattcctccctttgaaaaaatagtcctaataatttgaacaaatatgttagtaatgatggaacagatcaatgaaaagtagatatagatattgtgaaaataggctgtttaacaaacagattggaataaagcctattctaccagttaaactactttaatacacattcatttttaaagaaaatgtttgttttaacataaataaacaaatcgtatcagtgtttgtgaataaaatacaaaaatgattgttaatgattggtgctcttaaagtgagcttaaaatttatccaagacgtatatccaaatttgtcctgtagtaatagattaatattcatagattgttggtgtttaaagatctgaagtgtgagtagaatgtattcagctgtttaacatgtagtttagatattcaaaagtatgcatgtagaatttaaagaatatgttaaaaattattaattttaatattttgtttggaaaagcatgttataatataatgttttcactataaagcctct

SEQ ID NO: 408149 - DNA, 526 bp, Homo sapiens
  misc_feature (20)..(20): n is a, c, g, or t
gggaaagcgggtttccagtnaggagttaaaagacggcgggatgtaaaagaatcatataggggatgggccggaattgatgttccggccgcatggcggccggggattggatgacggatcagaaagtagagaaagaaggtaactttgctgaaagctagtctggggagttagtagctgatacagatcagcatttcctaactatgagatttcataatattctctcttgtctcgattctgagtcactggtgcctgctgtggtggcattgttcatgaacatgtacagttattgggaagtgatcttgtctttcctcctgccttcaggcactgctacctaaattacaccccgacagatgtattcccattcttctttaaaagactatgtcatgagctgaactattaagttttaaagttgataagcatcaggctaagcatatttttcctgccatctcccacggaggtataacattgttttctatacttagggaatttaccaaaaaaaaaagtcgacgcggccgcgaatttagtagta

SEQ ID NO: 408150 - DNA, 406 bp, Homo sapiens
gactgaagcacaagaactgcttgaacccgggaggcggaggttgcagtgagctaagatcacgtcactgcactccagcctgggcaacagagcaagactgtctcaaacaaaacaaaagaacaaaactctctgggcttgatttcttaatctgtaaaacagaaataattcttaacacatttggttactctgaggataaaagtggaggaaaaaacatgcagaggatagtccggaactccccatgtagatcccattattaggtaactgaggtacaagtatcttaggctactggtccgggcaggctttgctgaggggctccgtgcagcttgctggtgcagccgagcaagtgggcctgtagccgactcttaatccaggttggtgctattcaaagagatcatctttcacccgaggg

SEQ ID NO: 408151 - DNA, 2015 bp, Homo sapiens
  misc_feature (1412)..(1412): n is a, c, g, or t
atagttcgcgtagcggctcgagcgtggagatgaagcgtattttctcactgctagaaaagacttggcttggcgcaccaatacagtttgcctggcaaaaaacatcaggaaactaccttgcagtaacaggagctgattatattgtgaaaatctttgatcgccatggtcaaaaaagaagtgaaattaacttacctggtaactgtgttgccatggattgggataaagatggagatgtcctagcagtgattgctgagaaatctagctgcatttatctttgggatgccaacacaaataagaccagccagttagacaatggcatgagggatcaaatgtctttccttctttggtcaaaagttggaagtttcctggctgttggaactgttaaaggaaatttggttatttataatcatcagacatctcgaaagattcctgtccttggaaaacatactaagagaatcacttgtggatgttggaatgcagaaaatctgcctgctttaggtggtgaagataaaatgattacagttagtaatcaggaaggtgacacgataagacagacacaagtgagatcagagcctagcaacatgcagtttttcttgatgaagatggatgaccgaacctctgctgctgaaagcatgataagtgtggtgcttggcaagaaaactttgttttttttaaatctgaatgaaccagataacccagctgatcttgaatttcagcaggactttggcaacattgtctgctataattggtatggtgatggccgcatcatgattggtttttcatgtggacattttgtggtcatttctactcatactggagagcttggtcaagagatatttcaggctcgtaaccataaagataatctaaccagcattgcagtatcacagactcttaacaaagttgctacatgtggagataactgcattaaaatccaagacttggttgacttaaaagacatgtatgttatactcaacctggatgaggaaaataaaggattgggtaccttgtcctggactgatgatggccagttgctagcactctctacccaaaggggctcacttcatgttttcctgaccaagcttcccatacttggggatgcctgcagcacaaggattgcctatctcacctccctccttgaagtcaccgtagccaaccctgttgaaggagagctaccaatcacagtttctgttgatgtggaacccaactttgtggcagtaggtctttatcatctggctgtaggaatgaataatcgagcttggttttatgtccttggagaaaatgctgtgaaaaaattgaaagatatggagtatctgggaacagtagccagtatttgccttcattctgactatgctgctgcactttttgaaggcaaagtccagttacatttgatagaaagcgaaatcttggatgctcangaagaacgtgagactcggcttttcccagcagtggatgataagtgccgtatcttatgccatgccttaactagtgatttcctcatctatggtacagatactggtgtcgttcagtatttctacatctctatactcagaattgaagatcatgctaaacactgaaagcacatgtcctatgtgttcagaaagattaaacgctgctcagctgaaaaagatttcagactgtacccagtacctgcgaacggaggaggaactgtgattggcacgtgcagatacaatgctcctgagaagacagcattttccacaggaggctgtttcctcccctggtggatttaagagacggtcctttctggatacagagaaatgaaacaacggtgacctctccaggtcggcactttccacttctgtacggtggcaaaacgatgacatgtaaccttgctgtttattgtactttgtatattatttcctcttcaaagtctttcttacatactctatcctctgcactgttaatagtaacctatgacataattgtaaatattcagctttttgctaacttttgtattttgaaaaactttaaaataaaattgttgactagaaaaaaaaaac

SEQ ID NO: 408152 - DNA, 727 bp, Homo sapiens
tcttttcttccgaagcattcttctatttgtgttcctaaggatctctaaagactcaaattgtcttctgggaagaacctcctgtgacctttgagaatattatctttaaagaggatcttgcatgagactgaatagttctgattctcaaattgcatggtggacatgtgttaagaggtgtagacagaaagttgttgtctttctcattagagtaacccaaagctaaaggaatgttatatatttaatttactctgcctttccctcccctaaacagcatgctaaacactgaaagcacatgtcctatgtgttcagaaagattaaacgctgctcagctgaaaaagatttcagactgtacccagtacctgcgaacggaggaggaactgtgattggcacgtgcagatacaatgctcctgagaagacagcattttccacaggaggctgtttcctcccctggtggatttaagagacggtcctttctggatacagagaaatgaaacaacggtgacctctccaggtcggcactttccacttctgtacggtggcaaaacgatgacatgtaaccttgctgtttattgtactttgtatattatttcctcttcaaagtctttcttacatactctatcctctgcactgttaatagtaacctatgacataattgtaaatattcagctttttgctaacttttgtattttgaaaaactttaaaataaaattgttgactagaaaaaaaaaac

SEQ ID NO: 408153 - DNA, 3429 bp, Homo sapiens
  misc_feature (710)..(710): n is a, c, g, or t
caggctcttgacagacaagtggaagggctgtaccaggataaaggaaagaagtgcctgtccagcagggagcttgaatttaagttccatgtatgaagccacgtcgtcatactggagagcttggtcaagagatatttcaggctcgtaaccataaagataatctaaccagcattgcagtatcacagactcttaacaaagttgctacatgtggagataactgcattaaaatccaagacttggttgacttaaaagacatgtatgttatactcaacctggatgaggaaaataaaggattgggtaccttgtcctggactgatgatggccagttgctagcactctctacccaaaggggctcacttcatgttttcctgaccaagcttcccatacttggggatgcctgcagcacaaggattgcctatctcacctccctccttgaagtcaccgtagccaaccctgttgaaggagagctaccaatcacagtttctgttgatgtggaacccaactttgtggcagtaggtctttatcatctggctgtaggaatgaataatcgagcttggttttatgtccttggagaaaatgctgtgaaaaaattgaaagatatggagtatctgggaacagtagccagtatttgccttcattctgactatgctgctgcactttttgaaggcaaagtccagttacatttgatagaaagcgaaatcttggatgctcangaagaacgtgagactcggcttttcccagcagtggatgataagtgccgtatcttatgccatgccttaactagtgatttcctcatctatggtacagatactggtgtcgttcagtatttctacattgaagactggcaattcgttaatgattatcgacatcctgtcagtgtgaaaaagatttttcccgacccaaatgggaccagattagttttcattgatgaaaaaagtgatggatttgtttactgtccagtcaatgacgctacctatgagattccagatttttcaccaaccattaaaggtgttctttgggaaaactggccaatggataaaggtgtatttattgcttatgatgatgataaggtgtacacttatgtctttcacaaggacactatacaaggagccaaggttattttggctggtagcaccaaagttccttttgctcataaacctttgctgctatataatggagagctgacctgccaaacacagagtggaaaagtaaacaacatctaccttagcacccatggctttctcagcaacttaaaagatacggggcctgacgaactgagaccaatgctggcacagaatttaatgctaaagaggttttctgatgcttgggaaatgtgcaggattctgaatgatgaggctgcctggaatgagttggccagagcttgtctacatcacatggaagtggagtttgcaatccgtgtttatcggagaattggaaatgttggcatagtgatgtccttggaacaaataaagggaatagaggactacaatcttttggcaggacaccttgccatgtttaccaacgattataacctggctcaggacttgtaccttgcatccagctgtcctattgctgccctggagatgagaagggatttacagcattgggacagtgctctacaactggcaaagcatttggccccagaccagataccttttatatcaaaagaatatgctattcagcttgaattcgcgggtgattatgtaaatgctttggctcattatgagaaaggaataacaggtgataataaggaacatgatgaagcttgtctggctggagtggcccagatgtccataagaatgggagacatacgtcgaggggttaaccaagccctcaagcatcccagcagggtccttaaaagagactgtggagccatattggagaatatgaagcaattttcagaagcggcccaactgtatgaaaaaggtctctactacgataaagcagcatctgtttacatccgctctaagaattgggcaaaagttggtgatcttctgccccacgtttcttctcctaagatccatttgcagtatgccaaagccaaggaagcagatggaagatacaaagaagctgttgtagcttatgaaaatgcaaaacagtggcaaagtgtaatccgcatctatctggatcacctcaataatcctgaaaaagctgtcaatattgttagagagacccagtctctggatggagccaaaatggtagccaggttttttctacagcttggtgactatgggtctgccatccagtttcttgtcatgtccaaatgcaacaatgaagctttcacactggctcagcaacacaacaaaatggaaatctatgcagatattattggttctgaagacactactaatgaagactatcaaagcattgccttatactttgaaggagaaaagagatatcttcaggctggaaaattcttcttgctgtgtggccaatattcacgagcacttaaacacttcctgaaatgcccaagctcggaagataatgtggcaatagaaatggcaattgaaactgttggtcaggccaaagatgaactgctgaccaatcagctgatagaccatctcctgggggagaacgatggcatgcctaaggatgccaagtacctgttccgcttgtacatggctctgaagcaataccgagaagctgcccagactgccatcatcattgccagagaagagcagtctgcaggcaactaccggaatgcacacgatgttctcttcagtatgtatgcagaactgaaatcccagaagatcaaaattccctccgagatggccaccaacctcatgattctgcacagctatatactagtaaagattcatgttaaaaatggagatcacatgaaaggggctcgcatgctcattcgggtggccaacaacatcagcaaatttccatcacacattgtacccatcctgacgtcaactgtgattgagtgtcacagggcaggcctgaagaactctgctttcagcttcgcagctatgttgatgaggcctgaataccgcagcaaaatagatgccaaatacaaaaagaagatcgagggaatggtcaggtaggcagagatggctatttctgctatctaatcgtatttctcaaagtatttccaaaaatgtagctgccagtgtgcaagctcaataagaaaacggtggggggccaggtgcagtggctcacacctataatcccaacactttggaaggctgaggtggacaaatcacttgaggtcagtagttcaagaccagcctggccaatatgatgaaaccctatctctactaaaaatacaaaaattggctgggcgtggtggtgcacacctgtagtcccagctactcaggaggctggggcaggagaattgcttgaacccgggaggcagaggttgcagtgagccgagatcgtgccattgcactccagcctgggcaacagagtgagaccccatctcaaaaa

SEQ ID NO: 408154 - DNA, 4405 bp, Homo sapiens
  misc_feature (1412)..(1412): n is a, c, g, or t
atagttcgcgtagcggctcgagcgtggagatgaagcgtattttctcactgctagaaaagacttggcttggcgcaccaatacagtttgcctggcaaaaaacatcaggaaactaccttgcagtaacaggagctgattatattgtgaaaatctttgatcgccatggtcaaaaaagaagtgaaattaacttacctggtaactgtgttgccatggattgggataaagatggagatgtcctagcagtgattgctgagaaatctagctgcatttatctttgggatgccaacacaaataagaccagccagttagacaatggcatgagggatcaaatgtctttccttctttggtcaaaagttggaagtttcctggctgttggaactgttaaaggaaatttggttatttataatcatcagacatctcgaaagattcctgtccttggaaaacatactaagagaatcacttgtggatgttggaatgcagaaaatctgcctgctttaggtggtgaagataaaatgattacagttagtaatcaggaaggtgacacgataagacagacacaagtgagatcagagcctagcaacatgcagtttttcttgatgaagatggatgaccgaacctctgctgctgaaagcatgataagtgtggtgcttggcaagaaaactttgttttttttaaatctgaatgaaccagataacccagctgatcttgaatttcagcaggactttggcaacattgtctgctataattggtatggtgatggccgcatcatgattggtttttcatgtggacattttgtggtcatttctactcatactggagagcttggtcaagagatatttcaggctcgtaaccataaagataatctaaccagcattgcagtatcacagactcttaacaaagttgctacatgtggagataactgcattaaaatccaagacttggttgacttaaaagacatgtatgttatactcaacctggatgaggaaaataaaggattgggtaccttgtcctggactgatgatggccagttgctagcactctctacccaaaggggctcacttcatgttttcctgaccaagcttcccatacttggggatgcctgcagcacaaggattgcctatctcacctccctccttgaagtcaccgtagccaaccctgttgaaggagagctaccaatcacagtttctgttgatgtggaacccaactttgtggcagtaggtctttatcatctggctgtaggaatgaataatcgagcttggttttatgtccttggagaaaatgctgtgaaaaaattgaaagatatggagtatctgggaacagtagccagtatttgccttcattctgactatgctgctgcactttttgaaggcaaagtccagttacatttgatagaaagcgaaatcttggatgctcangaagaacgtgagactcggcttttcccagcagtggatgataagtgccgtatcttatgccatgccttaactagtgatttcctcatctatggtacagatactggtgtcgttcagtatttctacattgaagactggcaattcgttaatgattatcgacatcctgtcagtgtgaaaaagatttttcccgacccaaatgggaccagattagttttcattgatgaaaaaagtgatggatttgtttactgtccagtcaatgacgctacctatgagattccagatttttcaccaaccattaaaggtgttctttgggaaaactggccaatggataaaggtgtatttattgcttatgatgatgataaggtgtacacttatgtctttcacaaggacactatacaaggagccaaggttattttggctggtagcaccaaagttccttttgctcataaacctttgctgctatataatggagagctgacctgccaaacacagagtggaaaagtaaacaacatctaccttagcacccatggctttctcagcaacttaaaagatacggggcctgacgaactgagaccaatgctggcacagaatttaatgctaaagaggttttctgatgcttgggaaatgtgcaggattctgaatgatgaggctgcctggaatgagttggccagagcttgtctacatcacatggaagtggagtttgcaatccgtgtttatcggagaattggaaatgttggcatagtgatgtccttggaacaaataaagggaatagaggactacaatcttttggcaggacaccttgccatgtttaccaacgattataacctggctcaggacttgtaccttgcatccagctgtcctattgctgccctggagatgagaagggatttacagcattgggacagtgctctacaactggcaaagcatttggccccagaccagataccttttatatcaaaagaatatgctattcagcttgaattcgcgggtgattatgtaaatgctttggctcattatgagaaaggaataacaggtgataataaggaacatgatgaagcttgtctggctggagtggcccagatgtccataagaatgggagacatacgtcgaggggttaaccaagccctcaagcatcccagcagggtccttaaaagagactgtggagccatattggagaatatgaagcaattttcagaagcggcccaactgtatgaaaaaggtctctactacgataaagcagcatctgtttacatccgctctaagaattgggcaaaagttggtgatcttctgccccacgtttcttctcctaagatccatttgcagtatgccaaagccaaggaagcagatggaagatacaaagaagctgttgtagcttatgaaaatgcaaaacagtggcaaagtgtaatccgcatctatctggatcacctcaataatcctgaaaaagctgtcaatattgttagagagacccagtctctggatggagccaaaatggtagccaggttttttctacagcttggtgactatgggtctgccatccagtttcttgtcatgtccaaatgcaacaatgaagctttcacactggctcagcaacacaacaaaatggaaatctatgcagatattattggttctgaagacactactaatgaagactatcaaagcattgccttatactttgaaggagaaaagagatatcttcaggctggaaaattcttcttgctgtgtggccaatattcacgagcacttaaacacttcctgaaatgcccaagctcggaagataatgtggcaatagaaatggcaattgaaactgttggtcaggccaaagatgaactgctgaccaatcagctgatagaccatctcctgggggagaacgatggcatgcctaaggatgccaagtacctgttccgcttgtacatggctctgaagcaataccgagaagctgcccagactgccatcatcattgccagagaagagcagtctgcaggcaactaccggaatgcacacgatgttctcttcagtatgtatgcagaactgaaatcccagaagatcaaaattccctccgagatggccaccaacctcatgattctgcacagctatatactagtaaagattcatgttaaaaatggagatcacatgaaaggggctcgcatgctcattcgggtggccaacaacatcagcaaatttccatcacacattgtacccatcctgacgtcaactgtgattgagtgtcacagggcaggcctgaagaactctgctttcagcttcgcagctatgttgatgaggcctgaataccgcagcaaaatagatgccaaatacaaaaagaagatcgagggaatggtcaggagacccgatatatctgagatagaagaggccacgactccatgtccattctgcaaatttcttctcccagagtgtgaactcctctgtcctggatgtaaaaacagtatcccatattgcattgcaacaggtcgacacatgttgaaagatgactggacggtgtgtccacattgtgacttccctgctctatactcagaattgaagatcatgctaaacactgaaagcacatgtcctatgtgttcagaaagattaaacgctgctcagctgaaaaagatttcagactgtacccagtacctgcgaacggaggaggaactgtgattggcacgtgcagatacaatgctcctgagaagacagcattttccacaggaggctgtttcctcccctggtggatttaagagacggtcctttctggatacagagaaatgaaacaacggtgacctctccaggtcggcactttccacttctgtacggtggcaaaacgatgacatgtaaccttgctgtttattgtactttgtatattatttcctcttcaaagtctttcttacatactctatcctctgcactgttaatagtaacctatgacataattgtaaatattcagctttttgctaacttttgtattttgaaaaactttaaaataaaattgttgactagaaaaaaaaaac

SEQ ID NO: 408155 - DNA, 1056 bp, Homo sapiens
gacagttctattggacggtgctggtataacttgtaccacttctgttacacaaaagggagagacagagggaaaataccaagctcaccactccagtagcacaggaagagagaagaccgcaagacctacccatgctttctgccgttgaatgtgctatgaactccagttcccaaaggtggcccatgtaacaccctagaacctaaccaatcctaggtactcttcctcctccctggagtggatcaagggctggtgtgagcttgtaagtatctctctaagcccagagtctgactatgaagtaggtgtgtcatatgtccctggttttccaaatatgctttctctttgccatccccggtacatgaataaaacggcatttttaaatgacatgattcttcctcacaggagacccgatatatctgagatagaagaggccacgactccatgtccattctgcaaatttcttctcccagagtgtgaactcctctgtcctggatgtaaaaacagtatcccatattgcattgcaacaggtcgacacatgttgaaagatgactggacggtgtgtccacattgtgacttccctgctctatactcagaattgaagatcatgctaaacactgaaagcacatgtcctatgtgttcagaaagattaaacgctgctcagctgaaaaagatttcagactgtacccagtacctgcgaacggaggaggaactgtgattggcacgtgcagatacaatgctcctgagaagacagcattttccacaggaggctgtttcctcccctggtggatttaagagacggtcctttctggatacagagaaatgaaacaacggtgacctctccaggtcggcactttccacttctgtacggtggcaaaacgatgacatgtaaccttgctgtttattgtactttgtatattatttcctcttcaaagtctttcttacatactctatcctctgcactgttaatagtaacctatgacataattgtaaatattcagctttttgctaacttttgtattttgaaaaactttaaaataaaattgttgactagaaaaaaaaaac

SEQ ID NO: 408156 - DNA, 1328 bp, Homo sapiens
tatttttgttgttgttacatcaaagtctaccatgcgggcaaggtatgggataggacaggcactctcatgactgctggtggggatggaaattggtatggcctttgcagaaagcagtttggcaatttgtggtaagagtattttttaaaaggtcctgtttttgagccagtaattctgggtgtctgtcctgaagaaagaatttgatgcctgcagagagattagtgtataaagtcattaatccccctaatgcttttatcagcagtcctgtcagatgcaaaaaatatctaagaggcatgaaaggaaactcatggaagtgttgcctcaaggggtgcaggtcctagtgttacaaggcagaacatggtgtcatcaaaggaaaagcacttgatgggcagttagcctgaccccacagctacgtactttcctcattaaacagatcatatctggttctttgcagaaaaagcaaagttcagagaccatgaccctgttttcctacagaaccagggtggaatcccgcctgtatcactgaggacagcagacactgtgctgttgctgctctccccttttctcttgcagacattgtacccatcctgacgtcaactgtgattgagtgtcacagggcaggcctgaagaactctgctttcagcttcgcagctatgttgatgaggcctgaataccgcagcaaaatagatgccaaatacaaaaagaagatcgagggaatggtcaggagacccgatatatctgagatagaagaggccacgactccatgtccattctgcaaatttcttctcccagagtgtgaactcctctgtcctggatgtatggacggtgtgtccacattgtgacttccctgctctatactcagaattgaagatcatgctaaacactgaaagcacatgtcctatgtgttcagaaagattaaacgctgctcagctgaaaaagatttcagactgtacccagtacctgcgaacggaggaggaactgtgattggcacgtgcagatacaatgctcctgagaagacagcattttccacaggaggctgtttcctcccctggtggatttaagagacggtcctttctggatacagagaaatgaaacaacggtgacctctccaggtcggcactttccacttctgtacggtggcaaaacgatgacatgtaaccttgctgtttattgtactttgtatattatttcctcttcaaagtctttcttacatactctatcctctgcactgttaatagtaacctatgacataattgtaaatattcagctttttgctaacttttgtattttgaaaaactttaaaataaaattgttgactagaaaaaaaaaac

SEQ ID NO: 408157 - DNA, 2705 bp, Homo sapiens
  misc_feature (1412)..(1412): n is a, c, g, or t
atagttcgcgtagcggctcgagcgtggagatgaagcgtattttctcactgctagaaaagacttggcttggcgcaccaatacagtttgcctggcaaaaaacatcaggaaactaccttgcagtaacaggagctgattatattgtgaaaatctttgatcgccatggtcaaaaaagaagtgaaattaacttacctggtaactgtgttgccatggattgggataaagatggagatgtcctagcagtgattgctgagaaatctagctgcatttatctttgggatgccaacacaaataagaccagccagttagacaatggcatgagggatcaaatgtctttccttctttggtcaaaagttggaagtttcctggctgttggaactgttaaaggaaatttggttatttataatcatcagacatctcgaaagattcctgtccttggaaaacatactaagagaatcacttgtggatgttggaatgcagaaaatctgcctgctttaggtggtgaagataaaatgattacagttagtaatcaggaaggtgacacgataagacagacacaagtgagatcagagcctagcaacatgcagtttttcttgatgaagatggatgaccgaacctctgctgctgaaagcatgataagtgtggtgcttggcaagaaaactttgttttttttaaatctgaatgaaccagataacccagctgatcttgaatttcagcaggactttggcaacattgtctgctataattggtatggtgatggccgcatcatgattggtttttcatgtggacattttgtggtcatttctactcatactggagagcttggtcaagagatatttcaggctcgtaaccataaagataatctaaccagcattgcagtatcacagactcttaacaaagttgctacatgtggagataactgcattaaaatccaagacttggttgacttaaaagacatgtatgttatactcaacctggatgaggaaaataaaggattgggtaccttgtcctggactgatgatggccagttgctagcactctctacccaaaggggctcacttcatgttttcctgaccaagcttcccatacttggggatgcctgcagcacaaggattgcctatctcacctccctccttgaagtcaccgtagccaaccctgttgaaggagagctaccaatcacagtttctgttgatgtggaacccaactttgtggcagtaggtctttatcatctggctgtaggaatgaataatcgagcttggttttatgtccttggagaaaatgctgtgaaaaaattgaaagatatggagtatctgggaacagtagccagtatttgccttcattctgactatgctgctgcactttttgaaggcaaagtccagttacatttgatagaaagcgaaatcttggatgctcangaagaacgtgagactcggcttttcccagcagtggatgataagtgccgtatcttatgccatgccttaactagtgatttcctcatctatggtacagatactggtgtcgttcagtatttctacattgaagactggcaattcgttaatgattatcgacatcctgtcagtgtgaaaaagatttttcccgacccaaatgggaccagattagttttcattgatgaaaaaagtgatggatttgtttactgtccagtcaatgacgctacctatgagattccagatttttcaccaaccattaaaggtgttctttgggaaaactggccaatggataaaggtgtatttattgcttatgatgatgataaggtgtacacttatgtctttcacaaggacactatacaaggagccaaggttattttggctggtagcaccaaagttccttttgctcataaacctttgctgctatataatggagagctgacctgccaaacacagagtggaaaagtaaacaacatctaccttagcacccatggctttctcagcaacttaaaagatacggggcctgacgaactgagaccaatgctggcacagaatttaatgctaaagaggttttctgatgcttgggaaatgtgcaggattctgaatgatgaggctgcctggaatgagttggccagagcttgtctacatcacatggaagtggagtttgcaatccgtgtttatcggagaattggaaatgttggcatagtgatgtccttggaacaaataaagggaatagaggactacaatcttttggcaggacaccttgccatgtttaccaacgattataacctggctcaggacttgtaccttgcatccagctgtcctattgctgccctggagatgagaagggatttacagcattgggacagtgctctacaactggcaaagcatttggccccagaccagataccttttatatcaaaagaatatgctattcagcttgaattcgctttgccacatttctgttccttataaatgcctataccaaaaagtgacgttggaatcttagtacataacacaagagacagagccccattgccctggccctccacctgcatcctgaggatgactgagtcttagaatataaaacttctgtgctaagaaggaaagatgatccaccaagtcctgtcagagtacagacaccccagtaagccctcggaccatccagaactcttcgattttcacttccttcaggaaaattgaagttttgtaacaaattctcaaacttgtctcattatggtcagatgaattgagttcaattga

SEQ ID NO: 408158 - DNA, 505 bp, Homo sapiens
gcaaggctaatactgaaacttgatgcggattacagtctagagatttctaacttgaatgtttcctgttccacattctagaaacaggcaaaaaaaaattctttttagtatgtttggctttattactaaatgccagccattacttgaaacccttctagaggcatgtgttctgtttgtcctttctagatacaatgctcctgagaagacagcattttccacaggaggctgtttcctcccctggtggatttaagagacggtcctttctggatacagagaaatgaaacaacggtgacctctccaggtcggcactttccacttctgtacggtggcaaaacgatgacatgtaaccttgctgtttattgtactttgtatattatttcctcttcaaagtctttcttacatactctatcctctgcactgttaatagtaacctatgacataattgtaaatattcagctttttgctaacttttgtattttgaaaaactttaaaataaaattgttgacta

SEQ ID NO: 408159 - DNA, 641 bp, Homo sapiens
tttagtagagacggggtttctccatgttggtcaagctggtcccgaactcctgacctcaggtgatccgcttgcctcggcctcccaaagtgctgggattacaggtgtaagccactgcgcccagccactttgtttcttatcaataccttcttgtcctctctgtcaatctaaaataatctttcaaaagttgatcatacaaattatgtctcgattccagatgtgattcatttgtaaaggtgcgtggcgagtttgttttatcaaaaggcagggttctttataggactgaagaaaatctgctaacttaagtatgattatatttaatgtagtatatgaaaatggtattaaaagtaaaattttaaattttaccgtcccctcaaccacagcaaaaaaattgaagttaacattacccatgcagtgaataatgagttgtatttctcactttagagagtttattatctgttcaaaatagattgaataatcttgttatagacaaaaatcacaaatagtaattttactttaaaaaactgtatagtggtattttgctctcttttttaaaagtaactgtgttgccatggattgggataaagatggagatgtcctagcagtgattgctgagaaatctagctgcatttatctttgggatg

SEQ ID NO: 408160 - DNA, 4131 bp, Homo sapiens
  misc_feature (1412)..(1412): n is a, c, g, or t
atagttcgcgtagcggctcgagcgtggagatgaagcgtattttctcactgctagaaaagacttggcttggcgcaccaatacagtttgcctggcaaaaaacatcaggaaactaccttgcagtaacaggagctgattatattgtgaaaatctttgatcgccatggtcaaaaaagaagtgaaattaacttacctggtaactgtgttgccatggattgggataaagatggagatgtcctagcagtgattgctgagaaatctagctgcatttatctttgggatgccaacacaaataagaccagccagttagacaatggcatgagggatcaaatgtctttccttctttggtcaaaagttggaagtttcctggctgttggaactgttaaaggaaatttggttatttataatcatcagacatctcgaaagattcctgtccttggaaaacatactaagagaatcacttgtggatgttggaatgcagaaaatctgcctgctttaggtggtgaagataaaatgattacagttagtaatcaggaaggtgacacgataagacagacacaagtgagatcagagcctagcaacatgcagtttttcttgatgaagatggatgaccgaacctctgctgctgaaagcatgataagtgtggtgcttggcaagaaaactttgttttttttaaatctgaatgaaccagataacccagctgatcttgaatttcagcaggactttggcaacattgtctgctataattggtatggtgatggccgcatcatgattggtttttcatgtggacattttgtggtcatttctactcatactggagagcttggtcaagagatatttcaggctcgtaaccataaagataatctaaccagcattgcagtatcacagactcttaacaaagttgctacatgtggagataactgcattaaaatccaagacttggttgacttaaaagacatgtatgttatactcaacctggatgaggaaaataaaggattgggtaccttgtcctggactgatgatggccagttgctagcactctctacccaaaggggctcacttcatgttttcctgaccaagcttcccatacttggggatgcctgcagcacaaggattgcctatctcacctccctccttgaagtcaccgtagccaaccctgttgaaggagagctaccaatcacagtttctgttgatgtggaacccaactttgtggcagtaggtctttatcatctggctgtaggaatgaataatcgagcttggttttatgtccttggagaaaatgctgtgaaaaaattgaaagatatggagtatctgggaacagtagccagtatttgccttcattctgactatgctgctgcactttttgaaggcaaagtccagttacatttgatagaaagcgaaatcttggatgctcangaagaacgtgagactcggcttttcccagcagtggatgataagtgccgtatcttatgccatgccttaactagtgatttcctcatctatggtacagatactggtgtcgttcagtatttctacattgaagactggcaattcgttaatgattatcgacatcctgtcagtgtgaaaaagatttttcccgacccaaatgggaccagattagttttcattgatgaaaaaagtgatggatttgtttactgtccagtcaatgacgctacctatgagattccagatttttcaccaaccattaaaggtgttctttgggaaaactggccaatggataaaggtgtatttattgcttatgatgatgataaggtgtacacttatgtctttcacaaggacactatacaaggagccaaggttattttggctggtagcaccaaagttccttttgctcataaacctttgctgctatataatggagagctgacctgccaaacacagagtggaaaagtaaacaacatctaccttagcacccatggctttctcagcaacttaaaagatacggggcctgacgaactgagaccaatgctggcacagaatttaatgctaaagaggttttctgatgcttgggaaatgtgcaggattctgaatgatgaggctgcctggaatgagttggccagagcttgtctacatcacatggaagtggagtttgcaatccgtgtttatcggagaattggaaatgttggcatagtgatgtccttggaacaaataaagggaatagaggactacaatcttttggcaggacaccttgccatgtttaccaacgattataacctggctcaggacttgtaccttgcatccagctgtcctattgctgccctggagatgagaagggatttacagcattgggacagtgctctacaactggcaaagcatttggccccagaccagataccttttatatcaaaagaatatgctattcagcttgaattcgcgggtgattatgtaaatgctttggctcattatgagaaaggaataacaggtgataataaggaacatgatgaagcttgtctggctggagtggcccagatgtccataagaatgggagacatacgtcgaggggttaaccaagccctcaagcatcccagcagggtccttaaaagagactgtggagccatattggagaatatgaagcaattttcagaagcggcccaactgtatgaaaaaggtctctactacgataaagcagcatctgtttacatccgctctaagaattgggcaaaagttggtgatcttctgccccacgtttcttctcctaagatccatttgcagtatgccaaagccaaggaagcagatggaagatacaaagaagctgttgtagcttatgaaaatgcaaaacagtggcaaagtgtaatccgcatctatctggatcacctcaataatcctgaaaaagctgtcaatattgttagagagacccagtctctggatggagccaaaatggtagccaggttttttctacagcttggtgactatgggtctgccatccagtttcttgtcatgtccaaatgcaacaatgaagctttcacactggctcagcaacacaacaaaatggaaatctatgcagatattattggttctgaagacactactaatgaagactatcaaagcattgccttatactttgaaggagaaaagagatatcttcaggctggaaaattcttcttgctgtgtggccaatattcacgagcacttaaacacttcctgaaatgcccaagctcggaagataatgtggcaatagaaatggcaattgaaactgttggtcaggccaaagatgaactgctgaccaatcagctgatagaccatctcctgggggagaacgatggcatgcctaaggatgccaagtacctgttccgcttgtacatggctctgaagcaataccgagaagctgcccagactgccatcatcattgccagagaagagcagtctgcaggcaactaccggaatgcacacgatgttctcttcagtatgtatgcagaactgaaatcccagaagatcaaaattccctccgagatggccaccaacctcatgattctgcacagctatatactagtaaagattcatgttaaaaatggagatcacatgaaaggggctcgcatgctcattcgggtggccaacaacatcagcaaatttccatcacacattgtacccatcctgacgtcaactgtgattgagtgtcacagggcaggcctgaagaactctgctttcagcttcgcagctatgttgatgaggcctgaataccgcagcaaaatagatgccaaatacaaaaagaagatcgagggaatggtcaggtaggcagagatggctatttctgctatctaatcgtatttctcaaagtatttccaaaaatgtagctgccagtgtgcaagctcaataagaaaacggtggggggccaggtgcagtggctcacacctataatcccaacactttggaaggctgaggtggacaaatcacttgaggtcagtagttcaagaccagcctggccaatatgatgaaaccctatctctactaaaaatacaaaaattggctgggcgtggtggtgcacacctgtagtcccagctactcaggaggctggggcaggagaattgcttgaacccgggaggcagaggttgcagtgagccgagatcgtgccattgcactccagcctgggcaacagagtgagaccccatctcaaaaa

SEQ ID NO: 408161 - DNA, 1381 bp, Homo sapiens
tatttttgttgttgttacatcaaagtctaccatgcgggcaaggtatgggataggacaggcactctcatgactgctggtggggatggaaattggtatggcctttgcagaaagcagtttggcaatttgtggtaagagtattttttaaaaggtcctgtttttgagccagtaattctgggtgtctgtcctgaagaaagaatttgatgcctgcagagagattagtgtataaagtcattaatccccctaatgcttttatcagcagtcctgtcagatgcaaaaaatatctaagaggcatgaaaggaaactcatggaagtgttgcctcaaggggtgcaggtcctagtgttacaaggcagaacatggtgtcatcaaaggaaaagcacttgatgggcagttagcctgaccccacagctacgtactttcctcattaaacagatcatatctggttctttgcagaaaaagcaaagttcagagaccatgaccctgttttcctacagaaccagggtggaatcccgcctgtatcactgaggacagcagacactgtgctgttgctgctctccccttttctcttgcagacattgtacccatcctgacgtcaactgtgattgagtgtcacagggcaggcctgaagaactctgctttcagcttcgcagctatgttgatgaggcctgaataccgcagcaaaatagatgccaaatacaaaaagaagatcgagggaatggtcaggagacccgatatatctgagatagaagaggccacgactccatgtccattctgcaaatttcttctcccagagtgtgaactcctctgtcctggatgtaaaaacagtatcccatattgcattgcaacaggtcgacacatgttgaaagatgactggacggtgtgtccacattgtgacttccctgctctatactcagaattgaagatcatgctaaacactgaaagcacatgtcctatgtgttcagaaagattaaacgctgctcagctgaaaaagatttcagactgtacccagtacctgcgaacggaggaggaactgtgattggcacgtgcagatacaatgctcctgagaagacagcattttccacaggaggctgtttcctcccctggtggatttaagagacggtcctttctggatacagagaaatgaaacaacggtgacctctccaggtcggcactttccacttctgtacggtggcaaaacgatgacatgtaaccttgctgtttattgtactttgtatattatttcctcttcaaagtctttcttacatactctatcctctgcactgttaatagtaacctatgacataattgtaaatattcagctttttgctaacttttgtattttgaaaaactttaaaataaaattgttgactagaaaaaaaaaac

SEQ ID NO: 408162 - DNA, 4351 bp, Homo sapiens
  misc_feature (1412)..(1412): n is a, c, g, or t
atagttcgcgtagcggctcgagcgtggagatgaagcgtattttctcactgctagaaaagacttggcttggcgcaccaatacagtttgcctggcaaaaaacatcaggaaactaccttgcagtaacaggagctgattatattgtgaaaatctttgatcgccatggtcaaaaaagaagtgaaattaacttacctggtaactgtgttgccatggattgggataaagatggagatgtcctagcagtgattgctgagaaatctagctgcatttatctttgggatgccaacacaaataagaccagccagttagacaatggcatgagggatcaaatgtctttccttctttggtcaaaagttggaagtttcctggctgttggaactgttaaaggaaatttggttatttataatcatcagacatctcgaaagattcctgtccttggaaaacatactaagagaatcacttgtggatgttggaatgcagaaaatctgcctgctttaggtggtgaagataaaatgattacagttagtaatcaggaaggtgacacgataagacagacacaagtgagatcagagcctagcaacatgcagtttttcttgatgaagatggatgaccgaacctctgctgctgaaagcatgataagtgtggtgcttggcaagaaaactttgttttttttaaatctgaatgaaccagataacccagctgatcttgaatttcagcaggactttggcaacattgtctgctataattggtatggtgatggccgcatcatgattggtttttcatgtggacattttgtggtcatttctactcatactggagagcttggtcaagagatatttcaggctcgtaaccataaagataatctaaccagcattgcagtatcacagactcttaacaaagttgctacatgtggagataactgcattaaaatccaagacttggttgacttaaaagacatgtatgttatactcaacctggatgaggaaaataaaggattgggtaccttgtcctggactgatgatggccagttgctagcactctctacccaaaggggctcacttcatgttttcctgaccaagcttcccatacttggggatgcctgcagcacaaggattgcctatctcacctccctccttgaagtcaccgtagccaaccctgttgaaggagagctaccaatcacagtttctgttgatgtggaacccaactttgtggcagtaggtctttatcatctggctgtaggaatgaataatcgagcttggttttatgtccttggagaaaatgctgtgaaaaaattgaaagatatggagtatctgggaacagtagccagtatttgccttcattctgactatgctgctgcactttttgaaggcaaagtccagttacatttgatagaaagcgaaatcttggatgctcangaagaacgtgagactcggcttttcccagcagtggatgataagtgccgtatcttatgccatgccttaactagtgatttcctcatctatggtacagatactggtgtcgttcagtatttctacattgaagactggcaattcgttaatgattatcgacatcctgtcagtgtgaaaaagatttttcccgacccaaatgggaccagattagttttcattgatgaaaaaagtgatggatttgtttactgtccagtcaatgacgctacctatgagattccagatttttcaccaaccattaaaggtgttctttgggaaaactggccaatggataaaggtgtatttattgcttatgatgatgataaggtgtacacttatgtctttcacaaggacactatacaaggagccaaggttattttggctggtagcaccaaagttccttttgctcataaacctttgctgctatataatggagagctgacctgccaaacacagagtggaaaagtaaacaacatctaccttagcacccatggctttctcagcaacttaaaagatacggggcctgacgaactgagaccaatgctggcacagaatttaatgctaaagaggttttctgatgcttgggaaatgtgcaggattctgaatgatgaggctgcctggaatgagttggccagagcttgtctacatcacatggaagtggagtttgcaatccgtgtttatcggagaattggaaatgttggcatagtgatgtccttggaacaaataaagggaatagaggactacaatcttttggcaggacaccttgccatgtttaccaacgattataacctggctcaggacttgtaccttgcatccagctgtcctattgctgccctggagatgagaagggatttacagcattgggacagtgctctacaactggcaaagcatttggccccagaccagataccttttatatcaaaagaatatgctattcagcttgaattcgcgggtgattatgtaaatgctttggctcattatgagaaaggaataacaggtgataataaggaacatgatgaagcttgtctggctggagtggcccagatgtccataagaatgggagacatacgtcgaggggttaaccaagccctcaagcatcccagcagggtccttaaaagagactgtggagccatattggagaatatgaagcaattttcagaagcggcccaactgtatgaaaaaggtctctactacgataaagcagcatctgtttacatccgctctaagaattgggcaaaagttggtgatcttctgccccacgtttcttctcctaagatccatttgcagtatgccaaagccaaggaagcagatggaagatacaaagaagctgttgtagcttatgaaaatgcaaaacagtggcaaagtgtaatccgcatctatctggatcacctcaataatcctgaaaaagctgtcaatattgttagagagacccagtctctggatggagccaaaatggtagccaggttttttctacagcttggtgactatgggtctgccatccagtttcttgtcatgtccaaatgcaacaatgaagctttcacactggctcagcaacacaacaaaatggaaatctatgcagatattattggttctgaagacactactaatgaagactatcaaagcattgccttatactttgaaggagaaaagagatatcttcaggctggaaaattcttcttgctgtgtggccaatattcacgagcacttaaacacttcctgaaatgcccaagctcggaagataatgtggcaatagaaatggcaattgaaactgttggtcaggccaaagatgaactgctgaccaatcagctgatagaccatctcctgggggagaacgatggcatgcctaaggatgccaagtacctgttccgcttgtacatggctctgaagcaataccgagaagctgcccagactgccatcatcattgccagagaagagcagtctgcaggcaactaccggaatgcacacgatgttctcttcagtatgtatgcagaactgaaatcccagaagatcaaaattccctccgagatggccaccaacctcatgattctgcacagctatatactagtaaagattcatgttaaaaatggagatcacatgaaaggggctcgcatgctcattcgggtggccaacaacatcagcaaatttccatcacacattgtacccatcctgacgtcaactgtgattgagtgtcacagggcaggcctgaagaactctgctttcagcttcgcagctatgttgatgaggcctgaataccgcagcaaaatagatgccaaatacaaaaagaagatcgagggaatggtcaggagacccgatatatctgagatagaagaggccacgactccatgtccattctgcaaatttcttctcccagagtgtgaactcctctgtcctggatgtaaaaacagtatcccatattgcattgcaacaggtcgacacatgttgaaagatgactggacggtgtgtccacattgtgacttccctgctctatactcagaattgaagatcatgctaaacactgaaagcacatgtcctatgtgttcagaaagattaaacgctgctcagctgaaaaagatttcagactgtacccagtacctgcgaacggagccacaggaggctgtttcctcccctggtggatttaagagacggtcctttctggatacagagaaatgaaacaacggtgacctctccaggtcggcactttccacttctgtacggtggcaaaacgatgacatgtaaccttgctgtttattgtactttgtatattatttcctcttcaaagtctttcttacatactctatcctctgcactgttaatagtaacctatgacataattgtaaatattcagctttttgctaacttttgtattttgaaaaactttaaaataaaattgttgactagaaaaaaaaaac

SEQ ID NO: 408163 - DNA, 546 bp, Homo sapiens
aatgaagtataaagcgttgagctcaaccctttatacttctcaacgctttatacttcctcaacgctttatacttctcaaacgctttatacttccaccatcaacaaagaagaccacacactgggaaacatcattaaatcacaactcctaaaagacccgcaagtgctatttgctggctacaaagtcccccaccccttggagcacaagatcatcatccgagtgcagaccacgccggactacagcccccaggaagcctttaccaacgccatcaccgacctcatcagtgagctgtccctgctggaggagcgctttcgggtggccataaaagacaagcaggaaggaattgagtaggggccagagggggctctgctcggcctgtgagccccgttcctacctgtgcctgaccctccgctccaggtaccacaccgaggagagcggccggtcccagccatggcccgccttgtggccacccctcaccctgacaccgacgtgtcctgtacatagattaggttttatattcctaataaagtatagcggaagagacctgga

SEQ ID NO: 408164 - DNA, 351 bp, Homo sapiens
  misc_feature (341)..(341): n is a, c, g, or t
aaatcagtcgtaccgtccacccgacggggtggcggcggcggcggacccttggggtctggacgcaacggcggcgggagcatgaacgcccctccagccttcgagtcgttcttgctcttcgagggcgagaagaagatcaccattaacaaggacaccaaggtacccaatgcctgtttattcaccatcaacaaagaagaccacacactgggaaacatcattaaatcacaactcctaaaagacccgcaagtgctatttgctggctacaaagtcccccaccccgtcgggtggagcaccccgtcgggtggagcaccccgtcgggtggagcaccccgtcgggtggagcancccctcgggt

SEQ ID NO: 408165 - DNA, 404 bp, Homo sapiens
gccaaagaattcggcacgaggggtgacatgtgcctttaatcccaggtactaaggaagctgaggtaggaggatgacttgagcctaggagttcgaggctgcacaattattgtgccagacccctaggttaacagtgaggattcagtgggagaactaaacagataaacagatccagtccccgccctcagagagttacagtttaatgggaaaaagagacattcaccaaagaaggacacagcccactagtgagttacactcgagagggatcatttacagaacaaagcagattacaggcgtgagccatcaagtctggcgagagagattgtttctagatgagggtgggggcgggtgtccttagcccaaagcttgtgccagtctctatcagaaataaatgcccccaaaacctc

SEQ ID NO: 408166 - DNA, 630 bp, Homo sapiens
tattaggactctggggcggcggtggcggacacttggggtctggacgcaacggcggcgggagcatgaacgcccctccagccttcgagtcgttcttgctcttcgagggcgagaagtaagtgacgccggctgcggagggccgaggatcaccattaacaaggacaccaaggtacccaatgcctgtttattcaccatcaacaaagaagaccacacactgggaaacatcattaaatcgtaagtttcccgtcacaggctctcaggggctatgtttaatgggcccctctgggcaaagcacaagttccaagtcttcctcagtctctctgagctacaggaagtccttctgggggcttgctctgggcattttataatcttggtacctttttatcaaaatgacaccgacctccatgtcttcacataagccacacttctgtagtggcttattctgtagatgaacacgtgcatttacattcactgtttggttgtctgttagtttttgagatggaattttctctctttgttgcccaggctggagtgcaatggcacgatcttgctcactgcaacctccgcctcccgggttcaagtgattctcctgcttcagccttcctagtagctgggactacaggcccacgccac

SEQ ID NO: 408167 - DNA, 431 bp, Homo sapiens
tattaggactctggggcggcggtggcggacacttggggtctggacgcaacggcggcgggagcatgaacgcccctccagccttcgagtcgttcttgctcttcgagggcgagaagatcaccattaacaaggacaccaaggtacccaatgcctgtttattcaccatcaacaaagaagaccacacactgggaaacatcattaaatcacaactcctaaaagacccgcaagtgctatttgctggctacaaagtcccccaccccttggagcacaagatcatcatccgagtgcagaccacgccggactacagcccccaggaagcctttaccaacgccatcaccgacctcatcagcgagctgtccctgctggaggagcgcttccggacgtgcctgcttccccttcgccttcccaaagcacagcgccgtcccaaagcacag

SEQ ID NO: 408168 - DNA, 395 bp, Homo sapiens
gagttttttaccagggtccccccaaaaaaaaaaaaaaaaaaaaaaaaaaagagaaagaaagtatcatgcttttctgcattctgtgaattgttttagtgagttatcgaacttgagggcatggtgggaacctccaaatttgcagccagttggtgagaagtacatgtggtctgaggacacccaagcctgcaggtgtgtctaaagcgagggcagcctagtggggactggtggccttaacctgtgtgagcactgcacccagccttatgtttttttctacataaaaaacagcacaggattatcttccagagctaataaatatgttcaaataaccacaaccccattaaggaaaaatatcactgggcagcaaataatcaatccagaccaagggatcatcacaa

SEQ ID NO: 408169 - DNA, 522 bp, Homo sapiens
gtgatgatcccatcaggcagggagaccccacaaggctcagagagggccaaagcgtgcacaggacaccgagtgagctctatctcgctcatagggattctgattccaaatacggggctccttctgctaagacacactcaaatcaacaccctgaagacacaacagaaagaacaatgaaaattgtccatttgtagaattttcttccccaagctatcaaggtagctaaatgtttagctttgttataaaaaataaagataaaaaataaaaattaaaaatggatgtagatgctatgttgctgaggctggcctcaaactcctggcctcaggtgatcctcccgccatgacctccaaaaccacagggattgtaggtgtgagcactgcacccagccttatgtttttttctacataaaaaacagcacaggattatcttccagagctaataaatatgttcaaataaccacaaccccattaaggaaaaatatcactgggcagcaaataatcaatccagaccaagggatcatcacaa

SEQ ID NO: 408170 - DNA, 425 bp, Homo sapiens
acactgaccagaacttaagatggttatatacaatttacaaatctcaaagaaagtactacttaaaaaaaaaaaaaagagaaagaaagtatcatgcttttctgcattctgtgaattgttttagtgagttatcgaacttgagggcatggtgggaacctccaaatttgcagccagttggtgagaagtacatgtggtctgaggacacccaagcctgcaggtgtgtctaaagcgagggcagcctagtggggactggtggccttaacctgtggcatttgaggtaacatcagggagttgacatcagaattgcatcacataggctgggcgcggtggctcacgcctgtaatcctagcactttgggaggccaaggcgggcagatcacgaggtcaggagatcgagaccatcctggctaagacagtgaaatcccgtct

SEQ ID NO: 408171 - DNA, 246 bp, Homo sapiens
gcggccgcctactactactactgctcgaattcaagcttctaacgatgtacggggacatgttggccaggatggcctccatctcttgaccttgtgatccgcccgactcggcctcccaaaatgctgggattacaggcgtgagccatcaagtctggcgagagagattgtttctagatgagggtgggggcgggtgtccttagcccaaagcttgtgccagtctctatcagaaataaatgcccccaaaacctc

SEQ ID NO: 408172 - DNA, 930 bp, Homo sapiens
cttgggggatttcaacgtctgagtcgtctgctcaccaggaagcctctggggcctctgactcctgccggggctgccatagagaatggctggattgggccagctgggagggccctttggctgctccactgtcctggggagtgtggcccatggctgccctccaggaagggcctggcgggggggatgctgggcatgtgtttccagcgtccttgccccagctgttccagctcagtctccaccaccttcttctctcccaggtggccataaaagacaagcaggaaggaattgagtaggggccagagggggctctgctcggcctgtgagccccgttcctacctgtgcctgaccctccgctccaggtaccacaccgaggagagcggccggtcccagccatggcccgccttgtggccacccctcaccctgacaccgacgtgtcctgtacatagattaggttttatattcctaataaagtatagcggaagagacctggatgtggacttgagcagcggtgacttcgcaagcaaatggattgtcaggcttgatgcaggcagatgacctgtttcaggggcgtccggctggcagggatgaattcattctggaccaaagatccggggtccaggggctgctgcgggggctgtgctgagccggagagaagtgtgcaaacccatgagctcccaagagtctctgctctagaagcctcaactcctgggcctgcctgtcagtcaaagcaggaacacttcttcctgcataactcgaaacacctttccacaggcttcttgtccacagtagagtttaataaaaatattcactgaaagaccccccccacccccatcggcccaaagctgaataagttagttagctgtgtccctggtcctttgcgatggtgtgaggctacatcctcccccagatggctacgatgttggagtccgtcag

SEQ ID NO: 408173 - DNA, 625 bp, Homo sapiens
gcggccgcctactactactactgctcgaattcaagcttctaacgatgtacggggacatggcccgccttgtggccacccctcaccatggcccgccttgtggccacccctcaccctgacaccgacgtgtcctgtacatagattaggttttatattcctaataaagtatagcggaagagacctggatgtggacttgagcagcggtgacttcgcaagcaaatggattgtcaggcttgatgcaggcagatgacctgtttcaggggcgtccggctggcagggatgaattcattctggaccaaagatccggggtccaggggctgctgcgggggctgtgctgagccggagagaagtgtgcaaacccatgagctcccaagagtctctgctctagaagcctcaactcctgggcctgcctgtcagtcaaagcaggaacacttcttcctgcataactcgaaacacctttccacaggcttcttgtccacagtagagtttaataaaaatattcactgaaagaccccccccacccccatcggcccaaagctgaataagttagttagctgtgtccctggtcctttgcgatggtgtgaggctacatcctcccccagatggctacgatgttggagtccgtcag

SEQ ID NO: 408174 - DNA, 156 bp, Homo sapiens
gcggccgcctactactactactgctcgaattcaagcttctaacgatgtacggggaccatggcccgccttgtggccacccctcaccctgacaccgacgtgtcctgtacatagattaggttttatattcctaataaagtatagcggaagagacctgga

SEQ ID NO: 408175 - DNA, 783 bp, Homo sapiens
tgattctcctgcctcagtctcccaggtagctggactacaggcatggatcaccacgctcagctaattttttttttctttgtatttttagtacaggcagggttttgccatgttgggcgggctggtcttgaacttctgacctcaggtcatccatccacctcagcctcccaaagtgttgggattacaggcacgagccaccacacctggccgggaggagacagggtttagactcagggtgggaggaggggagcccctgctcctcatctgtggcctctgtgtcttcctaggatcaccattaacaaggacaccaaggtacccaatgcctgtttattcaccatcaacaaagaagaccacacactgggaaacatcattaaatcacaactcctaaaagacccgcaagtgctatttgctggctacaaagtcccccaccccttggagcacaagatcatcatccgagtgcagaccacgccggactacagcccccaggaagcctttaccaacgccatcaccgacctcatcagtgagctgtccctgctggaggagcgctttcgggtggccataaaagacaagcaggaaggaattgagtaggggccagagggggctctgctcggcctgtgagccccgttcctacctgtgcctgaccctccgctccaggtaccacaccgaggagagcggccggtcccagccatggcccgccttgtggccacccctcaccctgacaccgacgtgtcctgtacatagattaggttttatattcctaataaagtatagcggaagagacctgga

SEQ ID NO: 408176 - DNA, 625 bp, Homo sapiens
cgacccctcctcagcagacgcaggtggcggcggcggcggacccttggggtctggacgcaacggcggcgggagcatgaacgcccctccagccttcgagtcgttcttgctcttcgagggcgagaagaagatcaccattaacaaggacaccaaggtacccaatgcctgtttattcaccatcaacaaagaagaccacacactgggaaacatcattaaatcacaactcctaaaagacccgcaagtgctatttgctggctacaaagtcccccaccccttggagcacaagatcatcatccgagtgcagaccacgccggactacagcccccaggaagcctttaccaacgccatcaccgacctcatcagtgagctgtccctgctggaggagcgctttcgggtggccataaaagacaagcaggaaggaattgagtaggggccagagggggctctgctcggcctgtgagccccgttcctacctgtgcctgaccctccgctccaggtaccacaccgaggagagcggccggtcccagccatggcccgccttgtggccacccctcaccctgacaccgacgtgtcctgtacatagattaggttttatattcctaataaagtatagcggaagagacctgga

SEQ ID NO: 408177 - DNA, 2811 bp, Homo sapiens
  misc_feature (503)..(503): n is a, c, g, or t
  misc_feature (801)..(801): n is a, c, g, or t
  misc_feature (830)..(830): n is a, c, g, or t
  misc_feature (1055)..(1055): n is a, c, g, or t
cgacccctcctcagcagacgcaggtggcggcggcggcggacccttggggtctggacgcaacggcggcgggagcatgaacgcccctccagccttcgagtcgttcttgctcttcgagggcgagaagaagatcaccattaacaaggacaccaaggtacccaatgcctgtttattcaccatcaacaaagaagaccacacactgggaaacatcattaaatcacaactcctaaaagacccgcaagtgctatttgctggctacaaagtcccccaccccttggagcacaagatcatcatccgagtgcagaccacgccggactacagcccccaggaagcctttaccaacgccatcaccgacctcatcagtgagctgtccctgctggaggagcgctttcggacgtgcctgcttccccttcgccttctgccgtgattgtcagtttcctgaggcctccccagccacgcttcctgtacagcctgcagaactagacggggtttttccacgttggtcnggctggtctcaaacttctgacctcagatgatccgcccaccttggccacccaaagtgctgggattacaggtgtgaaccactgcgcccggccagaagtttttcttgtgagttgaggtgaacatctgaatcccctcggggaactgaggaggaggaactaccctgccctgacagaggctggggatgaaggaggaagagacagccggtcccctggataaagaggtgagggggtgtgaagtctgggagcccccctcccagggccaggctacagggggacagcagggctataccaggagtgccanagagcttgcatttgggtgtgatctaatcnccagtcctgccctgacctcctgggtgctcttagccaagccctcttccctgtgtgtgctagaaagtgagggtcactcccttccacacaagggagtgaattgagggtggggatctgagctctctgagcagcaaagctggacacaggccaaattgccaatcctgagtccctctgtcatgtggacctgggaagcttgtcctcatcctccatccttccccagggtggggnctgagaatctgagtgcagtggtgccatcttggctcactgcagcctcaacctcgctcgagtgatcctcccacctcaggtcctaaaggaagagtcgctacattggggactgtttggacaaggagatccacggggtagacttagcgggattgtccctggggcagcctggatcctgaggctgccccgcctccttcctcagcccctccctggtcaggcgctcctggtgggtggggggggtagtccaggcttgtcttgcaactgtatgttctcttcagacccctccctggcgatgccagattcactgggctggcagattctgcccccaaacctgtccaaccagttgtttgagaggagggggtagctgggaggggcagcaggagatgccaggaacagcttcccctagcacagcacagactacagacaggggagcctctggggctgcagacactgcagacggacggacagacagatggacaacagctggaggcttggcccggccatagggctctctgcgggacagtcccagctgctagtgtcgctgttgctgctactgacccgtgtccagcctgggacagacgtggctgccccagagcacatcagctatgtgccccagctctcaaacgacaccttggcggggaggctcaccctgtccaccttcacgctggagcagcctctaggccagttcagcagccacaacatctctgacttggataccatctggctggtggtggccctcagcaacgccacccagagcttcacggccccacggacaaaccaggacatccctgctcctgccaacttctcccagaggggctactatctcacactgagggccaaccgggtgctgtaccagaccagaggccagctccatgtcctccgcgtcggcaatgatacccactgccaaccaacaaaaattggctgcaaccatcccctaccaggacccggcccctacagggtgaagttcctggtgatgaatgacgaaggacccgtggctgaaaccaagtggtccagcgacactcgcctgcagcaagcccaggcacttcgggctgtccccggcccccagagcccgggcaccgtggtcatcatcgccatcctgtctatcctcctggccgtcctcctcacggtcctcctggctgtgctcatatacacctgcttcaacagctgcaggagcacttccctatcaggcccagaggaggcagggagtgtgagaagatacaccacgcacctcgcgttcagcactcctgccgagggggcttcctgaggggttccagaggggcccacgtgtccctccacctcctccctggcccaggctgcagagcctgagctgggacacgccctgaagcttctggaccctgagagagattgtttcttttctttactatttttttttttttttttgagacggagtctcactctgtcgccaggctggcgcgatcttggctcactgcaacctctgcctcacgggttcaagcgattttcctgcttcagcctcctgagtagctgggactacaggcacacgccaccatgcccagctcatttttgtatttttagtagagatggggtttcaccatgttggccaggatggcctccatctcttgaccttgtgatccgcccgactcggcctcccaaaatgctgggattacaggcgtgagccatcaagtctggcgagagagattgtttctagatgagggtgggggcgggtgtccttagcccaaagcttgtgccagtctctatcagaaataaatgcccccaaaacctc

SEQ ID NO: 408178 - DNA, 1781 bp, Homo sapiens
ttgggtgtaacttacggctaggtacgaggctggtggcggcggcggcggacccttggggtctggacgcaacggcggcgggagcatgaacgcccctccagccttcgagtcgttcttgctcttcgagggcgagaagaagatcaccattaacaaggacaccaaggtacccaatgcctgtttattcaccatcaacaaagaagaccacacactgggaaacatcattaaatcacgtgcctgcttccccttcgccttctgccgtgattgtcagtttcctgaggcctccccagccacgcttcctgtacagcctgcagaactctgccccagagcacatcagctatgtgccccagctctcaaacgacaccttggcggggaggctcaccctgtccaccttcacgctggagcagcctctaggccagttcagcagccacaacatctctgacttggataccatctggctggtggtggccctcagcaacgccacccagagcttcacggccccacggacaaaccaggacatccctgctcctgccaacttctcccagaggggctactatctcacactgagggccaaccgggtgctgtaccagaccagaggccagctccatgtcctccgcgtcggcaatgatacccactgccaaccaacaaaaattggctgcaaccatcccctaccaggacccggcccctacagggtgaagttcctggtgatgaatgacgaaggacccgtggctgaaaccaagtggtccagcgacactcgcctgcagcaagcccaggcacttcgggctgtccccggcccccagagcccgggcaccgtggtcatcatcgccatcctgtctatcctcctggccgtcctcctcacggtcctcctggctgtgctcatatacacctgcttcaacagctgcaggagcacttccctatcaggcccagaggaggcagggagtgtgagaagatacaccacgcacctcgcgttcagcactcctgccgagggggcttcctgaggggttccagaggggcccacgtgtccctccacctcctccctggcccaggctgcagagcctgagctgggacacgccctgaagcttctggaccctgagagagattgtttcttttctttactatttttttttttttttttgagacggagtctcactctgtcgccaggctggcgcgatcttggctcactgcaacctctgcctcacgggttcaagcgattttcctgcttcagcctcctgagtagctgggactacaggcacacgccaccatgcccagctcatttttgtatttttagtagagatggggtttcaccatgttggccaggatggcctccatctcttgaccttgtgatccgcccgactcggcctcccaaaatgctgggattacaggcgtgagccatcaagtctggcgagagagattgtttctagatgagggtgggggcgggtgtccttagcccaaagcttgtgccagtctctatcagaaataaatgcccccaaaacctcccctgcctgtccgtgacatcatacacctgggtagtctttctgcaccactgcccctggctcctcctcctgaggaggtccccaagggcgtgtaggaccagggcaaggctcaggatcctagagaaattgtcacctggggcaggacaggcctctctgccagccttactgtccctatctgtaaaatgaggatggtaaccctgaacccacaaggccacagtaaggctaaaccaaggtgaacatgccttgggaactgtgaagactgtggaccccaagccggttgcggtggctcaggcc

SEQ ID NO: 408179 - DNA, 1656 bp, Homo sapiens
cgacccctcctcagcagacgcaggtggcggcggcggcggacccttggggtctggacgcaacggcggcgggagcatgaacgcccctccagccttcgagtcgttcttgctcttcgagggcgagaagaagatcaccattaacaaggacaccaaggtacccaatgcctgtttattcaccatcaacaaagaagaccacacactgggaaacatcattaaatcacaactcctaaaagacccgcaagtgctatttgctggctacaaagtcccccaccccttggagcacaagatcatcatccgagtgcagaccacgccggactacagcccccaggaagcctttaccaacgccatcaccgacctcatcagtgagctgtccctgctggaggagcgctttcggacgtgcctgcttccccttcgccttctgccgtgattgtcagtttcctgaggcctccccagccacgcttcctgtacagcctgcagaactctgccccagagcacatcagctatgtgccccagctctcaaacgacaccttggcggggaggctcaccctgtccaccttcacgctggagcagcctctaggccagttcagcagccacaacatctctgacttggataccatctggctggtggtggccctcagcaacgccacccagagcttcacggccccacggacaaaccaggacatccctgctcctgccaacttctcccagaggggctactatctcacactgagggccaaccgggtgctgtaccagaccagaggccagctccatgtcctccgcgtcggcaatgatacccactgccaaccaacaaaaattggctgcaaccatcccctaccaggacccggcccctacagggtgaagttcctggtgatgaatgacgaaggacccgtggctgaaaccaagtggtccagcgacactcgcctgcagcaagcccaggcacttcgggctgtccccggcccccagagcccgggcaccgtggtcatcatcgccatcctgtctatcctcctggccgtcctcctcacggtcctcctggctgtgctcatatacacctgcttcaacagctgcaggagcacttccctatcaggcccagaggaggcagggagtgtgagaagatacaccacgcacctcgcgttcagcactcctgccgagggggcttcctgaggggttccagaggggcccacgtgtccctccacctcctccctggcccaggctgcagagcctgagctgggacacgccctgaagcttctggaccctgagagagattgtttcttttctttactatttttttttttttttttgagacggagtctcactctgtcgccaggctggcgcgatcttggctcactgcaacctctgcctcacgggttcaagcgattttcctgcttcagcctcctgagtagctgggactacaggcacacgccaccatgcccagctcatttttgtatttttagtagagatggggtttcaccatgttggccaggatggcctccatctcttgaccttgtgatccgcccgactcggcctcccaaaatgctgggattacaggcgtgagccatcaagtctggcgagagagattgtttctagatgagggtgggggcgggtgtccttagcccaaagcttgtgccagtctctatcagaaataaatgcccccaaaacctc

SEQ ID NO: 408180 - DNA, 1631 bp, Homo sapiens
ttgggtgtaacttacggctaggtacgaggctggtggcggcggcggcggacccttggggtctggacgcaacggcggcgggagcatgaacgcccctccagccttcgagtcgttcttgctcttcgagggcgagaagaagatcaccattaacaaggacaccaaggtacccaatgcctgtttattcaccatcaacaaagaagaccacacactgggaaacatcattaaatcacgtgcctgcttccccttcgccttctgccgtgattgtcagtttcctgaggcctccccagccacgcttcctgtacagcctgcagaactctgccccagagcacatcagctatgtgccccagctctcaaacgacaccttggcggggaggctcaccctgtccaccttcacgctggagcagcctctaggccagttcagcagccacaacatctctgacttggataccatctggctggtggtggccctcagcaacgccacccagagcttcacggccccacggacaaaccaggacatccctgctcctgccaacttctcccagaggggctactatctcacactgagggccaaccgggtgctgtaccagaccagaggccagctccatgtcctccgcgtcggcaatgatacccactgccaaccaacaaaaattggctgcaaccatcccctaccaggacccggcccctacagggtgaagttcctggtgatgaatgacgaaggacccgtggctgaaaccaagtggtccagcgacactcgcctgcagcaagcccaggcacttcgggctgtccccggcccccagagcccgggcaccgtggtcatcatcgccatcctgtctatcctcctggccgtcctcctcacggtcctcctggctgtgctcatatacacctgcttcaacagctgcaggagcacttccctatcaggcccagaggaggcagggagtgtgagaagatacaccacgcacctcgcgttcagcactcctgccgagggggcttcctgaggggttccagaggggcccacgtgtccctccacctcctccctggcccaggctgcagagcctgagctgggacacgccctgaagcttctggaccctgagagagattgtttcttttctttactatttttttttttttttttgagacggagtctcactctgtcgccaggctggcgcgatcttggctcactgcaacctctgcctcacgggttcaagcgattttcctgcttcagcctcctgagtagctgggactacaggcacacgccaccatgcccagctcatttttgtatttttagtagagatggggtttcaccatgttggccaggatggcctccatctcttgaccttgtgatccgcccgactcggcctcccaaaatgctgggattacaggcgtgagccatcaagtctggcgagagagattgtttctagatgagggtgggggcgggtgtccttagcccaaagcttgtgccagtctctatcagaaataaatgcccccaaaacctctatggaagagcttcgctgagatcacataaatgcttgctgtctaaggctggggggggcccaccgtcctatttggcccttttgggagtcttgttacattaattgcccgtggtcacccaccgtccagactggtaaaaccctgtt

SEQ ID NO: 408181 - DNA, 1825 bp, Homo sapiens
  misc_feature (503)..(503): n is a, c, g, or t
cgacccctcctcagcagacgcaggtggcggcggcggcggacccttggggtctggacgcaacggcggcgggagcatgaacgcccctccagccttcgagtcgttcttgctcttcgagggcgagaagaagatcaccattaacaaggacaccaaggtacccaatgcctgtttattcaccatcaacaaagaagaccacacactgggaaacatcattaaatcacaactcctaaaagacccgcaagtgctatttgctggctacaaagtcccccaccccttggagcacaagatcatcatccgagtgcagaccacgccggactacagcccccaggaagcctttaccaacgccatcaccgacctcatcagtgagctgtccctgctggaggagcgctttcggacgtgcctgcttccccttcgccttctgccgtgattgtcagtttcctgaggcctccccagccacgcttcctgtacagcctgcagaactagacggggtttttccacgttggtcnggctggtctcaaacttctgacctcagatgatccgcccaccttggccacccaaagtgctgggattacaggtgtgaaccactgcgcccggccagaagtttttcttgtgagttgaggtgaacatctgaatcccctcggggaactgagctgccccagagcacatcagctatgtgccccagctctcaaacgacaccttggcggggaggctcaccctgtccaccttcacgctggagcagcctctaggccagttcagcagccacaacatctctgacttggataccatctggctggtggtggccctcagcaacgccacccagagcttcacggccccacggacaaaccaggacatccctgctcctgccaacttctcccagaggggctactatctcacactgagggccaaccgggtgctgtaccagaccagaggccagctccatgtcctccgcgtcggcaatgatacccactgccaaccaacaaaaattggctgcaaccatcccctaccaggacccggcccctacagggtgaagttcctggtgatgaatgacgaaggacccgtggctgaaaccaagtggtccagcgacactcgcctgcagcaagcccaggcacttcgggctgtccccggcccccagagcccgggcaccgtggtcatcatcgccatcctgtctatcctcctggccgtcctcctcacggtcctcctggctgtgctcatatacacctgcttcaacagctgcaggagcacttccctatcaggcccagaggaggcagggagtgtgagaagatacaccacgcacctcgcgttcagcactcctgccgagggggcttcctgaggggttccagaggggcccacgtgtccctccacctcctccctggcccaggctgcagagcctgagctgggacacgccctgaagcttctggaccctgagagagattgtttcttttctttactatttttttttttttttttgagacggagtctcactctgtcgccaggctggcgcgatcttggctcactgcaacctctgcctcacgggttcaagcgattttcctgcttcagcctcctgagtagctgggactacaggcacacgccaccatgcccagctcatttttgtatttttagtagagatggggtttcaccatgttggccaggatggcctccatctcttgaccttgtgatccgcccgactcggcctcccaaaatgctgggattacaggcgtgagccatcaagtctggcgagagagattgtttctagatgagggtgggggcgggtgtccttagcccaaagcttgtgccagtctctatcagaaataaatgcccccaaaacctc

SEQ ID NO: 408182 - DNA, 2980 bp, Homo sapiens
  misc_feature (782)..(782): n is a, c, g, or t
  misc_feature (944)..(944): n is a, c, g, or t
  misc_feature (973)..(973): n is a, c, g, or t
  misc_feature (1198)..(1198): n is a, c, g, or t
ttgggtgtaacttacggctaggtacgaggctggtggcggcggcggcggacccttggggtctggacgcaacggcggcgggagcatgaacgcccctccagccttcgagtcgttcttgctcttcgagggcgagaagaagatcaccattaacaaggacaccaaggtacccaatgcctgtttattcaccatcaacaaagaagaccacacactgggaaacatcattaaatccgtaagtttcccgtcacaggctctcaggggctgtgtttaatgggcccccctgggcaaagcacaagttccaagtcttcctcagtctctctgagctacaggaagtccttctgggggcttgctctgggcattttataatcttggtacctttttatcaaaatgacaccgacctccatgtcttcacataagccacacttctgtagtggcttattctgtagatgaacatgtgcatttacattcactgtttgtttgtttgtttttgagatggaattttctctctttgttgcccaggctggagtgcaatggcaacgatcttggctcactgaaacctcggcctcccgggttcaagtaattctcctcttcagccttcctagtagctgggactacaggcccacgccacgatgcccggctaatttttgtgtttttagtagagatggggattcactgtgttggccaggctggtctcgaactcctgacctcaggtgatccacctgccggcttcccaaagtgctgggattacaggcgtgagccaccatgcctggacttccatctggtaattntctgtctcgaggaggaactaccctgccctgacagaggctggggatgaaggaggaagagacagccggtcccctggataaagaggtgagggggtgtgaagtctgggagcccccctcccagggccaggctacagggggacagcagggctataccaggagtgccanagagcttgcatttgggtgtgatctaatcnccagtcctgccctgacctcctgggtgctcttagccaagccctcttccctgtgtgtgctagaaagtgagggtcactcccttccacacaagggagtgaattgagggtggggatctgagctctctgagcagcaaagctggacacaggccaaattgccaatcctgagtccctctgtcatgtggacctgggaagcttgtcctcatcctccatccttccccagggtggggnctgagaatctgagaaccttgagcctgggaggtcaaggcctgcagtggtgccatcttggctcactgcagcctcaacctcgctcgagtgatcctcccacctcaggtcctaaaggaagagtcgctacattggggactgtttggacaaggagatccacggggtagacttagcgggattgtccctggggcagcctggatcctgaggctgccccgcctccttcctcagcccctccctggtcaggcgctcctggtgggtggggggggtagtccaggcttgtcttgcaactgtatgttctcttcagacccctccctggcgatgccagattcactgggctggcagattctgcccccaaacctgtccaaccagttgtttgagaggagggggtagctgggaggggcagcaggagatgccaggaacagcttcccctagcacagcacagactacagacaggggagcctctggggctgcagacactgcagacggacggacagacagatggacaacagctggaggcttggcccggccatagggctctctgcgggacagtcccagctgctagtgtcgctgttgctgctactgacccgtgtccagcctgggacagacgtggctgccccagagcacatcagctatgtgccccagctctcaaacgacaccttggcggggaggctcaccctgtccaccttcacgctggagcagcctctaggccagttcagcagccacaacatctctgacttggataccatctggctggtggtggccctcagcaacgccacccagagcttcacggccccacggacaaaccaggacatccctgctcctgccaacttctcccagaggggctactatctcacactgagggccaaccgggtgctgtaccagaccagaggccagctccatgtcctccgcgtcggcaatgatacccactgccaaccaacaaaaattggctgcaaccatcccctaccaggacccggcccctacagggtgaagttcctggtgatgaatgacgaaggacccgtggctgaaaccaagtggtccagcgacactcgcctgcagcaagcccaggcacttcgggctgtccccggcccccagagcccgggcaccgtggtcatcatcgccatcctgtctatcctcctggccgtcctcctcacggtcctcctggctgtgctcatatacacctgcttcaacagctgcaggagcacttccctatcaggcccagaggaggcagggagtgtgagaagatacaccacgcacctcgcgttcagcactcctgccgagggggcttcctgaggggttccagaggggcccacgtgtccctccacctcctccctggcccaggctgcagagcctgagctgggacacgccctgaagcttctggaccctgagagagattgtttcttttctttactatttttttttttttttttgagacggagtctcactctgtcgccaggctggcgcgatcttggctcactgcaacctctgcctcacgggttcaagcgattttcctgcttcagcctcctgagtagctgggactacaggcacacgccaccatgcccagctcatttttgtatttttagtagagatggggtttcaccatgttggccaggatggcctccatctcttgaccttgtgatccgcccgactcggcctcccaaaatgctgggattacaggcgtgagccatcaagtctggcgagagagattgtttctagatgagggtgggggcgggtgtccttagcccaaagcttgtgccagtctctatcagaaataaatgcccccaaaacctc

SEQ ID NO: 408183 - DNA, 1914 bp, Homo sapiens
ttgggtgtaacttacggctaggtacgaggctggtggcggcggcggcggacccttggggtctggacgcaacggcggcgggagcatgaacgcccctccagccttcgagtcgttcttgctcttcgagggcgagaagaagatcaccattaacaaggacaccaaggtacccaatgcctgtttattcaccatcaacaaagaagaccacacactgggaaacatcattaaatcacgtgcctgcttccccttcgccttctgccgtgattgtcagtttcctgaggcctccccagccacgcttcctgtacagcctgcagaactatgatccgcccaccttggccacccaaagtgctgggattacaggtgtgaaccactgcgcccggccagaagtttttcttgtgagttgaggtgaacatctgaatcccctcggggaactgagacccctccctggcgatgccagattcactgggctggcagattctgcccccaaacctgtccaaccagttgtttgagaggagggggtagctgggaggggcagcaggagatgccaggaacagcttcccctagcacagcacagactacagacaggggagcctctggggctgcagacactgcagacggacggacagacagatggacaacagctggaggcttggcccggccatagggctctctgcgggacagtcccagctgctagtgtcgctgttgctgctactgacccgtgtccagcctgggacagacgtggctgccccagagcacatcagctatgtgccccagctctcaaacgacaccttggcggggaggctcaccctgtccaccttcacgctggagcagcctctaggccagttcagcagccacaacatctctgacttggataccatctggctggtggtggccctcagcaacgccacccagagcttcacggccccacggacaaaccaggacatccctgctcctgccaacttctcccagaggggctactatctcacactgagggccaaccgggtgctgtaccagaccagaggccagctccatgtcctccgcgtcggcaatgatacccactgccaaccaacaaaaattggctgcaaccatcccctaccaggacccggcccctacagggtgaagttcctggtgatgaatgacgaaggacccgtggctgaaaccaagtggtccagcgacactcgcctgcagcaagcccaggcacttcgggctgtccccggcccccagagcccgggcaccgtggtcatcatcgccatcctgtctatcctcctggccgtcctcctcacggtcctcctggctgtgctcatatacacctgcttcaacagctgcaggagcacttccctatcaggcccagaggaggcagggagtgtgagaagatacaccacgcacctcgcgttcagcactcctgccgagggggcttcctgaggggttccagaggggcccacgtgtccctccacctcctccctggcccaggctgcagagcctgagctgggacacgccctgaagcttctggaccctgagagagattgtttcttttctttactatttttttttttttttttgagacggagtctcactctgtcgccaggctggcgcgatcttggctcactgcaacctctgcctcacgggttcaagcgattttcctgcttcagcctcctgagtagctgggactacaggcacacgccaccatgcccagctcatttttgtatttttagtagagatggggtttcaccatgttggccaggatggcctccatctcttgaccttgtgatccgcccgactcggcctcccaaaatgctgggattacaggcgtgagccatcaagtctggcgagagagattgtttctagatgagggtgggggcgggtgtccttagcccaaagcttgtgccagtctctatcagaaataaatgcccccaaaacctc

SEQ ID NO: 408184 - DNA, 1773 bp, Homo sapiens
ttgggtgtaacttacggctaggtacgaggctggtggcggcggcggcggacccttggggtctggacgcaacggcggcgggagcatgaacgcccctccagccttcgagtcgttcttgctcttcgagggcgagaagaaaagtaagtgacgccggctgcggagggccgaggatcaccattaacaaggacaccaaggtacccaatgcctgtttattcaccatcaacaaagaagaccacacactgggaaacatcattaaatcacgtgcctgcttccccttcgccttctgccgtgattgtcagtttcctgaggcctccccagccacgcttcctgtacagcctgcagaactgaggaggaactaccctgccctgacagaggctggggatgaaggaggaagagacagccggtcccctggataaagagcacagcacagactacagacaggggagcctctggggctgcagacactgcagacggacggacagacagatggacaacagctggaggcttggcccggccatagggctctctgcgggacagtcccagctgctagtgtcgctgttgctgctactgacccgtgtccagcctgggacagacgtggctgccccagagcacatcagctatgtgccccagctctcaaacgacaccttggcggggaggctcaccctgtccaccttcacgctggagcagcctctaggccagttcagcagccacaacatctctgacttggataccatctggctggtggtggccctcagcaacgccacccagagcttcacggccccacggacaaaccaggacatccctgctcctgccaacttctcccagaggggctactatctcacactgagggccaaccgggtgctgtaccagaccagaggccagctccatgtcctccgcgtcggcaatgatacccactgccaaccaacaaaaattggctgcaaccatcccctaccaggacccggcccctacagggtgaagttcctggtgatgaatgacgaaggacccgtggctgaaaccaagtggtccagcgacactcgcctgcagcaagcccaggcacttcgggctgtccccggcccccagagcccgggcaccgtggtcatcatcgccatcctgtctatcctcctggccgtcctcctcacggtcctcctggctgtgctcatatacacctgcttcaacagctgcaggagcacttccctatcaggcccagaggaggcagggagtgtgagaagatacaccacgcacctcgcgttcagcactcctgccgagggggcttcctgaggggttccagaggggcccacgtgtccctccacctcctccctggcccaggctgcagagcctgagctgggacacgccctgaagcttctggaccctgagagagattgtttcttttctttactatttttttttttttttttgagacggagtctcactctgtcgccaggctggcgcgatcttggctcactgcaacctctgcctcacgggttcaagcgattttcctgcttcagcctcctgagtagctgggactacaggcacacgccaccatgcccagctcatttttgtatttttagtagagatggggtttcaccatgttggccaggatggcctccatctcttgaccttgtgatccgcccgactcggcctcccaaaatgctgggattacaggcgtgagccatcaagtctggcgagagagattgtttctagatgagggtgggggcgggtgtccttagcccaaagcttgtgccagtctctatcagaaataaatgcccccaaaacctc

SEQ ID NO: 408185 - DNA, 1801 bp, Homo sapiens
ttgggtgtaacttacggctaggtacgaggctggtggcggcggcggcggacccttggggtctggacgcaacggcggcgggagcatgaacgcccctccagccttcgagtcgttcttgctcttcgagggcgagaagaagatcaccattaacaaggacaccaaggtacccaatgcctgtttattcaccatcaacaaagaagaccacacactgggaaacatcattaaatcacgtgcctgcttccccttcgccttctgccgtgattgtcagtttcctgaggcctccccagccacgcttcctgtacagcctgcagaactgccggacatggtggctcacacctggaatcccagaacttcaggaggctgaggtgggaggatcacttgagcccaggaatttgagaccagcctgggcaagaggaggaactaccctgccctgacagaggctggggatgaaggaggaagagacagccggtcccctggataaagaggcagacactgcagacggacggacagacagatggacaacagctggaggcttggcccggccatagggctctctgcgggacagtcccagctgctagtgtcgctgttgctgctactgacccgtgtccagcctgggacagacgtggctgccccagagcacatcagctatgtgccccagctctcaaacgacaccttggcggggaggctcaccctgtccaccttcacgctggagcagcctctaggccagttcagcagccacaacatctctgacttggataccatctggctggtggtggccctcagcaacgccacccagagcttcacggccccacggacaaaccaggacatccctgctcctgccaacttctcccagaggggctactatctcacactgagggccaaccgggtgctgtaccagaccagaggccagctccatgtcctccgcgtcggcaatgatacccactgccaaccaacaaaaattggctgcaaccatcccctaccaggacccggcccctacagggtgaagttcctggtgatgaatgacgaaggacccgtggctgaaaccaagtggtccagcgacactcgcctgcagcaagcccaggcacttcgggctgtccccggcccccagagcccgggcaccgtggtcatcatcgccatcctgtctatcctcctggccgtcctcctcacggtcctcctggctgtgctcatatacacctgcttcaacagctgcaggagcacttccctatcaggcccagaggaggcagggagtgtgagaagatacaccacgcacctcgcgttcagcactcctgccgagggggcttcctgaggggttccagaggggcccacgtgtccctccacctcctccctggcccaggctgcagagcctgagctgggacacgccctgaagcttctggaccctgagagagattgtttcttttctttactatttttttttttttttttgagacggagtctcactctgtcgccaggctggcgcgatcttggctcactgcaacctctgcctcacgggttcaagcgattttcctgcttcagcctcctgagtagctgggactacaggcacacgccaccatgcccagctcatttttgtatttttagtagagatggggtttcaccatgttggccaggatggcctccatctcttgaccttgtgatccgcccgactcggcctcccaaaatgctgggattacaggcgtgagccatcaagtctggcgagagagattgtttctagatgagggtgggggcgggtgtccttagcccaaagcttgtgccagtctctatcagaaataaatgcccccaaaacctc

SEQ ID NO: 408186 - DNA, 1645 bp, Homo sapiens
ttgggtgtaacttacggctaggtacgaggctggtggcggcggcggcggacccttggggtctggacgcaacggcggcgggagcatgaacgcccctccagccttcgagtcgttcttgctcttcgagggcgagaagaagatcaccattaacaaggacaccaaggtacccaatgcctgtttattcaccatcaacaaagaagaccacacactgggaaacatcattaaatcacgtgcctgcttccccttcgccttctgccgtgattgtcagtttcctgaggcctccccagccacgcttcctgtacagcctgcagaacttctggcatggaaaagcccctgtgcaactggtaaagatatcaataagcaccaggaggtatctaaatccaccaggagccataggcatcacgttgacatccatttaccagtcttccctggcaagattcttctgaattgtgctgccttggccaaaagagctgccccagagcacatcagctatgtgccccagctctcaaacgacaccttggcggggaggctcaccctgtccaccttcacgctggagcagcctctaggccagttcagcagccacaacatctctgacttggataccatctggctggtggtggccctcagcaacgccacccagagcttcacggccccacggacaaaccaggacatccctgctcctgccaacttctcccagaggggctactatctcacactgagggccaaccgggtgctgtaccagaccagaggccagctccatgtcctccgcgtcggcaatgatacccactgccaaccaacaaaaattggctgcaaccatcccctaccaggacccggcccctacagggtgaagttcctggtgatgaatgacgaaggacccgtggctgaaaccaagtggtccagcgacactcgcctgcagcaagcccaggcacttcgggctgtccccggcccccagagcccgggcaccgtggtcatcatcgccatcctgtctatcctcctggccgtcctcctcacggtcctcctggctgtgctcatatacacctgcttcaacagctgcaggagcacttccctatcaggcccagaggaggcagggagtgtgagaagatacaccacgcacctcgcgttcagcactcctgccgagggggcttcctgaggggttccagaggggcccacgtgtccctccacctcctccctggcccaggctgcagagcctgagctgggacacgccctgaagcttctggaccctgagagagattgtttcttttctttactatttttttttttttttttgagacggagtctcactctgtcgccaggctggcgcgatcttggctcactgcaacctctgcctcacgggttcaagcgattttcctgcttcagcctcctgagtagctgggactacaggcacacgccaccatgcccagctcatttttgtatttttagtagagatggggtttcaccatgttggccaggatggcctccatctcttgaccttgtgatccgcccgactcggcctcccaaaatgctgggattacaggcgtgagccatcaagtctggcgagagagattgtttctagatgagggtgggggcgggtgtccttagcccaaagcttgtgccagtctctatcagaaataaatgcccccaaaacctc

SEQ ID NO: 408187 - DNA, 2373 bp, Homo sapiens
  misc_feature (503)..(503): n is a, c, g, or t
  misc_feature (801)..(801): n is a, c, g, or t
  misc_feature (830)..(830): n is a, c, g, or t
  misc_feature (1055)..(1055): n is a, c, g, or t
cgacccctcctcagcagacgcaggtggcggcggcggcggacccttggggtctggacgcaacggcggcgggagcatgaacgcccctccagccttcgagtcgttcttgctcttcgagggcgagaagaagatcaccattaacaaggacaccaaggtacccaatgcctgtttattcaccatcaacaaagaagaccacacactgggaaacatcattaaatcacaactcctaaaagacccgcaagtgctatttgctggctacaaagtcccccaccccttggagcacaagatcatcatccgagtgcagaccacgccggactacagcccccaggaagcctttaccaacgccatcaccgacctcatcagtgagctgtccctgctggaggagcgctttcggacgtgcctgcttccccttcgccttctgccgtgattgtcagtttcctgaggcctccccagccacgcttcctgtacagcctgcagaactagacggggtttttccacgttggtcnggctggtctcaaacttctgacctcagatgatccgcccaccttggccacccaaagtgctgggattacaggtgtgaaccactgcgcccggccagaagtttttcttgtgagttgaggtgaacatctgaatcccctcggggaactgaggaggaggaactaccctgccctgacagaggctggggatgaaggaggaagagacagccggtcccctggataaagaggtgagggggtgtgaagtctgggagcccccctcccagggccaggctacagggggacagcagggctataccaggagtgccanagagcttgcatttgggtgtgatctaatcnccagtcctgccctgacctcctgggtgctcttagccaagccctcttccctgtgtgtgctagaaagtgagggtcactcccttccacacaagggagtgaattgagggtggggatctgagctctctgagcagcaaagctggacacaggccaaattgccaatcctgagtccctctgtcatgtggacctgggaagcttgtcctcatcctccatccttccccagggtggggnctgagaatctgagtgcagtggtgccatcttggctcactgcagcctcaacctcgctcgagtgatcctcccacctcaggtcctaaaggaagagtcgctacattggggactgtttggacaaggagatccacggggtagacttagcgggattgtccctggggcagcctggatcctgaggctgccccgcctccttcctcagcccctccctggtcaggcgctcctggtgggtggggggggtagtccaggcttgtcttgcaactgtatgttctcttcagacccctccctggcgatgccagattcactgggctggcagattctgcccccaaacctgtccaaccagttgtttgagaggagggggtagctgggaggggcagcaggagatgccaggaacagcttcccctagcacagcacagactacagacaggggagcctctggggctgcagacactgcagacggacggacagacagatggacaacagctggaggcttggcccggccatagggctctctgcgggacagtcccagctgctagtgtcgctgttgctgctactgacccgtgtccagcctgggacagacgtggctgccccagagcacatcagctatgtgccccagctctcaaacgacaccttggcggggaggctcaccctgtccaccttcacgctggagcagcctctaggccagttcagcagccacaacatctctgacttggataccatctggctggtggtggccctcagcaacgccacccagagcttcacggccccacggacaaaccaggacatccctgctcctgccaacttctcccagaggggctactatctcacactgagggccaaccgggtgctgtaccagaccagaggccagctccatgtcctccgcgtcggcaatgatacccactgccaaccaacaaaaattggctgcaaccatcccctaccaggacccggcccctacagggtgaagttcctggtgatgaatgacgaaggacccgtggctgaaaccaagtggtccagcgacactcgcctgcagcaagcccaggcacttcgggctgtccccggcccccagagcccgggcaccgtggtcatcatcgccatcctgtctatcctcctggccgtcctcctcacggtcctcctggctgtgctcatatacacctggacctgcctcctcccaaagtcctctctgggggctctgggccatggcacagcaggacagccaccagaagccactgtcagagtctgatgggtgaggacggaaggtggctcaggagtccttccttagggcagggacaattttttccaggagaggtgtgaggcctccagctcc

SEQ ID NO: 408188 - DNA, 1097 bp, Homo sapiens
cgacccctcctcagcagacgcaggtggcggcggcggcggacccttggggtctggacgcaacggcggcgggagcatgaacgcccctccagccttcgagtcgttcttgctcttcgagggcgagaagaagatcaccattaacaaggacaccaaggtacccaatgcctgtttattcaccatcaacaaagaagaccacacactgggaaacatcattaaatcacaactcctaaaagacccgcaagtgctatttgctggctacaaagtcccccaccccttggagcacaagatcatcatccgagtgcagaccacgccggactacagcccccaggaagcctttaccaacgccatcaccgacctcatcagtgagctgtccctgctggaggagcgctttcgggtggccataaaagacaagcaggaaggaattgagtaggggccagagggggctctgctcggcctgtgagccccgttcctacctgtgcctgaccctccgctccaggtaccacaccgaggagagcggccggtcccagccatggcccgccttgtggccacccctcaccctgacaccgacgtgttggccacccctcaccctgacaccgacgtgtcctgtacatagattaggttttatattcctaataaagtatagcggaagagacctggatgtggacttgagcagcggtgacttcgcaagcaaatggattgtcaggcttgatgcaggcagatgacctgtttcaggggcgtccggctggcagggatgaattcattctggaccaaagatccggggtccaggggctgctgcgggggctgtgctgagccggagagaagtgtgcaaacccatgagctcccaagagtctctgctctagaagcctcaactcctgggcctgcctgtcagtcaaagcaggaacacttcttcctgcataactcgaaacacctttccacaggcttcttgtccacagtagagtttaataaaaatattcactgaaagaccccccccacccccatcggcccaaagctgaataagttagttagctgtgtccctggtcctttgcgatggtgtgaggctacatcctcccccagatggctacgatgttggagtccgtcag

SEQ ID NO: 408189 - DNA, 1098 bp, Homo sapiens
ttgggtgtaacttacggctaggtacgaggctggtggcggcggcggcggacccttggggtctggacgcaacggcggcgggagcatgaacgcccctccagccttcgagtcgttcttgctcttcgagggcgagaagaagatcaccattaacaaggacaccaaggtacccaatgcctgtttattcaccatcaacaaagaagaccacacactgggaaacatcattaaatcacgtgcctgcttccccttcgccttctgccgtgattgtcagtttcctgaggcctccccagccacgcttcctgtacagcctgcagaactctgccccagagcacatcagctatgtgccccagctctcaaacgacaccttggcggggaggctcaccctgtccaccttcacgctggagcagcctctaggccagttcagcagccacaacatctctgacttggataccatctggctggtggtggccctcagcaacgccacccagagcttcacggccccacggacaaaccaggacatccctgctcctgccaacttctcccagaggggctactatctcacactgagggccaaccgggtgctgtaccagaccagaggccagctccatgtcctccgcgtcggcaatgatacccactgccaaccaacaaaaattggctgcaaccatcccctaccaggacccggcccctacagggtgaagttcctggtgatgaatgacgaaggacccgtggctgaaaccaagtggtccagcgacactcgcctgcagcaagcccaggcacttcgggctgtccccggcccccagagcccgggcaccgtggtcatcatcgccatcctgtctatcctcctggccgtcctcctcacggtcctcctggctgtgctcatatacacctgcactggcagcagcgacccctactgcatcgtgaaggtggacaatgagcccatcatcaggacagccacagtgtggaagaccctgtgccccttctggggtgaggagtaccaagtgcacctgccgcccaccttccacgctgtggctttctatgtcatggatgaggatgccctcagccgggacgacgttatcggaaaggtctgccttacaagggacacca

SEQ ID NO: 408190 - DNA, 2118 bp, Homo sapiens
  misc_feature (503)..(503): n is a, c, g, or t
  misc_feature (801)..(801): n is a, c, g, or t
  misc_feature (830)..(830): n is a, c, g, or t
  misc_feature (1055)..(1055): n is a, c, g, or t
cgacccctcctcagcagacgcaggtggcggcggcggcggacccttggggtctggacgcaacggcggcgggagcatgaacgcccctccagccttcgagtcgttcttgctcttcgagggcgagaagaagatcaccattaacaaggacaccaaggtacccaatgcctgtttattcaccatcaacaaagaagaccacacactgggaaacatcattaaatcacaactcctaaaagacccgcaagtgctatttgctggctacaaagtcccccaccccttggagcacaagatcatcatccgagtgcagaccacgccggactacagcccccaggaagcctttaccaacgccatcaccgacctcatcagtgagctgtccctgctggaggagcgctttcggacgtgcctgcttccccttcgccttctgccgtgattgtcagtttcctgaggcctccccagccacgcttcctgtacagcctgcagaactagacggggtttttccacgttggtcnggctggtctcaaacttctgacctcagatgatccgcccaccttggccacccaaagtgctgggattacaggtgtgaaccactgcgcccggccagaagtttttcttgtgagttgaggtgaacatctgaatcccctcggggaactgaggaggaggaactaccctgccctgacagaggctggggatgaaggaggaagagacagccggtcccctggataaagaggtgagggggtgtgaagtctgggagcccccctcccagggccaggctacagggggacagcagggctataccaggagtgccanagagcttgcatttgggtgtgatctaatcnccagtcctgccctgacctcctgggtgctcttagccaagccctcttccctgtgtgtgctagaaagtgagggtcactcccttccacacaagggagtgaattgagggtggggatctgagctctctgagcagcaaagctggacacaggccaaattgccaatcctgagtccctctgtcatgtggacctgggaagcttgtcctcatcctccatccttccccagggtggggnctgagaatctgagtgcagtggtgccatcttggctcactgcagcctcaacctcgctcgagtgatcctcccacctcaggtcctaaaggaagagtcgctacattggggactgtttggacaaggagatccacggggtagacttagcgggattgtccctggggcagcctggatcctgaggctgccccgcctccttcctcagcccctccctggtcaggcgctcctggtgggtggggggggtagtccaggcttgtcttgcaactgtatgttctcttcagacccctccctggcgatgccagattcactgggctggcagattctgcccccaaacctgtccaaccagttgtttgagaggagggggtagctgggaggggcagcaggagatgccaggaacagcttcccctagcacagcacagactacagacaggggagcctctggggctgcagacactgcagacggacggacagacagatggacaacagctggaggcttggcccggccatagggctctctgcgggacagtcccagctgctagtgtcgctgttgctgctactgacccgtgtccagcctgggacagacgtggctgccccagagcacatcagctatgtgccccagctctcaaacgacaccttggcggggaggctcaccctgtccaccttcacgctggagcagcctctaggccagttcagcagccacaacatctctgacttggataccatctggctggtggtggccctcagcaacgccacccagagcttcacggccccacggacaaaccaggacatccctgctcctgccaacttctcccagaggggctactatctcacactgagggccaaccgggtgctgtaccagaccagaggccagctccatgtcctccgcgtcggcaatgatacccactgccaaccaacaaaaattggctgcaaccatcccctaccaggacccggcccctacagggtgacatggactgcagggtatggccgcggcagcccagctcttaaggggacagcctgggaaaacagacttagggacaatgatcttgagccatgaaatgatgtccaatgcccc

SEQ ID NO: 408191 - DNA, 729 bp, Homo sapiens
cgacccctcctcagcagacgcaggtggcggcggcggcggacccttggggtctggacgcaacggcggcgggagcatgaacgcccctccagccttcgagtcgttcttgctcttcgagggcgagaagaagatcaccattaacaaggacaccaaggtacccaatgcctgtttattcaccatcaacaaagaagaccacacactgggaaacatcattaaatcacaactcctaaaagacccgcaagtgctatttgctggctacaaagtcccccaccccttggagcacaagatcatcatccgagtgcagaccacgccggactacagcccccaggaagcctttaccaacgccatcaccgacctcatcagtgagctgtccctgctggaggagcgctttcgggtggccataaaagacaagcaggaaggaattgagtaggggccagagggggctctgctcggcctgtgagccccgttcctacctgtgcctgaccctccgcggcttttcatcttactctccttatgcacggccatcctctgggccagaatgccaatcctacgggaaaacccttaagtgacaaatggccacaaaagacaaggagacacccaccaagaagtgacagtcgcagtaaaagctaagcaccttcgggagttcccgggtagtctagggggttgggagttccctggtggtctagtggttaggattcggtgctttcaccactgccggaagaagaaaatgat

SEQ ID NO: 408192 - DNA, 2991 bp, Homo sapiens
  misc_feature (158)..(158): n is a, c, g, or t
gcaagactccgtctcaaaaaaaaaaaaaagagagagaaagtatcatgcttttctgcattctgtgaattgttttagtgagttatcgaacttgagggcatggtgggaactccaaatttgcagccagttggtgagaagtacatgtggtctgaggacacccnagcctgcaggtgtgtctaaagcgagggcagcctagtggggactggtggccttaacctgtggcatttgaggtaacatcagggagttgacatcagaattgcatcacataggctgggcacggtggctcatgcctgtaatcccagcactttgggaggccaaggtgggtggatcacctgaggtcaggagttcgagaccagcctggccaacatggtgaaaccccgtctctactaaaaatacaaaaattagctaggcatggtggcatgtgctgtagtcccagctactcgggaggctgaggcaggagaatcgcttgaacccgggaggcggaggttgcagtgagccgagattgtgccactgcactccagcctaggtaacagagcaggactccatctcagtcaatcaatcaatcaatcaatctcagcggttgaactacccttgacatggttcagctctgtatccacacccaaatgtcatgtcaaattgtaattcccagtgttgtgggagggacctggtgggaggtgattggctcatgggggccgacttcccccttgctgttctcgtgatattgagtgagcgcttgtgggatctggttgtttaaaagcgtgcagccctcccacttcactctctctgtctctcctgctccaacatggccagacgtgcctgcttccccttcgccttctgccgtgattgtcagtttcctgaggcctccccagccacgcttcctgtacagcctgcagaactgtgagtcaattaaacctcttttcttcataaattacccagtttctcatagttctttatagcagtgtgaaaacagactaatggacccttctggttgaaggaatgcagccattctgcttgtttgactatgtcctttctattcatctctatttcctgggaggtgtttatccaagtgcaataggaggtattggtgaccgcacagtcccctcagtgttctgctagtaaatagttgaaggttgatcattgatcttctgcgttttcagtctggcatggaaaagcccctgtgcaactggtaaagatatcaataagcaccaggaggtatctaaatccaccaggagccataggcatcacgttgacgtccatttaccagtcttccctggcaagattcttctgaattgtgctgccttggccaaaagaggtatgggaggggctgggcgcagtggcttgtgcctgtaatcccaacattttgggaaaccaattcaggtggatcgttagaggtcaggggttcaagaccatcctggccaacatggtgacatcccatctctactaaaaatacaataagttagctgggtttggtgttgggtgcctgtaatcccagctactcgagaggctgaggcaggataatcgcttgaacctgggaggaggaggtggcagtgagctgagatcgtgccattgcactccagcgtgggcaacaagagtgaaacgtcgtctcaaaaaataaaaaaaaagtccgggcttgatggctcacacctgtaatcccagcactttgggaggccaagacgggtggatcacgaggtcaggagttcaagaccagcctggcctagatggtgaaaccctgtctctactaaaactacaaatattagctgggcatggtggcatgcacctgtaatctcagctactcagaagtctgatgcaggagaattgctaaaaccgaggagggagaggttgcagtgagccgagattgcaccactgcactctagcctgggcgacagagcaagactccgtctcgaaagaaagaaagaaagaaaggaaattccccagggaagtacctcggctgatttcataaacaggtaccgaaggaagcagaggcatgtggaggacttccccacctcatgcagctatttgggccgtggcgtctgaaatttattatttcagagtcacccctttgatgaccttggcagtgaactgcagtcatctgtttaggcctttccatggcccacgtcaatgccgttatttctgtttgttgcacatttgatttccttgttgttggcatttagaaggccccctgcttcccagatcacaccacgggcatggaccacagagattgcatcttgtgagtctgtagaaatggtcaaggccttgtcctctcttaggtccagagctcaggtgaatgcagattttcccggccatctgtgctgaagtccctgtggggaggctcctggctggtttcctgtaggtagacagctacacgtcctgcacttcattggcttcttttcatgaagctcctgccatctacaaaacatgtctcccttcttgaatcacatctctgttattgaaactctagaagtcaaccgggcatggtggctatgcctataatcccagcattttgggatgccaaggcgggtggatcacctgaggtcaggagttcaagaccagcctggccaacatggcgaaaccccgtctctaatacaaatacaaaaattagccaagcatggtggtcactgtactccagcctgggtgacagagcaagactccgtctcaaaaaaaaaaaaaagagaaagaaagtatcatgcttttctgcattctgtgaattgttttagtgagttatcgaacttgagggcatggtgggaacctccaaatttgcagccagttggtgagaagtacatgtggtctgaggacacccaagcctgcaggtgtgtgtgtgtggcggggatagggtgtccccacatgaggtatcttcctgaaagtgttactttccttgaagactttttgggaaaaaagttgggggggatttttggctagaaagtctgttcttctgctctgagctggctgctacccagcttgggcatgaggctagaccctcacactgccttcacaatg

SEQ ID NO: 408193 - DNA, 3507 bp, Homo sapiens
ttgggtgtaacttacggctaggtacgaggctggtggcggcggcggcggacccttggggtctggacgcaacggcggcgggagcatgaacgcccctccagccttcgagtcgttcttgctcttcgagggcgagaagaagatcaccattaacaaggacaccaaggtacccaatgcctgtttattcaccatcaacaaagaagaccacacactgggaaacatcattaaatcacaactcctaaaagacccgcaagtgctatttgctggctacaaagtcccccaccccttggagcacaagatcatcatccgagtgcagaccacgccggactacagcccccaggaagcctttaccaacgccatcaccgacctcatcagcgagctgtccctgctggaggagcgcttccgggtgagggcggggcctggaggggcagacggggtgggctggacactggcccgtgtgcccaggcctgggacagccctggcctgtttcttcggaggtcctcagggagaggcggcggtgatggaagaacagggacttccaccacaggctccaggacatgtggactgaggggctgtggagtctgggcctgtggctcccgtctgccccatgggacttctgtagtgctgcagggtccctcgggtgctgtgggccagatccgggcggggacctactgtcctttgggggtgctcttctacgtcccttgtcggtgattggcaaggcctggtccttccaggcctctgggaggcagctcaccccagggtggcccacacctgttcctagcagggcgcctgggaatctagaacagtttagaggggaaagagccacagcaagaaaagccgagcaggtgatcacgaggtcaggagttcaagaccagcctggcaaacatggtgaagccctgtttctactaaaaatacaaaaattagctaggcatggtggcatgtgctgtagtcccagctactcgggaggctgaggcaggagaatcgcttgaacccgggaggcggaggttgcagtgagccgagattgtgccactgcactccagcctaggtaacagagcaggactccatctcagtcaatcaatcaatcaatcaatctcagcggttgaactacccttgacatggttcagctctgtatccacacccaaatgtcatgtcaaattgtaattcccagtgttgtgggagggacctggtgggaggtgattggctcatgggggccgacttcccccttgctgttctcgtgatattgagtgagcgcttgtgggatctggttgtttaaaagcgtgcagccctcccacttcactctctctgtctctcctgctccaacatggccagacgtgcctgcttccccttcgccttctgccgtgattgtcagtttcctgaggcctccccagccacgcttcctgtacagcctgcagaactgtgagtcaattaaacctcttttcttcataaattacccagtttctcatagttctttatagcagtgtgaaaacagactaatggacccttctggttgaaggaatgcagccattctgcttgtttgactatgtcctttctattcatctctatttcctgggaggtgtttatccaagtgcaataggaggtattggtgaccgcacagtcccctcagtgttctgctagtaaatagttgaaggttgatcattgatcttctgcgttttcagtctggcatggaaaagcccctgtgcaactggtaaagatatcaataagcaccaggaggtatctaaatccaccaggagccataggcatcacgttgacgtccatttaccagtcttccctggcaagattcttctgaattgtgctgccttggccaaaagaggtatgggaggggctgggcgcagtggcttgtgcctgtaatcccaacattttgggaaaccaattcaggtggatcgttagaggtcaggggttcaagaccatcctggccaacatggtgacatcccatctctactaaaaatacaataagttagctgggtttggtgttgggtgcctgtaatcccagctactcgagaggctgaggcaggataatcgcttgaacctgggaggaggaggtggcagtgagctgagatcgtgccattgcactccagcgtgggcaacaagagtgaaacgtcgtctcaaaaaataaaaaaaaagtccgggcttgatggctcacacctgtaatcccagcactttgggaggccaagacgggtggatcacgaggtcaggagttcaagaccagcctggcctagatggtgaaaccctgtctctactaaaactacaaatattagctgggcatggtggcatgcacctgtaatctcagctactcagaagtctgatgcaggagaattgctaaaaccgaggagggagaggttgcagtgagccgagattgcaccactgcactctagcctgggcgacagagcaagactccgtctcgaaagaaagaaagaaagaaaggaaattccccagggaagtacctcggctgatttcataaacaggtaccgaaggaagcagaggcatgtggaggacttccccacctcatgcagctatttgggccgtggcgtctgaaatttattatttcagagtcacccctttgatgaccttggcagtgaactgcagtcatctgtttaggcctttccatggcccacgtcaatgccgttatttctgtttgttgcacatttgatttccttgttgttggcatttagaaggccccctgcttcccagatcacaccacgggcatggaccacagagattgcatcttgtgagtctgtagaaatggtcaaggccttgtcctctcttaggtccagagctcaggtgaatgcagattttcccggccatctgtgctgaagtccctgtggggaggctcctggctggtttcctgtaggtagacagctacacgtcctgcacttcattggcttcttttcatgaagctcctgccatctacaaaacatgtctcccttcttgaatcacatctctgttattgaaactctagaagtcaaccgggcatggtggctatgcctataatcccagcattttgggatgccaaggcgggtggatcacctgaggtcaggagttcaagaccagcctggccaacatggcgaaaccccgtctctaatacaaatacaaaaattagccaagcatggtggtcactgtactccagcctgggtgacagagcaagactccgtctcaaaaaaaaaaaaaagagaaagaaagtatcatgcttttctgcattctgtgaattgttttagtgagttatcgaacttgagggcatggtgggaacctccaaatttgcagccagttggtgagaagtacatgtggtctgaggacacccaagcctgcaggtgtgtgtgtgtggcggggatagggtgtccccacatgaggtatcttcctgaaagtgttactttccttgaagactttttgggaaaaaagttgggggggatttttggctagaaagtctgttcttctgctctgagctggctgctacccagcttgggcatgaggctagaccctcacactgccttcacaatg

SEQ ID NO: 408194 - DNA, 2409 bp, Homo sapiens
ttgggtgtaacttacggctaggtacgaggctggtggcggcggcggcggacccttggggtctggacgcaacggcggcgggagcatgaacgcccctccagccttcgagtcgttcttgctcttcgagggcgagaagaagatcaccattaacaaggacaccaaggtacccaatgcctgtttattcaccatcaacaaagaagaccacacactgggaaacatcattaaatcacgtgcctgcttccccttcgccttctgccgtgattgtcagtttcctgaggcctccccagccacgcttcctgtacagcctgcagaactgtgagtcaattaaacctcttttcttcataaattacccagtttctcatagttctttatagcagtgtgaaaacagactaatggacccttctggttgaaggaatgcagccattctgcttgtttgactatgtcctttctattcatctctatttcctgggaggtgtttatccaagtgcaataggaggtattggtgaccgcacagtcccctcagtgttctgctagtaaatagttgaaggttgatcattgatcttctgcgttttcagtctggcatggaaaagcccctgtgcaactggtaaagatatcaataagcaccaggaggtatctaaatccaccaggagccataggcatcacgttgacgtccatttaccagtcttccctggcaagattcttctgaattgtgctgccttggccaaaagaggtatgggaggggctgggcgcagtggcttgtgcctgtaatcccaacattttgggaaaccaattcaggtggatcgttagaggtcaggggttcaagaccatcctggccaacatggtgacatcccatctctactaaaaatacaataagttagctgggtttggtgttgggtgcctgtaatcccagctactcgagaggctgaggcaggataatcgcttgaacctgggaggaggaggtggcagtgagctgagatcgtgccattgcactccagcgtgggcaacaagagtgaaacgtcgtctcaaaaaataaaaaaaaagtccgggcttgatggctcacacctgtaatcccagcactttgggaggccaagacgggtggatcacgaggtcaggagttcaagaccagcctggcctagatggtgaaaccctgtctctactaaaactacaaatattagctgggcatggtggcatgcacctgtaatctcagctactcagaagtctgatgcaggagaattgctaaaaccgaggagggagaggttgcagtgagccgagattgcaccactgcactctagcctgggcgacagagcaagactccgtctcgaaagaaagaaagaaagaaaggaaattccccagggaagtacctcggctgatttcataaacaggtaccgaaggaagcagaggcatgtggaggacttccccacctcatgcagctatttgggccgtggcgtctgaaatttattatttcagagtcacccctttgatgaccttggcagtgaactgcagtcatctgtttaggcctttccatggcccacgtcaatgccgttatttctgtttgttgcacatttgatttccttgttgttggcatttagaaggccccctgcttcccagatcacaccacgggcatggaccacagagattgcatcttgtgagtctgtagaaatggtcaaggccttgtcctctcttaggtccagagctcaggtgaatgcagattttcccggccatctgtgctgaagtccctgtggggaggctcctggctggtttcctgtaggtagacagctacacgtcctgcacttcattggcttcttttcatgaagctcctgccatctacaaaacatgtctcccttcttgaatcacatctctgttattgaaactctagaagtcaaccgggcatggtggctatgcctataatcccagcattttgggatgccaaggcgggtggatcacctgaggtcaggagttcaagaccagcctggccaacatggcgaaaccccgtctctaatacaaatacaaaaattagccaagcatggtggtcactgtactccagcctgggtgacagagcaagactccgtctcaaaaaaaaaaaaaagagaaagaaagtatcatgcttttctgcattctgtgaattgttttagtgagttatcgaacttgagggcatggtgggaacctccaaatttgcagccagttggtgagaagtacatgtggtctgaggacacccaagcctgcaggtgtgtgtgtgtggcggggatagggtgtccccacatgaggtatcttcctgaaagtgttactttccttgaagactttttgggaaaaaagttgggggggatttttggctagaaagtctgttcttctgctctgagctggctgctacccagcttgggcatgaggctagaccctcacactgccttcacaatg

SEQ ID NO: 408195 - DNA, 2731 bp, Homo sapiens
  misc_feature (158)..(158): n is a, c, g, or t
gcaagactccgtctcaaaaaaaaaaaaaagagagagaaagtatcatgcttttctgcattctgtgaattgttttagtgagttatcgaacttgagggcatggtgggaactccaaatttgcagccagttggtgagaagtacatgtggtctgaggacacccnagcctgcaggtgtgtctaaagcgagggcagcctagtggggactggtggccttaacctgtggcatttgaggtaacatcagggagttgacatcagaattgcatcacataggctgggcacggtggctcatgcctgtaatcccagcactttgggaggccaaggtgggtggatcacctgaggtcaggagttcgagaccagcctggccaacatggtgaaaccccgtctctactaaaaatacaaaaattagctaggcatggtggcatgtgctgtagtcccagctactcgggaggctgaggcaggagaatcgcttgaacccgggaggcggaggttgcagtgagccgagattgtgccactgcactccagcctaggtaacagagcaggactccatctcagtcaatcaatcaatcaatcaatctcagcggttgaactacccttgacatggttcagctctgtatccacacccaaatgtcatgtcaaattgtaattcccagtgttgtgggagggacctggtgggaggtgattggctcatgggggccgacttcccccttgctgttctcgtgatattgagtgagcgcttgtgggatctggttgtttaaaagcgtgcagccctcccacttcactctctctgtctctcctgctccaacatggccagacgtgcctgcttccccttcgccttctgccgtgattgtcagtttcctgaggcctccccagccacgcttcctgtacagcctgcagaacttctggcatggaaaagcccctgtgcaactggtaaagatatcaataagcaccaggaggtatctaaatccaccaggagccataggcatcacgttgacgtccatttaccagtcttccctggcaagattcttctgaattgtgctgccttggccaaaagaggtatgggaggggctgggcgcagtggcttgtgcctgtaatcccaacattttgggaaaccaattcaggtggatcgttagaggtcaggggttcaagaccatcctggccaacatggtgacatcccatctctactaaaaatacaataagttagctgggtttggtgttgggtgcctgtaatcccagctactcgagaggctgaggcaggataatcgcttgaacctgggaggaggaggtggcagtgagctgagatcgtgccattgcactccagcgtgggcaacaagagtgaaacgtcgtctcaaaaaataaaaaaaaagtccgggcttgatggctcacacctgtaatcccagcactttgggaggccaagacgggtggatcacgaggtcaggagttcaagaccagcctggcctagatggtgaaaccctgtctctactaaaactacaaatattagctgggcatggtggcatgcacctgtaatctcagctactcagaagtctgatgcaggagaattgctaaaaccgaggagggagaggttgcagtgagccgagattgcaccactgcactctagcctgggcgacagagcaagactccgtctcgaaagaaagaaagaaagaaaggaaattccccagggaagtacctcggctgatttcataaacaggtaccgaaggaagcagaggcatgtggaggacttccccacctcatgcagctatttgggccgtggcgtctgaaatttattatttcagagtcacccctttgatgaccttggcagtgaactgcagtcatctgtttaggcctttccatggcccacgtcaatgccgttatttctgtttgttgcacatttgatttccttgttgttggcatttagaaggccccctgcttcccagatcacaccacgggcatggaccacagagattgcatcttgtgagtctgtagaaatggtcaaggccttgtcctctcttaggtccagagctcaggtgaatgcagattttcccggccatctgtgctgaagtccctgtggggaggctcctggctggtttcctgtaggtagacagctacacgtcctgcacttcattggcttcttttcatgaagctcctgccatctacaaaacatgtctcccttcttgaatcacatctctgttattgaaactctagaagtcaaccgggcatggtggctatgcctataatcccagcattttgggatgccaaggcgggtggatcacctgaggtcaggagttcaagaccagcctggccaacatggcgaaaccccgtctctaatacaaatacaaaaattagccaagcatggtggtcactgtactccagcctgggtgacagagcaagactccgtctcaaaaaaaaaaaaaagagaaagaaagtatcatgcttttctgcattctgtgaattgttttagtgagttatcgaacttgagggcatggtgggaacctccaaatttgcagccagttggtgagaagtacatgtggtctgaggacacccaagcctgcaggtgtgtgtgtgtggcggggatagggtgtccccacatgaggtatcttcctgaaagtgttactttccttgaagactttttgggaaaaaagttgggggggatttttggctagaaagtctgttcttctgctctgagctggctgctacccagcttgggcatgaggctagaccctcacactgccttcacaatg

SEQ ID NO: 408196 - DNA, 457 bp, Homo sapiens
ttgggtgtaacttacggctaggtacgaggctggtggcggcggcggcggacccttggggtctggacgcaacggcggcgggagcatgaacgcccctccagccttcgagtcgttcttgctcttcgagggcgagaagaagatcaccattaacaaggacaccaaggtacccaatgcctgtttattcaccatcaacaaagaagaccacacactgggaaacatcattaaatcacaactcctaaaagacccgcaagtgctatttgctggctacaaagtcccccaccccttggagcacaagatcatcatccgagtgcagaccacgccgtccccaaagcacagctgtgcttggggaacggcggccaagccccagcagcttgctgtccccacaaaggtaactcgggggagagcacctttggtgggtttgtggcgcaccaggttccttgtccagggtgggctctcgtcg

SEQ ID NO: 408197 - DNA, 1532 bp, Homo sapiens
  misc_feature (158)..(158): n is a, c, g, or t
  misc_feature (1414)..(1414): n is a, c, g, or t
  misc_feature (1427)..(1427): n is a, c, g, or t
  misc_feature (1436)..(1436): n is a, c, g, or t
  misc_feature (1442)..(1442): n is a, c, g, or t
  misc_feature (1461)..(1461): n is a, c, g, or t
  misc_feature (1467)..(1467): n is a, c, g, or t
  misc_feature (1483)..(1483): n is a, c, g, or t
gcaagactccgtctcaaaaaaaaaaaaaagagagagaaagtatcatgcttttctgcattctgtgaattgttttagtgagttatcgaacttgagggcatggtgggaactccaaatttgcagccagttggtgagaagtacatgtggtctgaggacacccnagcctgcaggtgtgtctaaagcgagggcagcctagtggggactggtggccttaacctgtggcatttgaggtaacatcagggagttgacatcagaattgcatcacataggctgggcacggtggctcatgcctgtaatcccagcactttgggaggccaaggtgggtggatcacctgaggtcaggagttcgagaccagcctggccaacatggtgaaaccccgtctctactaaaaatacaaaaattagctaggcatggtggcatgtgctgtagtcccagctactcgggaggctgaggcaggagaatcgcttgaacccgggaggcggaggttgcagtgagccgagattgtgccactgcactccagcctaggtaacagagcaggactccatctcagtcaatcaatcaatcaatcaatctcagcggttgaactacccttgacatggttcagctctgtatccacacccaaatgtcatgtcaaattgtaattcccagtgttgtgggagggacctggtgggaggtgattggctcatgggggccgacttcccccttgctgttctcgtgatattgagtgagcgcttgtgggatctggttgtttaaaagcgtgcagccctcccacttcactctctctgtctctcctgctccaacatggccagacgtgcctgcttccccttcgccttctgccgtgattgtcagtttcctgaggcctccccagccacgcttcctgtacagcctgcagaactagacggggtttttccacattggtcaggctggtctcaaacttctgacctcagatgatccgcccaccttggccacccaaagtgctgggattacaggtgtgaaccactgcgcccggccagaagtttttcttgaggaactaccctgccctgacagaggctggggatgaaggaggaagagacagccggtcccctggataaagaggtgagggggtgtgaagtctgggagcccccctcccagggccaggctacagggggacagcagggctataccaggagtgccacagagcttgcatttgggtgtgatctaatccccagtcctgccctgacctcctgggtgctcttagccaagccctcttccctgtgtgtgctagaaagtgagggtcactcccttccacacaagggagtgaattgagggtggggatctgagctctctgagcagcaaagctggacacaggccaaattgccaatcctgagtccctctgtcatgtggacctgggaagcttgtcctcatcctccatccttncccagggtggggnctgagaatntgaganccttgagcctgggaggtcnaggccncagtgagctatgatcncaccactgcactccagcctgggcgaaagagtgagaccctgcccccccaa

SEQ ID NO: 408198 - DNA, 816 bp, Homo sapiens
ttgggtgtaacttacggctaggtacgaggctggtggcggcggcggcggacccttggggtctggacgcaacggcggcgggagcatgaacgcccctccagccttcgagtcgttcttgctcttcgagggcgagaagaagatcaccattaacaaggacaccaaggtacccaatgcctgtttattcaccatcaacaaagaagaccacacactgggaaacatcattaaatccgtaagtttcccgtcacaggctctcaggggctgtgtttaatgggcccccctgggcaaagcacaagttccaagtcttcctcagtctctctgagctacaggaagtccttctgggggcttgctctgggcattttataatcttggtacctttttatcaaaatgacaccgacctccatgtcttcacataagccacacttctgtagtggcttattctgtagatgaacatgtgcatttacattcactgtttgtttgtttgtttttgagatggaattttctctctttgttgcccaggctggagtgcaatggcaacgatcttggctcactgaaacctcggcctcccgggttcaagtaattctcctcttcagccttcctagtagctgggaaattctagtcattcattcactcactcattcattcattcatgaataaacagtttgccctgcatgtgtacctggccccctcctgggcggatacggcaggcaaacggtgcaagggcggctgccgggagaaggtgggcagctggagtgggactgggggagacaggatcaatgtgacctgcggtggtccccaggtggccgggatgcagtacctgca

SEQ ID NO: 408199 - DNA, 308 bp, Homo sapiens
ttgggtgtaacttacggctaggtacgaggctggtggcggcggcggcggacccttggggtctggacgcaacggcggcgggagcatgaacgcccctccagccttcgagtcgttcttgctcttcgagggcgagaagaagatcaccattaacaaggacaccaaggtacccaatgcctgtttattcaccatcaacaaagaagaccacacactgggaaacatcattaaatctggcactatcaaatagtaggtctcattcattcttcctatttttttgtatccattaatcctcatttcctcccctgccagcaccc

SEQ ID NO: 408200 - DNA, 487 bp, Homo sapiens
gtaatattactagtgaattcactagtaatattactagtgaattcactagtaatacacactgggaaacatcattaaatcacaactcctaaaagacccgcaagtgctatttgctggctacaaagtcccccaccccttggagcacaagatcatcatccgagtgcagaccacgccggactacagcccccaggaagcctttaccaacgccatcaccgacctcatcagtgagctgtccctgctggaggagcgctttcgggtggccataaaagacaagcaggaaggaattgagtaggggccagagggggctctgctcggcctgtgagccccgttcctacctgtgcctgaccctccgctccaggtaccacaccgaggagagcggccggtcccagccatggcccgccttgtggccacccctcaccctgacaccgacgtgtcctgtacatagattaggttttatattcctaataaagtatagcggaagagacctgga

SEQ ID NO: 408201 - DNA, 371 bp, Homo sapiens
gaagaaactcaatgaagcggcggggcgcagacactgcagacggacggacagacagatggacaacagctggaggcttggcccggccatagggctctctgcgggacagtcccagctgctagtgtcgctgttgctgctactgacccgtgtccagcctgggacagacgtggctgccccagagcacatcagctatgtgccccagctctcaaacgacaccttggcggggaggctcaccctgtccaccttcacgctggagcagcctctaggccagttcagcagccacaacatctctgacttggataccatctggctggtggtggccctcagcaacgccacccagagtgtctgcttggggatcctctaaatcgcgtaga

SEQ ID NO: 408202 - DNA, 787 bp, Homo sapiens
tacccgtttgtctgatggagatcggggtgcggagatgctgtgtggccgcaagatgaagctgaagcggacggcgagtgtcgctcgtgctcgctgagcaccacgaggccttcaacaggctgattggtatggaggacaccccagagagcacctccaatcctgttctttccaaaaacaggaaacttccagtaagcatacttttccaatggggaacgtaggccccaaatgggtgagctctccatgtgggaggaatgtgaagtgatcactcatgagggacacttaggagatgataaaggattaggtcaacttgataaaggtcagcgcttgggataagaaagcttggtttcgggccaggcgcagtggcacccgcctgtgattccagctacttgggaggctgaggcaggaagatagcctgaacccaggagttggaggctgcagtgaactatgatcacaccactgcactccagcctgggctacagagtgagaccctgtctcttaaaaaaaaaaaaaaaaccgggcatggtggtgggcacctgtaatcctagctacttgggaggctgaggcaggagaatcgcttgaacccaggaggcggtggttgtagtgagctaggatcatgccattgcagtccagcctggacagcaaagctagactccatctcaaaaaagaaaagaaaaagtaaaaaatttaaaaattagatgggcatggtgacatgtgcctgtaatcccaggtactaaggaagctgaggtaggaggatgacttgagcctaggagttcgaggctgcagtgagctc

SEQ ID NO: 408203 - DNA, 1490 bp, Homo sapiens
ttgggtgtaacttacggctaggtacgaggctggtggcggcggcggcggacccttggggtctggacgcaacggcggcgggagcatgaacgcccctccagccttcgagtcgttcttgctcttcgagggcgagaagaagatcaccattaacaaggacaccaaggtacccaatgcctgtttattcaccatcaacaaagaagaccacacactgggaaacatcattaaatcacgtgcctgcttccccttcgccttctgccgtgattgtcagtttcctgaggcctccccagccacgcttcctgtacagcctgcagaactctgccccagagcacatcagctatgtgccccagctctcaaacgacaccttggcggggaggctcaccctgtccaccttcacgctggagcagcctctaggccagttcagcagccacaacatctctgacttggataccatctggctggtggtggccctcagcaacgccacccagagcttcacggccccacggacaaaccaggacatccctgctcctgccaacttctcccagaggggctactatctcacactgagggccaaccgggtgctgtaccagaccagaggccagctccatgtcctccgcgtcggcaatgatacccactgccaaccaacaaaaattggctgcaaccatcccctaccaggacccggcccctacagggtgaagttcctggtgatgaatgacgaaggacccgtggctgaaaccaagtggtccagcgacactcgcctgcagcaagcccaggcacttcgggctgtccccggcccccagagcccgggcaccgtggtcatcatcgccatcctgtctatcctcctggccgtcctcctcacggtcctcctggctgtgctcatatacacctgcttcaacagctgcaggagcacttccctatcaggcccagaggaggcagggagtgtgagaagatacaccacgcacctcgcgttcagcactcctgccgagggggcttcctgaggggttccagaggggcccacgtgtccctccacctcctccctggcccaggctgcagagcctgagctgggacacgccctgaagcttctggaccctgagagagattgtttcttttctttactatttttttttttttttttgagacggagtctcactctgtcgccaggctggcgcgatcttggctcactgcaacctctgcctcacgggttcaagcgattttcctgcttcagcctcctgagtagctgggactacaggcacacgccaccatgcccagctcatttttgtatttttagtagagatggggtttcaccatgttggccaggatggcctccatctcttgaccttgtgatccgcccgactcggcctcccaaaatgctgggattacaggcgtgagccatcaagtctggcgagagagattgtttctagatgagggtgggggcgggtgtccttagcccaaagcttgtgccagtctctatcagaaataaatgcccccaaaacctc

SEQ ID NO: 408204 - DNA, 2837 bp, Homo sapiens
  misc_feature (503)..(503): n is a, c, g, or t
  misc_feature (801)..(801): n is a, c, g, or t
  misc_feature (830)..(830): n is a, c, g, or t
  misc_feature (1055)..(1055): n is a, c, g, or t
cgacccctcctcagcagacgcaggtggcggcggcggcggacccttggggtctggacgcaacggcggcgggagcatgaacgcccctccagccttcgagtcgttcttgctcttcgagggcgagaagaagatcaccattaacaaggacaccaaggtacccaatgcctgtttattcaccatcaacaaagaagaccacacactgggaaacatcattaaatcacaactcctaaaagacccgcaagtgctatttgctggctacaaagtcccccaccccttggagcacaagatcatcatccgagtgcagaccacgccggactacagcccccaggaagcctttaccaacgccatcaccgacctcatcagtgagctgtccctgctggaggagcgctttcggacgtgcctgcttccccttcgccttctgccgtgattgtcagtttcctgaggcctccccagccacgcttcctgtacagcctgcagaactagacggggtttttccacgttggtcnggctggtctcaaacttctgacctcagatgatccgcccaccttggccacccaaagtgctgggattacaggtgtgaaccactgcgcccggccagaagtttttcttgtgagttgaggtgaacatctgaatcccctcggggaactgaggaggaggaactaccctgccctgacagaggctggggatgaaggaggaagagacagccggtcccctggataaagaggtgagggggtgtgaagtctgggagcccccctcccagggccaggctacagggggacagcagggctataccaggagtgccanagagcttgcatttgggtgtgatctaatcnccagtcctgccctgacctcctgggtgctcttagccaagccctcttccctgtgtgtgctagaaagtgagggtcactcccttccacacaagggagtgaattgagggtggggatctgagctctctgagcagcaaagctggacacaggccaaattgccaatcctgagtccctctgtcatgtggacctgggaagcttgtcctcatcctccatccttccccagggtggggnctgagaatctgagaaccttgagcctgggaggtcaaggcctgcagtggtgccatcttggctcactgcagcctcaacctcgctcgagtgatcctcccacctcaggtcctaaaggaagagtcgctacattggggactgtttggacaaggagatccacggggtagacttagcgggattgtccctggggcagcctggatcctgaggctgccccgcctccttcctcagcccctccctggtcaggcgctcctggtgggtggggggggtagtccaggcttgtcttgcaactgtatgttctcttcagacccctccctggcgatgccagattcactgggctggcagattctgcccccaaacctgtccaaccagttgtttgagaggagggggtagctgggaggggcagcaggagatgccaggaacagcttcccctagcacagcacagactacagacaggggagcctctggggctgcagacactgcagacggacggacagacagatggacaacagctggaggcttggcccggccatagggctctctgcgggacagtcccagctgctagtgtcgctgttgctgctactgacccgtgtccagcctgggacagacgtggctgccccagagcacatcagctatgtgccccagctctcaaacgacaccttggcggggaggctcaccctgtccaccttcacgctggagcagcctctaggccagttcagcagccacaacatctctgacttggataccatctggctggtggtggccctcagcaacgccacccagagcttcacggccccacggacaaaccaggacatccctgctcctgccaacttctcccagaggggctactatctcacactgagggccaaccgggtgctgtaccagaccagaggccagctccatgtcctccgcgtcggcaatgatacccactgccaaccaacaaaaattggctgcaaccatcccctaccaggacccggcccctacagggtgaagttcctggtgatgaatgacgaaggacccgtggctgaaaccaagtggtccagcgacactcgcctgcagcaagcccaggcacttcgggctgtccccggcccccagagcccgggcaccgtggtcatcatcgccatcctgtctatcctcctggccgtcctcctcacggtcctcctggctgtgctcatatacacctgcttcaacagctgcaggagcacttccctatcaggcccagaggaggcagggagtgtgagaagatacaccacgcacctcgcgttcagcactcctgccgagggggcttcctgaggggttccagaggggcccacgtgtccctccacctcctccctggcccaggctgcagagcctgagctgggacacgccctgaagcttctggaccctgagagagattgtttcttttctttactatttttttttttttttttgagacggagtctcactctgtcgccaggctggcgcgatcttggctcactgcaacctctgcctcacgggttcaagcgattttcctgcttcagcctcctgagtagctgggactacaggcacacgccaccatgcccagctcatttttgtatttttagtagagatggggtttcaccatgttggccaggatggcctccatctcttgaccttgtgatccgcccgactcggcctcccaaaatgctgggattacaggcgtgagccatcaagtctggcgagagagattgtttctagatgagggtgggggcgggtgtccttagcccaaagcttgtgccagtctctatcagaaataaatgcccccaaaacctc

SEQ ID NO: 408205 - DNA, 2205 bp, Homo sapiens
  misc_feature (503)..(503): n is a, c, g, or t
cgacccctcctcagcagacgcaggtggcggcggcggcggacccttggggtctggacgcaacggcggcgggagcatgaacgcccctccagccttcgagtcgttcttgctcttcgagggcgagaagaagatcaccattaacaaggacaccaaggtacccaatgcctgtttattcaccatcaacaaagaagaccacacactgggaaacatcattaaatcacaactcctaaaagacccgcaagtgctatttgctggctacaaagtcccccaccccttggagcacaagatcatcatccgagtgcagaccacgccggactacagcccccaggaagcctttaccaacgccatcaccgacctcatcagtgagctgtccctgctggaggagcgctttcggacgtgcctgcttccccttcgccttctgccgtgattgtcagtttcctgaggcctccccagccacgcttcctgtacagcctgcagaactagacggggtttttccacgttggtcnggctggtctcaaacttctgacctcagatgatccgcccaccttggccacccaaagtgctgggattacaggtgtgaaccactgcgcccggccagaagtttttcttgtgagttgaggtgaacatctgaatcccctcggggaactgaggaggaggaactaccctgccctgacagaggctggggatgaaggaggaagagacagccggtcccctggataaagagacccctccctggcgatgccagattcactgggctggcagattctgcccccaaacctgtccaaccagttgtttgagaggagggggtagctgggaggggcagcaggagatgccaggaacagcttcccctagcacagcacagactacagacaggggagcctctggggctgcagacactgcagacggacggacagacagatggacaacagctggaggcttggcccggccatagggctctctgcgggacagtcccagctgctagtgtcgctgttgctgctactgacccgtgtccagcctgggacagacgtggctgccccagagcacatcagctatgtgccccagctctcaaacgacaccttggcggggaggctcaccctgtccaccttcacgctggagcagcctctaggccagttcagcagccacaacatctctgacttggataccatctggctggtggtggccctcagcaacgccacccagagcttcacggccccacggacaaaccaggacatccctgctcctgccaacttctcccagaggggctactatctcacactgagggccaaccgggtgctgtaccagaccagaggccagctccatgtcctccgcgtcggcaatgatacccactgccaaccaacaaaaattggctgcaaccatcccctaccaggacccggcccctacagggtgaagttcctggtgatgaatgacgaaggacccgtggctgaaaccaagtggtccagcgacactcgcctgcagcaagcccaggcacttcgggctgtccccggcccccagagcccgggcaccgtggtcatcatcgccatcctgtctatcctcctggccgtcctcctcacggtcctcctggctgtgctcatatacacctgcttcaacagctgcaggagcacttccctatcaggcccagaggaggcagggagtgtgagaagatacaccacgcacctcgcgttcagcactcctgccgagggggcttcctgaggggttccagaggggcccacgtgtccctccacctcctccctggcccaggctgcagagcctgagctgggacacgccctgaagcttctggaccctgagagagattgtttcttttctttactatttttttttttttttttgagacggagtctcactctgtcgccaggctggcgcgatcttggctcactgcaacctctgcctcacgggttcaagcgattttcctgcttcagcctcctgagtagctgggactacaggcacacgccaccatgcccagctcatttttgtatttttagtagagatggggtttcaccatgttggccaggatggcctccatctcttgaccttgtgatccgcccgactcggcctcccaaaatgctgggattacaggcgtgagccatcaagtctggcgagagagattgtttctagatgagggtgggggcgggtgtccttagcccaaagcttgtgccagtctctatcagaaataaatgcccccaaaacctc

SEQ ID NO: 408206 - DNA, 2954 bp, Homo sapiens
  misc_feature (782)..(782): n is a, c, g, or t
  misc_feature (944)..(944): n is a, c, g, or t
  misc_feature (973)..(973): n is a, c, g, or t
  misc_feature (1198)..(1198): n is a, c, g, or t
ttgggtgtaacttacggctaggtacgaggctggtggcggcggcggcggacccttggggtctggacgcaacggcggcgggagcatgaacgcccctccagccttcgagtcgttcttgctcttcgagggcgagaagaagatcaccattaacaaggacaccaaggtacccaatgcctgtttattcaccatcaacaaagaagaccacacactgggaaacatcattaaatccgtaagtttcccgtcacaggctctcaggggctgtgtttaatgggcccccctgggcaaagcacaagttccaagtcttcctcagtctctctgagctacaggaagtccttctgggggcttgctctgggcattttataatcttggtacctttttatcaaaatgacaccgacctccatgtcttcacataagccacacttctgtagtggcttattctgtagatgaacatgtgcatttacattcactgtttgtttgtttgtttttgagatggaattttctctctttgttgcccaggctggagtgcaatggcaacgatcttggctcactgaaacctcggcctcccgggttcaagtaattctcctcttcagccttcctagtagctgggactacaggcccacgccacgatgcccggctaatttttgtgtttttagtagagatggggattcactgtgttggccaggctggtctcgaactcctgacctcaggtgatccacctgccggcttcccaaagtgctgggattacaggcgtgagccaccatgcctggacttccatctggtaattntctgtctcgaggaggaactaccctgccctgacagaggctggggatgaaggaggaagagacagccggtcccctggataaagaggtgagggggtgtgaagtctgggagcccccctcccagggccaggctacagggggacagcagggctataccaggagtgccanagagcttgcatttgggtgtgatctaatcnccagtcctgccctgacctcctgggtgctcttagccaagccctcttccctgtgtgtgctagaaagtgagggtcactcccttccacacaagggagtgaattgagggtggggatctgagctctctgagcagcaaagctggacacaggccaaattgccaatcctgagtccctctgtcatgtggacctgggaagcttgtcctcatcctccatccttccccagggtggggnctgagaatctgagtgcagtggtgccatcttggctcactgcagcctcaacctcgctcgagtgatcctcccacctcaggtcctaaaggaagagtcgctacattggggactgtttggacaaggagatccacggggtagacttagcgggattgtccctggggcagcctggatcctgaggctgccccgcctccttcctcagcccctccctggtcaggcgctcctggtgggtggggggggtagtccaggcttgtcttgcaactgtatgttctcttcagacccctccctggcgatgccagattcactgggctggcagattctgcccccaaacctgtccaaccagttgtttgagaggagggggtagctgggaggggcagcaggagatgccaggaacagcttcccctagcacagcacagactacagacaggggagcctctggggctgcagacactgcagacggacggacagacagatggacaacagctggaggcttggcccggccatagggctctctgcgggacagtcccagctgctagtgtcgctgttgctgctactgacccgtgtccagcctgggacagacgtggctgccccagagcacatcagctatgtgccccagctctcaaacgacaccttggcggggaggctcaccctgtccaccttcacgctggagcagcctctaggccagttcagcagccacaacatctctgacttggataccatctggctggtggtggccctcagcaacgccacccagagcttcacggccccacggacaaaccaggacatccctgctcctgccaacttctcccagaggggctactatctcacactgagggccaaccgggtgctgtaccagaccagaggccagctccatgtcctccgcgtcggcaatgatacccactgccaaccaacaaaaattggctgcaaccatcccctaccaggacccggcccctacagggtgaagttcctggtgatgaatgacgaaggacccgtggctgaaaccaagtggtccagcgacactcgcctgcagcaagcccaggcacttcgggctgtccccggcccccagagcccgggcaccgtggtcatcatcgccatcctgtctatcctcctggccgtcctcctcacggtcctcctggctgtgctcatatacacctgcttcaacagctgcaggagcacttccctatcaggcccagaggaggcagggagtgtgagaagatacaccacgcacctcgcgttcagcactcctgccgagggggcttcctgaggggttccagaggggcccacgtgtccctccacctcctccctggcccaggctgcagagcctgagctgggacacgccctgaagcttctggaccctgagagagattgtttcttttctttactatttttttttttttttttgagacggagtctcactctgtcgccaggctggcgcgatcttggctcactgcaacctctgcctcacgggttcaagcgattttcctgcttcagcctcctgagtagctgggactacaggcacacgccaccatgcccagctcatttttgtatttttagtagagatggggtttcaccatgttggccaggatggcctccatctcttgaccttgtgatccgcccgactcggcctcccaaaatgctgggattacaggcgtgagccatcaagtctggcgagagagattgtttctagatgagggtgggggcgggtgtccttagcccaaagcttgtgccagtctctatcagaaataaatgcccccaaaacctc

SEQ ID NO: 408207 - DNA, 2649 bp, Homo sapiens
  misc_feature (503)..(503): n is a, c, g, or t
  misc_feature (801)..(801): n is a, c, g, or t
  misc_feature (830)..(830): n is a, c, g, or t
  misc_feature (1055)..(1055): n is a, c, g, or t
cgacccctcctcagcagacgcaggtggcggcggcggcggacccttggggtctggacgcaacggcggcgggagcatgaacgcccctccagccttcgagtcgttcttgctcttcgagggcgagaagaagatcaccattaacaaggacaccaaggtacccaatgcctgtttattcaccatcaacaaagaagaccacacactgggaaacatcattaaatcacaactcctaaaagacccgcaagtgctatttgctggctacaaagtcccccaccccttggagcacaagatcatcatccgagtgcagaccacgccggactacagcccccaggaagcctttaccaacgccatcaccgacctcatcagtgagctgtccctgctggaggagcgctttcggacgtgcctgcttccccttcgccttctgccgtgattgtcagtttcctgaggcctccccagccacgcttcctgtacagcctgcagaactagacggggtttttccacgttggtcnggctggtctcaaacttctgacctcagatgatccgcccaccttggccacccaaagtgctgggattacaggtgtgaaccactgcgcccggccagaagtttttcttgtgagttgaggtgaacatctgaatcccctcggggaactgaggaggaggaactaccctgccctgacagaggctggggatgaaggaggaagagacagccggtcccctggataaagaggtgagggggtgtgaagtctgggagcccccctcccagggccaggctacagggggacagcagggctataccaggagtgccanagagcttgcatttgggtgtgatctaatcnccagtcctgccctgacctcctgggtgctcttagccaagccctcttccctgtgtgtgctagaaagtgagggtcactcccttccacacaagggagtgaattgagggtggggatctgagctctctgagcagcaaagctggacacaggccaaattgccaatcctgagtccctctgtcatgtggacctgggaagcttgtcctcatcctccatccttccccagggtggggnctgagaatctgagtgcagtggtgccatcttggctcactgcagcctcaacctcgctcgagtgatcctcccacctcaggtcctaaaggaagagtcgctacattggggactgtttggacaaggagatccacggggtagacttagcgggattgtccctggggcagcctggatcctgaggctgccccgcctccttcctcagcccctccctggtcaggcgctcctggtgggtggggggggtagtccaggcttgtcttgcaactgtatgttctcttcagacccctccctggcgatgccagattcactgggctggcagattctgcccccaaacctgtccaaccagttgtttgagaggagggggtagctgggaggggcagcaggagatgccaggaacagcttcccctagcacagcacagactacagacaggggagcctctggggctgcagacactgcagacggacggacagacagatggacaacagctggaggcttggcccggccatagggctctctgcgggacagtcccagctgctagtgtcgctgttgctgctactgacccgtgtccagcctgggacagacgtggccacccagagcttcacggccccacggacaaaccaggacatccctgctcctgccaacttctcccagaggggctactatctcacactgagggccaaccgggtgctgtaccagaccagaggccagctccatgtcctccgcgtcggcaatgatacccactgccaaccaacaaaaattggctgcaaccatcccctaccaggacccggcccctacagggtgaagttcctggtgatgaatgacgaaggacccgtggctgaaaccaagtggtccagcgacactcgcctgcagcaagcccaggcacttcgggctgtccccggcccccagagcccgggcaccgtggtcatcatcgccatcctgtctatcctcctggccgtcctcctcacggtcctcctggctgtgctcatatacacctgcttcaacagctgcaggagcacttccctatcaggcccagaggaggcagggagtgtgagaagatacaccacgcacctcgcgttcagcactcctgccgagggggcttcctgaggggttccagaggggcccacgtgtccctccacctcctccctggcccaggctgcagagcctgagctgggacacgccctgaagcttctggaccctgagagagattgtttcttttctttactatttttttttttttttttgagacggagtctcactctgtcgccaggctggcgcgatcttggctcactgcaacctctgcctcacgggttcaagcgattttcctgcttcagcctcctgagtagctgggactacaggcacacgccaccatgcccagctcatttttgtatttttagtagagatggggtttcaccatgttggccaggatggcctccatctcttgaccttgtgatccgcccgactcggcctcccaaaatgctgggattacaggcgtgagccatcaagtctggcgagagagattgtttctagatgagggtgggggcgggtgtccttagcccaaagcttgtgccagtctctatcagaaataaatgcccccaaaacctc

SEQ ID NO: 408208 - DNA, 1269 bp, Homo sapiens
ttgggtgtaacttacggctaggtacgaggctggtggcggcggcggcggacccttggggtctggacgcaacggcggcgggagcatgaacgcccctccagccttcgagtcgttcttgctcttcgagggcgagaagaagatcaccattaacaaggacaccaaggtacccaatgcctgtttattcaccatcaacaaagaagaccacacactgggaaacatcattaaatcacgtgcctgcttccccttcgccttctgccgtgattgtcagtttcctgaggcctccccagccacgcttcctgtacagcctgcagaactctgccccagagcacatcagctatgtgccccagctctcaaacgacaccttggcggggaggctcaccctgtccaccttcacgctggagcagcctctaggccagttcagcagccacaacatctctgacttggataccatctggctggtggtggccctcagcaacgccacccagagcttcacggccccacggacaaaccaggacatccctgctcctgccaacttctcccagaggggctactatctcacactgagggccaaccgggtgctgtaccagaccagaggccagctccatgtcctccgcgtcggcaatgatacccactgccaaccaacaaaaattggctgcaaccatcccctaccaggacccggcccctacagggtgaagttcctggtgatgaatgacgaaggacccgtggctgaaaccaagtggtccagcgacactcgcctgcagcaagcccaggcacttcgggctgtccccggcccccagagcccgggcaccgtggtcatcatcgccatcctgtctatcctcctggccgtcctcctcacggtcctcctggctgtgctcatatacacctgcttcaacagctgcaggagcacttccctatcaggcccagaggaggcagggagtgtgagaagatacaccacgcacctcgcgttcagcactcctgccgagggggcttcctgaggggttccagaggggcccacgtgtccctccacctcctccctggcccaggctgcagagcctgagctgggacacgccctgaagcttctggaccctgagagagattgtttcttttctttactatttttttttttttttttgagacggagtctcactctgtcgccagggtggggcgatcttgggtcaatgcaacctctgcctcagggttcaagcgattttcctgcttaagcctcctgagtagctgggactacaggcacacgccaccatgcccagctcattt

SEQ ID NO: 408209 - DNA, 1389 bp, Homo sapiens
ttgggtgtaacttacggctaggtacgaggctggtggcggcggcggcggacccttggggtctggacgcaacggcggcgggagcatgaacgcccctccagccttcgagtcgttcttgctcttcgagggcgagaagaagatcaccattaacaaggacaccaaggtacccaatgcctgtttattcaccatcaacaaagaagaccacacactgggaaacatcattaaatcacgtgcctgcttccccttcgccttctgccgtgattgtcagtttcctgaggcctccccagccacgcttcctgtacagcctgcagaactctgccccagagcacatcagctatgtgccccagctctcaaacgacaccttggcggggaggctcaccctgtccaccttcacgctggagcagcctctaggccagttcagcagccacaacatctctgacttggataccatctggctggtggtggccctcagcaacgccacccagagcttcacggccccacggacaaaccaggacatccctgctcctgccaacttctcccagaggggctactatctcacactgagggccaaccgggtgctgtaccagaccagaggccagctccatgtcctccgcgtcggcaatgatacccactgccaaccaacaaaaattggctgcaaccatcccctaccaggacccggcccctacagggtgaagttcctggtgatgaatgacgaaggacccgtggctgaaaccaagtggtccagcgacactcgcctgcagcaagcccaggcacttcgggctgtccccggcccccagagcccgggcaccgtggtcatcatcgccatcctgtctatcctcctggccgtcctcctcacggtcctcctggctgtgctcatatacacctgcttcaacagctgcaggagcacttccctatcaggcccagaggaggcagggagtgtgagaagatacaccacgcacctcgcgttcagcactcctgccgagggggcttcctgaggggttccagaggggcccacgtgtccctccacctcctccctggcccaggctgcagagcctgagctgggacacgccctgaagcttctggaccctgagagagattgtttcttttctttactatttttttttttttttttgagacggagtctcactctgtcgccaggctgaggcaggagaatcgcttgaacccaggaggcggtggttgtagtgagctaggatcatgccattgcagtccagcctggacagcaaagctagactccatctcaaaaaagaaaagaaaaagtaaaaaatttaaaaattagatgggcatggtgacatgtgcctgtaatcccaggtactaaggaagctgaggtaggaggatgacttgagcctaggagttcgaggctgcagtgagctc

SEQ ID NO: 408210 - DNA, 1521 bp, Homo sapiens
ttgggtgtaacttacggctaggtacgaggctggtggcggcggcggcggacccttggggtctggacgcaacggcggcgggagcatgaacgcccctccagccttcgagtcgttcttgctcttcgagggcgagaagaaaagtaagtgacgccggctgcggagggccgaggatcaccattaacaaggacaccaaggtacccaatgcctgtttattcaccatcaacaaagaagaccacacactgggaaacatcattaaatcacgtgcctgcttccccttcgccttctgccgtgattgtcagtttcctgaggcctccccagccacgcttcctgtacagcctgcagaactctgccccagagcacatcagctatgtgccccagctctcaaacgacaccttggcggggaggctcaccctgtccaccttcacgctggagcagcctctaggccagttcagcagccacaacatctctgacttggataccatctggctggtggtggccctcagcaacgccacccagagcttcacggccccacggacaaaccaggacatccctgctcctgccaacttctcccagaggggctactatctcacactgagggccaaccgggtgctgtaccagaccagaggccagctccatgtcctccgcgtcggcaatgatacccactgccaaccaacaaaaattggctgcaaccatcccctaccaggacccggcccctacagggtgaagttcctggtgatgaatgacgaaggacccgtggctgaaaccaagtggtccagcgacactcgcctgcagcaagcccaggcacttcgggctgtccccggcccccagagcccgggcaccgtggtcatcatcgccatcctgtctatcctcctggccgtcctcctcacggtcctcctggctgtgctcatatacacctgcttcaacagctgcaggagcacttccctatcaggcccagaggaggcagggagtgtgagaagatacaccacgcacctcgcgttcagcactcctgccgagggggcttcctgaggggttccagaggggcccacgtgtccctccacctcctccctggcccaggctgcagagcctgagctgggacacgccctgaagcttctggaccctgagagagattgtttcttttctttactatttttttttttttttttgagacggagtctcactctgtcgccaggctggcgcgatcttggctcactgcaacctctgcctcacgggttcaagcgattttcctgcttcagcctcctgagtagctgggactacaggcacacgccaccatgcccagctcatttttgtatttttagtagagatggggtttcaccatgttggccaggatggcctccatctcttgaccttgtgatccgcccgactcggcctcccaaaatgctgggattacaggcgtgagccatcaagtctggcgagagagattgtttctagatgagggtgggggcgggtgtccttagcccaaagcttgtgccagtctctatcagaaataaatgcccccaaaacctc

SEQ ID NO: 408211 - DNA, 655 bp, Homo sapiens
cgacccctcctcagcagacgcaggtggcggcggcggcggacccttggggtctggacgcaacggcggcgggagcatgaacgcccctccagccttcgagtcgttcttgctcttcgagggcgagaagaagatcaccattaacaaggacaccaaggtacccaatgcctgtttattcaccatcaacaaagaagaccacacactgggaaacatcattaaatcacaactcctaaaagacccgcaagtgctatttgctggctacaaagtcccccaccccttggagcacaagatcatcatccgagtgcagaccacgccggactacagcccccaggaagcctttaccaacgccatcaccgacctcatcagtgagctgtccctgctggaggagcgctttcgggtggccataaaagacaagcaggaaggaattgagtaggggccagagggggctctgctcggcctgtgagccccgttcctacctgtgcctgaccctccgctccaggtaccacaccgaggagagcggccggtcccagccatggcccgccttgtggccacccctcaccctgacaccgacgtgttggccacccctcaccctgacaccgacgtgtcctgtacatagattaggttttatattcctaataaagtatagcggaagagacctgga

SEQ ID NO: 408212 - DNA, 1067 bp, Homo sapiens
cgacccctcctcagcagacgcaggtggcggcggcggcggacccttggggtctggacgcaacggcggcgggagcatgaacgcccctccagccttcgagtcgttcttgctcttcgagggcgagaagaagatcaccattaacaaggacaccaaggtacccaatgcctgtttattcaccatcaacaaagaagaccacacactgggaaacatcattaaatcacaactcctaaaagacccgcaagtgctatttgctggctacaaagtcccccaccccttggagcacaagatcatcatccgagtgcagaccacgccggactacagcccccaggaagcctttaccaacgccatcaccgacctcatcagtgagctgtccctgctggaggagcgctttcgggtggccataaaagacaagcaggaaggaattgagtaggggccagagggggctctgctcggcctgtgagccccgttcctacctgtgcctgaccctccgctccaggtaccacaccgaggagagcggccggtcccagccatggcccgccttgtggccacccctcaccctgacaccgacgtgtcctgtacatagattaggttttatattcctaataaagtatagcggaagagacctggatgtggacttgagcagcggtgacttcgcaagcaaatggattgtcaggcttgatgcaggcagatgacctgtttcaggggcgtccggctggcagggatgaattcattctggaccaaagatccggggtccaggggctgctgcgggggctgtgctgagccggagagaagtgtgcaaacccatgagctcccaagagtctctgctctagaagcctcaactcctgggcctgcctgtcagtcaaagcaggaacacttcttcctgcataactcgaaacacctttccacaggcttcttgtccacagtagagtttaataaaaatattcactgaaagaccccccccacccccatcggcccaaagctgaataagttagttagctgtgtccctggtcctttgcgatggtgtgaggctacatcctcccccagatggctacgatgttggagtccgtcag

SEQ ID NO: 408213 - DNA, 1889 bp, Homo sapiens
  misc_feature (503)..(503): n is a, c, g, or t
  misc_feature (801)..(801): n is a, c, g, or t
  misc_feature (830)..(830): n is a, c, g, or t
  misc_feature (1055)..(1055): n is a, c, g, or t
cgacccctcctcagcagacgcaggtggcggcggcggcggacccttggggtctggacgcaacggcggcgggagcatgaacgcccctccagccttcgagtcgttcttgctcttcgagggcgagaagaagatcaccattaacaaggacaccaaggtacccaatgcctgtttattcaccatcaacaaagaagaccacacactgggaaacatcattaaatcacaactcctaaaagacccgcaagtgctatttgctggctacaaagtcccccaccccttggagcacaagatcatcatccgagtgcagaccacgccggactacagcccccaggaagcctttaccaacgccatcaccgacctcatcagtgagctgtccctgctggaggagcgctttcggacgtgcctgcttccccttcgccttctgccgtgattgtcagtttcctgaggcctccccagccacgcttcctgtacagcctgcagaactagacggggtttttccacgttggtcnggctggtctcaaacttctgacctcagatgatccgcccaccttggccacccaaagtgctgggattacaggtgtgaaccactgcgcccggccagaagtttttcttgtgagttgaggtgaacatctgaatcccctcggggaactgaggaggaggaactaccctgccctgacagaggctggggatgaaggaggaagagacagccggtcccctggataaagaggtgagggggtgtgaagtctgggagcccccctcccagggccaggctacagggggacagcagggctataccaggagtgccanagagcttgcatttgggtgtgatctaatcnccagtcctgccctgacctcctgggtgctcttagccaagccctcttccctgtgtgtgctagaaagtgagggtcactcccttccacacaagggagtgaattgagggtggggatctgagctctctgagcagcaaagctggacacaggccaaattgccaatcctgagtccctctgtcatgtggacctgggaagcttgtcctcatcctccatccttccccagggtggggnctgagaatctgagtgcagtggtgccatcttggctcactgcagcctcaacctcgctcgagtgatcctcccacctcaggtcctaaaggaagagtcgctacattggggactgtttggacaaggagatccacggggtagacttagcgggattgtccctggggcagcctggatcctgaggctgccccgcctccttcctcagcccctccctggtcaggcgctcctggtgggtggggggggtagtccaggcttgtcttgcaactgtatgttctcttcagacccctccctggcgatgccagattcactgggctggcagattctgcccccaaacctgtccaaccagttgtttgagaggagggggtagctgggaggggcagcaggagatgccaggaacagcttcccctagcacagcacagactacagacaggggagcctctggggctgcagacactgcagacggacggacagacagatggacaacagctggaggcttggcccggccatagggctctctgcgggacagtcccagctgctagtgtcgctgttgctgctactgacccgtgtccagcctgggacagacgtggctgccccagagcacatcagctatgtgccccagctctcaaacgacaccttggcggggaggctcaccctgtccaccttcacgctggagcagcctctaggccagttcagcagccacaacatctctgacttggataccatctggctggtggtggccctcagcaacgccacccagagcttcacggccccacggacaaaccaggacatccctgctcctgccaacttctcccagagtgtctgttcttggggatccttagagtg

SEQ ID NO: 408214 - DNA, 1195 bp, Homo sapiens
cgacccctcctcagcagacgcaggtggcggcggcggcggacccttggggtctggacgcaacggcggcgggagcatgaacgcccctccagccttcgagtcgttcttgctcttcgagggcgagaagaagatcaccattaacaaggacaccaaggtacccaatgcctgtttattcaccatcaacaaagaagaccacacactgggaaacatcattaaatcacaactcctaaaagacccgcaagtgctatttgctggctacaaagtcccccaccccttggagcacaagatcatcatccgagtgcagaccacgccggactacagcccccaggaagcctttaccaacgccatcaccgacctcatcagtgagctgtccctgctggaggagcgctttcggacgtgcctgcttccccttcgccttctgccgtgattgtcagtttcctgaggcctccccagccacgcttcctgtacagcctgcagaactgaggaggaactaccctgccctgacagaggctggggatgaaggaggaagagacagccggtcccctggataaagaggcagacactgcagacggacggacagacagatggacaacagctggaggcttggcccggccatagggctctctgcgggacagtcccagctgctagtgtcgctgttgctgctactgacccgtgtccagcctgggacagacgtggctgccccagagcacatcagctatgtgccccagctctcaaacgacaccttggcggggaggctcaccctgtccaccttcacgctggagcagcctctaggccagttcagcagccacaacatctctgacttggataccatctggctggtggtggccctcagcaacgccacccagagcttcacggccccacggacaaaccaggacatccctgctcctgccaacttctcccagaggggctactatctcacactgagggccaaccgggtgctgtaccagaccagaggccagctccatgtcctccgcgtcggcaatgatacccactgccaaccaacaaaaattggctgcaaccatcccctaccaggacccggcccctacagtacagggtgaagttctggtgatgatgacgaaggaccgtggtgaaacagtggtccaggaaactcgctgtaggagccagggactcgggtgtccgggccagaacgggcgggcacatcgcccgttatcccggg

SEQ ID NO: 408215 - DNA, 988 bp, Homo sapiens
  misc_feature (750)..(750): n is a, c, g, or t
  misc_feature (812)..(814): n is a, c, g, or t
  misc_feature (826)..(827): n is a, c, g, or t
  misc_feature (829)..(829): n is a, c, g, or t
  misc_feature (835)..(835): n is a, c, g, or t
ttgggtgtaacttacggctaggtacgaggctggtggcggcggcggcggacccttggggtctggacgcaacggcggcgggagcatgaacgcccctccagccttcgagtcgttcttgctcttcgagggcgagaagaagatcaccattaacaaggacaccaaggtacccaatgcctgtttattcaccatcaacaaagaagaccacacactgggaaacatcattaaatcacgtgcctgcttccccttcgccttctgccgtgattgtcagtttcctgaggcctccccagccacgcttcctgtacagcctgcagaactctgccccagagcacatcagctatgtgccccagctctcaaacgacaccttggcggggaggctcaccctgtccaccttcacgctggagcagcctctaggccagttcagcagccacaacatctctgacttggataccatctggctggtggtggccctcagcaacgccacccagagcttcacggccccacggacaaaccaggacatccctgctcctgccaacttctcccagaggggctactatctcacactgagggccaaccgggtgctgtaccagaccagaggccagctccatgtcctccgtctcaaagaaacaaaaataaaaaataaataaataaataaataagaaaacgcaacaaagaacagaagaggactccacaggacttctttcagagcttcatagcagcatgaattcaacatcaggaattcaatgttgacgacanacagcaggatgggaggaagagtaagagcagcaaacggacacaaatcgcacgtggtggtcagnnntaacagaagggnnantcagtnctgggaggaagcgggaaaattccagagcacagggtgtcaatttcttgttttgtgaattcttcagagcctgctgggtggaaacttctcagggggtcgggaaatttcgaaaaaaaggttgtggggggggggctcgggcagtataggtattttgac

SEQ ID NO: 408216 - DNA, 1009 bp, Homo sapiens
ttgggtgtaacttacggctaggtacgaggctggtggcggcggcggcggacccttggggtctggacgcaacggcggcgggagcatgaacgcccctccagccttcgagtcgttcttgctcttcgagggcgagaagaagatcaccattaacaaggacaccaaggtacccaatgcctgtttattcaccatcaacaaagaagaccacacactgggaaacatcattaaatcacaactcctaaaagacccgcaagtgctatttgctggctacaaagtcccccaccccttggagcacaagatcatcatccgagtgcagaccacgccggactacagcccccaggaagcctttaccaacgccatcaccgacctcatcagcgagctgtccctgctggaggagcgcttccggacgtgcctgcttccccttcgccttctgccgtgattgtcagtttcctgaggcctccccagccacgcttcctgtacagcctgcagaactgccccactcacctcctccaactcctctggggaaacccaagccctgcagctcatggaacagaagaagtggaaccgtcgtttctggaacaggactatctgagagcggttcttcctggccctcgagttcatggaacggtataactggaaccgacgcttacggagcaagggtatgcgagagcggttcttcctggccctcgggttcgtggaacggtataactggaaccgacgcttacggagcaagggtatgcgagagcggttcttcctggccctcgggttcatggaatggcctaactggaaccaacgcttacggagcaagggtatgcgagagcggttcttcctatacaggaagtggaagatgttttgtttggagtcctcgtcgtcctcctccatgtcattggccaggtagctgaggacagaaatcaggttgctgctcaggggcaccaccaggagaggcctccggctgaggtcagcttcccagagaggaaggtaagggaccgtccctagctcaggactggcacccacc

SEQ ID NO: 408217 - DNA, 766 bp, Homo sapiens
  misc_feature (14)..(14): n is a, c, g, or t
  misc_feature (17)..(17): n is a, c, g, or t
  misc_feature (23)..(23): n is a, c, g, or t
  misc_feature (601)..(602): n is a, c, g, or t
  misc_feature (608)..(608): n is a, c, g, or t
  misc_feature (616)..(616): n is a, c, g, or t
  misc_feature (618)..(618): n is a, c, g, or t
  misc_feature (622)..(622): n is a, c, g, or t
  misc_feature (629)..(629): n is a, c, g, or t
  misc_feature (635)..(635): n is a, c, g, or t
  misc_feature (643)..(646): n is a, c, g, or t
  misc_feature (648)..(648): n is a, c, g, or t
  misc_feature (650)..(650): n is a, c, g, or t
  misc_feature (655)..(655): n is a, c, g, or t
  misc_feature (661)..(662): n is a, c, g, or t
  misc_feature (664)..(664): n is a, c, g, or t
  misc_feature (666)..(666): n is a, c, g, or t
  misc_feature (673)..(673): n is a, c, g, or t
  misc_feature (680)..(680): n is a, c, g, or t
  misc_feature (683)..(683): n is a, c, g, or t
  misc_feature (686)..(686): n is a, c, g, or t
  misc_feature (695)..(695): n is a, c, g, or t
  misc_feature (704)..(704): n is a, c, g, or t
  misc_feature (714)..(714): n is a, c, g, or t
tcagctcggtaccnggnacttcntgtgggggtttcttgctgcagcaacgcgagtgggagcaccaggatctcgggctcggaacgagactgcacggattgttttaagaaaatggcagacaaaccagacatgggggaaatcgccagcttcgataaggccaagctgaagaaaacggagacgcaggagaagaacaccctgccgaccaaagagaccattgagcaggagaagcggagtgaaatttcctaagatcctggaggatttcctacccccgtcctcttcgagaccccagtcgtgatgtggaggaagagccacctgcaagatggacacgagccacaagctgcactgtgaacctgggcactccgcgccgatgccaccggcctgtgggtctctgaagggacccccccccaatcggactgccaaattctccggtttgccccgggatattatagaaaattatttgtatgaataatgaaaataaaacacacctcgtggcaaaaaaaaaaaaaaaaaaaaaaaaaaaaaaaaaaaaaaaaaaaaaaaaaaaaaaaaacaaaaaaaaaaaaaaaaaaagggaaaaaaaaaaaaaaaaaaaaaaaaaaccttnngggccntttggccnantganttttaanttgggnaagctttnnnntngngcccnaatttnngncnaattggncaattcnccntanggggggcgnttaaaaatnaagggccggngtttaacagggggggaggggaaaaccggggggtcacaattaatggcttggaa

SEQ ID NO: 408218 - DNA, 736 bp, Homo sapiens
  misc_feature (14)..(14): n is a, c, g, or t
  misc_feature (17)..(17): n is a, c, g, or t
  misc_feature (23)..(23): n is a, c, g, or t
  misc_feature (594)..(594): n is a, c, g, or t
tcagctcggtaccnggnacttcntgtgggggtttcttgctgcagcaacgcgagtgggagcaccaggatctcgggctcggaacgagactgcacggattgttttaagaaaatggcagacaaaccagacatgggggaaatcgccagcttcgataaggccaagctgaagaaaacggagacgcaggagaagaacaccctgccgaccaaagagaccattgagcaggagaagcggagtgaaatttcctaagatcctggaggatttcctacccccgtcctcttcgagaccccagtcgtgatgtggaggaagagccacctgcaagatggacacgagccacaagctgcactgtgaacctgggcactccgcgccgatgccaccggcctgtgggtctctgaagggacccccccccaatcggactgccaaattctccggtttgccccgggatattatagaaaattatttgtatgaataatgaaaataaaacacacctcgtggcaaaaaaaaaaaaaaaaaaaaaaaaaaaaaaaaaaaaaaaaaaaaaaaaaaaaaaaaacaaaaaaaaaaaaaaaaaaagggaaaaaaaaaaaaaataaaaaaaancaaaaaaaaaaaaaaaaattgtgggccgcttgggccaatggttttttaaattggagcagttttttgttggggccccattttgggcaactttggcaatttcgcctatggggaggggtttaaacattagtggcccggggtttaa

SEQ ID NO: 408219 - DNA, 731 bp, Homo sapiens
  misc_feature (14)..(14): n is a, c, g, or t
  misc_feature (17)..(17): n is a, c, g, or t
  misc_feature (23)..(23): n is a, c, g, or t
tcagctcggtaccnggnacttcntgtgggggtttcttgctgcagcaacgcgagtgggagcaccaggatctcgggctcggaacgagactgcacggattgttttaagaaaatggcagacaaaccagacatgggggaaatcgccagcttcgataaggccaagctgaagaaaacggagacgcaggagaagaacaccctgccgaccaaagagaccattgagcaggagaagcggagtgaaatttcctaagatcctggaggatttcctacccccgtcctcttcgagaccccagtcgtgatgtggaggaagagccacctgcaagatggacacgagccacaagctgcactgtgaacctgggcactccgcgccgatgccaccggcctgtgggtctctgaagggacccccccccaatcggactgccaaattctccggtttgccccgggatattatagaaaattatttgtatgaataatgaaaataaaacacacctcgtggcatggcaaaaaaaaaatttaattactaaaatattatataccataaacattttatcactttacaacttcccttccttatcttttacactacctatcttccccaaattacaacaaaaaaaactttttttcgcggggacaccacccggggccactttaaaaaggtcccaggttacccaagtttctggccccttttttaagggatggggccccccgtgccccctgctttgggacccccgcctttcc

SEQ ID NO: 408220 - DNA, 456 bp, Homo sapiens
  misc_feature (14)..(14): n is a, c, g, or t
  misc_feature (17)..(17): n is a, c, g, or t
  misc_feature (23)..(23): n is a, c, g, or t
  misc_feature (427)..(427): n is a, c, g, or t
tcagctcggtaccnggnacttcntgtgggggtttcttgctgcagcaacgcgagtgggagcaccaggatctcgggctcggaacgagactgcacggattgttttaagaaaatggcagacaaaccagacatgggggaaatcgccagcttcgataaggccaagctgaagaaaacggagacgcaggagaagaacaccctgccgaccaaagagaccattgagcaggagaagcggagtgaaatttcctaagatcctggaggatttcctacccccgtcctcttcgagaccccagtcgtgatgtggaggaagagccacctgcaagatggacacgagccacaagctgcactgtgaacctgggcactccgcgccgatgccaccggcctgtgggtctctgaagggacccccccccaatcggactgccaaattctccggnggccccgggcagttaccaggtaccgagcc

SEQ ID NO: 408221 - DNA, 515 bp, Homo sapiens
ccacttcgatcgaagtgtgcacacttcgatcgcggagaagaacaccctgccgaccaaagagaccattgagcaggagaagcggagtgaaatttcctaagatcctggaggatttcctacccccgtcctcttcgagaccccagtcgtgatgtggaggaagagccacctgcaagatggacacgagccacaagctgcactgtgaacctgggcactccgcgccgatgccaccggcctgtgggtctctgaagggacccccccccaatcggactgccaaattctccgcgatcgaagtgtgcacacttcgatcgcggagaatgggggataggtgtatgaacatgagggtgttttctcgtgtgaatgagggttttatgttgttaatgtggtgggtgagtgagccccattgtgttgtggtaaatatgtagagggagtatagggctgtgactagtatgttgagtcctgtaagtaggagagtgatatttgatcaggagaacgtgttactacacagagtcttctcttta

SEQ ID NO: 408222 - DNA, 599 bp, Homo sapiens
ttaggccaacgagcccatttttttttcccccccttcttaaaacaactacatttattttgctcatgagtctgcaatttcagcagggacaactcatctctgctccacttggcattagctggggcagtttgaagcttcgaagtctccttcacttgtgtggttagtggttgatgctggctgttagctctgacctcagctgaggctgtggctggaatgccgacatgtggcctttccttgtagatgcttgattttctcacaacttggaggcatcctcgtggcatggctggcgtggtctgagtcttttagttgagtatgcgtgggcagtgccactgcagcaaagcccctcgatggagtagagttcctgccgcaaaggggaggaggtgggtcgcagaatgggctgactcggagggagtttttaattttggctttacctgcttctccgtaagatttcatgacttgttagccacttaactcttgctcgtaagcaatctgtgtaaaatttaaccccactttgtccccaggttgcgttggaaaatgctttttcaaaagagcaaggtttgcttttgataagcttcgaaagccccactgtttccctctggcct

SEQ ID NO: 408223 - DNA, 591 bp, Homo sapiens
  misc_feature (20)..(20): n is a, c, g, or t
  misc_feature (591)..(591): n is a, c, g, or t
gcttctgtttcttgctgcancaacgcgagtgggagcaccaggatctcgggctcggaacgagactgcacattgttttaagaaaatggcagacaaaccagacatgggggaaatcgccagcttcgataaggccaagctgaagaaaacggagacgcaggagaagaacaccctgccgaccaaagagaccattgagcaggagaagcggagtgaaatttcctaagatcctggaggatttcctacccccgtcctcttcgagaccccagtcgtgatgtggaggaagagccacctgcaagatggacacgagccacaagctgcactgtgaacctgggcactccgcgccgatgccaccggcctgtgggtctctgaagggacccccccccaatcggactgccaaattctccggtttgccccgggatattatagaaaattatttgtatgaataatgaaaataaaacacacctcgtggcatataaaaaaaatacaacctattcactatgcttttccaattggatgggggacaataggtgaagatgcacagctggcggccgaatttgggcttattgggccatttcgccttaggaggggggattaaan

SEQ ID NO: 408224 - DNA, 657 bp, Homo sapiens
tccgctcggacgaggtgtggcatatgagagtgcgcatgtgcaacacgtgttcccagccaaggggtccaagaagggcagcgtgtccatgaagaccttgtcaatgaatgggtggaagggggcacacaagtcctccaagctttgaggtggtcccgagcaggacggtcccgctcggacgagactgcacggattgttttaagaaaatggcagacaaaccagacatgggggaaatcgccagcttcgataaggccaagctgaagaaaacggagacgcaggagaagaacaccctgccgaccaaagagaccattgagcaggagaagcggagtgaaatttcctaagatcctggaggatttcctacccccgtcctcttcgagaccccagtcgtgatgtggaggaagagccacctgcaagatggtccgagcggagtccgctcggacgatgttcttcatctggcgcctcaaggacgaggtcgacatggtgcccggctgcagcagcaaggggcacagggccccgatgcgtggagagatggggcgactcccggacgaaggctgcggcaggtgctggcaggtcaccgcatctgcgaggggaagaggacctctttttcaacactgcatgcaaagactgggctccttactcctggagcagcctggtccgagcgga

SEQ ID NO: 408225 - DNA, 700 bp, Homo sapiens
agcgggtttcttgcttgcagcaacgcgagtgggagcaccaggatctcgggctcggaacgagactgcacattgttttaagaaaatggcagacaaaccagacatgggggaaatcgccagcttcgataaggccaagctgaagaaaacggagacgcaggagaagaacaccctgccgaccaaagagaccattgagcaggagttgagcaggagaagcggagtgaaatttcctaagatcctggaggatttcctacccccgtcctcttcgagaccccagtcgtgatgtggaggaagagccacctgcaagatggacacgagccacaagctgcactgtgaacctgggcactccgcgccgatgccaccggcctgtgggtctctgaagggacccccccccaatcggactgccaaattctccggtttgccccgggatattatagaaaattatttgtatgaataatgaaaataaaacacacctcgtggcattcggcctgttgggcctaaacgattctagacttgagaaagttaatgcatgggttcgaaaattaggctaccttggccaattccccctaataaagagtcttttccaatccacctgccccaattttttaatgataggcatggtatatcctgggcgtcccaatttaattccttggcaaattccctttaagggttggattaaaccaaagggcccggaataaaccgcttc

SEQ ID NO: 408226 - DNA, 482 bp, Homo sapiens
tgctggtaccggtccccaagttcgttcaacgcgagtgggagcaccaggatctcgggctcggaacgagactgcacattgttttaagaaaatggcagacaaaccagacatgggggaaatcgccagcttcgataaggccaagctgaagaaaacggagacgcaggagaagaacaccctgccgaccaaagagaccattgagcaggagttgagcaggagaagcggagtgaaatttcctaagatcctggaggatttcctacccccgtcctcttcgagaccccagtcgtgatgtggaggaagagccacctgcaagatggacacgagccacaagctgcactgtgaacctgggcactccgcgccgatgccaccggcctgtgggtctctgaagggacccccccccaatcggactgccaaattctccggtttgccccgggatattatagaaaattatttgtatgaataatgaaaataaaacacacctcgtggca

SEQ ID NO: 408227 - DNA, 476 bp, Homo sapiens
agcgggtttcttgcttgcagcaacgcgagtgggagcaccaggatctcgggctcggaacgagactgcacattgttttaagaaaatggcagacaaaccagacatgggggaaatcgccagcttcgataaggccaagctgaagaaaacggagacgcaggagaagaacaccctgccgaccaaagagaccattgagcaggagttgagcaggagaagcggagtgaaatttcctaagatcctggaggatttcctacccccgtcctcttcgagaccccagtcgtgatgtggaggaagagccacctgcaagatggacacgagccacaagctgcactgtgaacctgggcactccgcgccgatgccaccggcctgtgggtctctgaagggacccccccccaatcggactgccaaattctccggtttgccccgggatattatagaaaattatttgtatgaataatgaaaataaaacacacctcgtggca

SEQ ID NO: 408228 - DNA, 323 bp, Homo sapiens
agaagattagcatggcccctgcgcaaggatgacacgcaaattcgtgaagcgaagcggagtgaaatttcctaagatcctggaggatttcctacccccgtcctcttcgagaccccagtcgtgatgtggaggaagagccacctgcaagatggacacgagccacaagctgcactgtgaacctgggcactccgcgccgatgccaccggcctgtgggtctctgaagggaccccccccccccaatcggactgccaaattctccggtttgccccgggatattatagaaaattatttgtatgaataatgaaaataaaacacacctcgtggca

SEQ ID NO: 408229 - DNA, 393 bp, Homo sapiens
  misc_feature (27)..(27): n is a, c, g, or t
  misc_feature (44)..(44): n is a, c, g, or t
  misc_feature (49)..(50): n is a, c, g, or t
tgcggtggggcctggcagcgagactgnacggattgttttaaganaatgnnagacaaaccagacatgggggaaatcgccagcttcgataaggccaagctgaagaaaacggagacgcaggagaagaacaccctgccgaccaaagagaccattgagcaggagaagcggagtgaaatttcctaagatcctggaggatttcctacccccgtcctcttcgagaccccagtcgtgatgtggaggaagagccacctgcaagatggacacgagccacaagctgcactgtgaacctgggcactccgcgccgatgccaccggcctgtgggtctctgaagggacccccccccaatcggactgccaaattctccggttgcgtatatagaaatatttgtatgaacta

SEQ ID NO: 408230 - DNA, 420 bp, Homo sapiens
atataaggctaggggcgggcgccgctcttttgtttcttgctgcagcaacgcgagtgggagcaccaggatctcgggctcggaacgagactgcacggattgttttaagaaaatggcagacaaaccagacatgggggaaatcgccagcttcgataaggccaagctgaagaaaacggagacgcaggagaagaacaccctgccgaccaaagagaccattgagcaggagaagcggagtgaaatttcctaagatcctggaggatttcctacccccgtcctcttcgagaccccagtcgtgatgtggaggaagagccacctgcaagatggacacgagccacaagctgcactgtgaacctgggcactccgcgccgatgccaccggcctgtgggtctctgaagggacacaaaacaaacaatcgacatcaca

SEQ ID NO: 408231 - DNA, 726 bp, Homo sapiens
  misc_feature (484)..(484): n is a, c, g, or t
atataaggctaggggcgggcgccgctcttttgtttcttgctgcagcaacgcgagtgggagcaccaggatctcgggctcggaacgagactgcacattgttttaagaaaatggcagacaaaccagacatgggggaaatcgccagcttcgataaggccaagctgaggagaagaacaccctgccgaccaaagagaccattgagcaggagaagcggagtgaaatttcctaagatcctggaggatttcctacccccgtcctcttcgagaccccagtcgtgatgtggaggaagagccacctgcaagatggacacgagccacaagctgcactgtgaacctgggcactccgcgccgatgccaccggcctgtgggtctctgaagggacccccccccaatcggactgccaaattctccggtttgccccgggatattatagaaaattatttgtatgaataatgaaaataaaacacacctcgtggcatggcaaaaanaaacaactgatctgattccccctctcactatataactcttcagcccctttcaaatacatggaaccactactttaacccaatgcctctttaaatcggtcaagcctaacgatccgactgcccaattgggactccattcgtcccattggcccttaaccatactcttctctctcaataggccgtgctttctaatccttacctctggctacaccctcgggggttcctctagttacatgttcttctgt

SEQ ID NO: 408232 - DNA, 516 bp, Homo sapiens
  misc_feature (457)..(457): n is a, c, g, or t
actagtccacggttggctggaggagcaaccgtggctgagcaagcagggaggcagcttaggaatgcctgtacggccccacctcccaccaacctcaggtcaggcaggtgggaggtgccagcccgggggctgtggccacactcaggaacacaggatcccaggaaagcagacagtggcaagcagcttcggggcggggctttcctgctctggaccactgacctctgatctctgaagaactttctgtcccacaagctagcgattgtggccaccacttacccagtactctctgtgccaggaaatacgctatcgtctcactgaattaatgagaaaacagagaccattgagcaggagaagcggagtgaaatttcctaagatcctggaggatttcctacccccgtcctcttcgagaccccagtcgtgatgtggaggaagagccacctgcaagatggacacgagcctnatcttggcgtgtgaatcttgtcgcatccgcgcctgatcgcatccttctctgcgcttggc

SEQ ID NO: 408233 - DNA, 477 bp, Homo sapiens
  misc_feature (4)..(4): n is a, c, g, or t
ggtnactctccaggattcgtccgctcggaccaacgcgagtgggagcaccaggatctcgggctcggaacgagactgcacggattgttttaagaaaatggcagacaaaccagacatgggggaaatcgccagcttcgataaggccaagctgaagaaaacggagacgcaggagaagaacaccctgccgaccaaagagaccattgagcaggagaagcggagtgaaatttcctaagatcctggaggatttcctacccccgtcctcttcgagaccccagtcgtgatgtggaggaagagccacctgcaagatggacacgagccacaagctgcactgtgaacctgggcactccgcgccgatgccaccggcctgtgggtctctgaagggacccccccccaatcggactgccaaattctccggtttgccccgggatattatagaaaattatttgtatgaataatgaaaataaaacacacctcgtggca

SEQ ID NO: 408234 - DNA, 693 bp, Homo sapiens
  misc_feature (14)..(14): n is a, c, g, or t
  misc_feature (17)..(17): n is a, c, g, or t
  misc_feature (23)..(23): n is a, c, g, or t
  misc_feature (581)..(581): n is a, c, g, or t
tcagctcggtaccnggnacttcntgtgggggtttcttgctgcagcaacgcgagtgggagcaccaggatctcgggctcggaacgagactgcacggattgttttaagaaaatggcagacaaaccagacatgggggaaatcgccagcttcgataaggccaagctgaagaaaacggagacgcaggagaagaacaccctgccgaccaaagagaccattgagcaggagaagcggagtgaaatttcctaagatcctggaggatttcctacccccgtcctcttcgagaccccagtcgtgatgtggaggaagagccacctgcaagatggacacgagccacaagctgcactgtgaacctgggcactccgcgccgatgccaccggcctgtgggtctctgaagggacccccccccaatcggactgccaaattctccggtttgccccgggatattatagaaaattatttgtatgaataatgaaaataaaacacacctcgtggcaaaaaaaaaaaaaaaaaaaaaaaaaaaaaaaacaaaaaaaaaaaaaaaaaaagggaaaaaaaaaaaaaaaaaaatagagaaaaaaaaaaanaaaaacgcccgaaattgggctaatttggcaatatccccttaggggggcggattaacaataagtgccgggttttacaacgcggaactgggcccttgcggtccccatttggctt

SEQ ID NO: 408235 - DNA, 1498 bp, Homo sapiens
  misc_feature (14)..(14): n is a, c, g, or t
  misc_feature (17)..(17): n is a, c, g, or t
  misc_feature (23)..(23): n is a, c, g, or t
tcagctcggtaccnggnacttcntgtgggggtttcttgctgcagcaacgcgagtgggagcaccaggatctcgggctcggaacgagactgcacggattgttttaagaaaatggcagacaaaccagacatgggggaaatcgccagcttcgataaggccaagctgaagaaaacggagacgcaggagaagaacaccctgccgaccaaagagaccattgagcaggagaagcggagtgaaatttcctaagatcctggaggatttcctacccccgtcctcttcgagaccccagtcgtgatgtggaggaagagccacctgcaagatggacacgagccacaagctgcactgtgaacctgggcactccgcgccgatgccaccggcctgtgggtctctgaagggacccccccccaatcggactgccaaattctccggtttgccccgggatattatagaaaattatttgtatgaataatgaaaataaaacacacctcgtggcaaaaaaaaaaaaaaaaaaaaaagagagggcgcgcgccgcgccccaagaagatccacccccgagaggggccccaggatctaacgcgcgctatcccccgagctataactccggcccaaaggggcccacgataaagagagcggcgcgaatctctaaacaagcatagcggacaaggggacaggacccacaaacaacaccggacaggcgaccagggcgcacaacccgagcgacacctgagggggcactccacacggccaaacacacacccacatcaacacacaaccggaagaccgcacaccatacaagggggccaaaccacaaccccaacaacgaacgctcccacacccccccacaaccggacacaccacacacacacccacacaccgctccacacaaggctgcaaacacacaccgaccccaccatcagaccaagacaaggaactacccccaaccccccgcccacaccccggcccaacacacagccacgcgaccccaaccaccaccacccccaggcgaccgaccccccacaccaacccccccgacaccacacaccacccccacccacaccccgcaccgcgcgccaccgcgccgcgcgccaggcgcccaaggcgcccgccggccagcgcaccccccgccgccggcgcccctccccgcccccgcgcccgcaccccccccccacgcgccccccaccaccccccggcccgaccaaggcgccgacgcgccgcgccccccccccccagcgccccccgccgccgcaccccccccccccaccccaccgccccaccggccccacccccgccgccggcgccccccccccaaaccccacaccccgccaccccccaccgcccgccaacgcgccccaccccagccgcgccgcgacgcccccccacccgcccccccgccgaacccggccggcccgacgccccacggcgaccagggccagccgcagcacgggcgccccacgagacaggcggacgcccgcgcgcacgaccgccccgcaccccccccggg

SEQ ID NO: 408236 - DNA, 703 bp, Homo sapiens
  misc_feature (14)..(14): n is a, c, g, or t
  misc_feature (17)..(17): n is a, c, g, or t
  misc_feature (23)..(23): n is a, c, g, or t
tcagctcggtaccnggnacttcntgtgggggtttcttgctgcagcaacgcgagtgggagcaccaggatctcgggctcggaacgagactgcacggattgttttaagaaaatggcagacaaaccagacatgggggaaatcgccagcttcgataaggccaagctgaagaaaacggagacgcaggagaagaacaccctgccgaccaaagagaccattgagcaggagaagcggagtgaaatttcctaagatcctggaggatttcctacccccgtcctcttcgagaccccagtcgtgatgtggaggaagagccacctgcaagatggacacgagccacaagctgcactgtgaacctgggcactccgcgccgatgccaccggcctgtgggtctctgaagggacccccccccaatcggactgccaaattctccggtttgccccgggatattatagaaaattatttgtatgaataatgaaaataaaacacacctcgtggcaaaaaaaaatagagaaaaaaaaaaaattgggggaataatattggggggggggaaaaaggggtaaggaagtgggcccatggggcgaataggtggtttctgtgaccaagagtttctgtgtcaaggtgggaaatttggcagggtttccatattagggaggggggattaaattgaagaaaagccagggttaccctggattaatgaatggggaaaagc

SEQ ID NO: 408237 - DNA, 1339 bp, Homo sapiens
  misc_feature (14)..(14): n is a, c, g, or t
  misc_feature (17)..(17): n is a, c, g, or t
  misc_feature (23)..(23): n is a, c, g, or t
tcagctcggtaccnggnacttcntgtgggggtttcttgctgcagcaacgcgagtgggagcaccaggatctcgggctcggaacgagactgcacggattgttttaagaaaatggcagacaaaccagacatgggggaaatcgccagcttcgataaggccaagctgaagaaaacggagacgcaggagaagaacaccctgccgaccaaagagaccattgagcaggagaagcggagtgaaatttcctaagatcctggaggatttcctacccccgtcctcttcgagaccccagtcgtgatgtggaggaagagccacctgcaagatggacacgagccacaagctgcactgtgaacctgggcactccgcgccgatgccaccggcctgtgggtctctgaagggacccccccccaatcggactgccaaattctccggtttgccccgggatattatagaaaattatttgtatgaataatgaaaataaaacacacctcgtggcatggcaaaaaaaaaaaaaaaaaaaaaaaaaacagtgtgtgtgggcgcgcgccctgggccccttggaagaaagcctttcgagagaaccacattgcgcggtgtggggagcgcggcgggccccagggaaggaaagagtgcgaacacgatgggctccaagagcggtgttatccacatgagggaaactcgcgggccacgagagcacacaagaggcgcgagggaaaattcccccaccccaatataagaaacaagggcccgggggggaccaacgcgcgacggcgttctctgggaacaaaagatcccccaagagaggcgcgctacactggggagggcgccacataaaacggggggcgtcttatatctcaacaaagaggaggggagaccaaaagcgagagcgccaccaagaagaccctaccaatattaaagcgcccccgccgctccagggtgggaaacaccaacgacaggaaagaaaacaccaaaaaccaaacaacaaccacaccagaaaacacacaggcaacaacgaactagcccgaaaacaagaaaaaaaggaggcaacaacaaacacaacaggggacgaagctcacagcaaacagcagacaagcgcacacccacaaatacagccgggctacacagcgacgacccgaaaaacgggaagcagagacgccgggcggcacggcgagcgagagggggagggggacgggcaggggcagagaaggaggaaacagcaggacagagaaagccgcggacgagggtgagaagaagaaaagagaaaagcgggaactgagggacgaacggaggcgcgccggaggcaagaatgcggccgagcggaaaaggcggcgcgagtaaaacggca

SEQ ID NO: 408238 - DNA, 518 bp, Homo sapiens
  misc_feature (14)..(14): n is a, c, g, or t
  misc_feature (17)..(17): n is a, c, g, or t
  misc_feature (23)..(23): n is a, c, g, or t
tcagctcggtaccnggnacttcntgtgggggtttcttgctgcagcaacgcgagtgggagcaccaggatctcgggctcggaacgagactgcacggattgttttaagaaaatggcagacaaaccagacatgggggaaatcgccagcttcgataaggccaagctgaagaaaacggagacgcaggagaagaacaccctgccgaccaaagagaccattgagcaggagaagcggagtgaaatttcctaagatcctggaggatttcctacccccgtcctcttcgagaccccagtcgtgatgtggaggaagagccacctgcaagatggacacgagccacaagctgcactgtgaacctgggcactccgcgccgatgccaccggcctgtgggtctctgaagggacccccccccaatcggactgccaaattctccggtttgccccgggatattatagaaaattatttgtatgaataatgaaaataaaacacacctcgtggcagcggccgcgaatttagtagtagtaggc

SEQ ID NO: 408239 - DNA, 583 bp, Homo sapiens
tccgctcggacgaggtgtggcatatgagagtgcgcatgtgcaacacgtgttcccagccaaggggtccaagaagggcagcgtgtccatgaagaccttgtcaatgaatgggtggaagggggcacacaagtcctccaagctttgaggtggtcccgagcaggacggtcccgctcggacgagactgcacggattgttttaagaaaatggcagacaaaccagacatgggggaaatcgccagcttcgataaggccaagctgaagaaaacggagacgcaggagaagaacaccctgccgaccaaagagaccattgagcaggagaagcggagtgaaatttcctaagatcctggaggatttcctacccccgtcctcttcgagaccccagtcgtgatgtggaggaagagccacctgcaagatggacacgagccacaagctgcactgtgaacctgggcactccgcgccgatgccaccggcctgtgggtctctgaagggacccccccccaatcggactgccaaattctccggtttgccccgggatattatagaaaattatttgtatgaataatgaaaataaaacacacctcgtggca

SEQ ID NO: 408240 - DNA, 437 bp, Homo sapiens
gcactccaagactcacggggccggaacgttaactgcccggattgttttaagaaaatggcagacaaaccagacatgggggaaatcgccagcttcgataaggccaagctgaagaaaacggagacgcaggagaagaacaccctgccgaccaaagagaccattgagcaggagaagcggagtgaaatttcctaagatcctggaggatttcctacccccgtcctcttcgagaccccagtcgtgatgtggaggaagagccacctgcaagatggacacgagccacaagctgcactgtgaacctgggcactccgcgccgatgccaccggcctgtgggtctctgaagggacccccccccaatcggactgccaaattctccggtttgccccgggatattatagaaaattatttgtatgaataatgaaaataaaacacacctcgtggca

SEQ ID NO: 408241 - DNA, 503 bp, Homo sapiens
  misc_feature (14)..(14): n is a, c, g, or t
  misc_feature (17)..(17): n is a, c, g, or t
  misc_feature (23)..(23): n is a, c, g, or t
tcagctcggtaccnggnacttcntgtgggggtttcttgctgcagcaacgcgagtgggagcaccaggatctcgggctcggaacgagactgcacggattgttttaagaaaatggcagacaaaccagacatgggggaaatcgccagcttcgataaggccaagctgaagaaaacggagacgcaggagaagaacaccctgccgaccaaagagaccattgagcaggagaagcggagtgaaatttcctaagatcctggaggatttcctacccccgtcctcttcgagaccccagtcgtgatgtggaggaagagccacctgcaagatggacacgagccacaagctgcactgtgaacctgggcactccgcgccgatgccaccggcctgtgggtctctgaagggacccccccccaatcggactgccaaattctccggtttgccacgaggtgtgttttattttcattattcatacaaataattttctataatatcccggggcaaaccggtcgacg

SEQ ID NO: 408242 - DNA, 777 bp, Homo sapiens
  misc_feature (20)..(20): n is a, c, g, or t
gcttctgtttcttgctgcancaacgcgagtgggagcaccaggatctcgggctcggaacgagactgcacattgttttaagaaaatggcagacaaaccagacatgggggaaatcgccagcttcgataaggccaagctgaagaaaacggagacgcaggagaagaacaccctgccgaccaaagagaccattgagcaggagaagcggagtgaaatttcctaagatcctggaggatttcctacccccgtcctcttcgagaccccagtcgtgatgtggaggaagagccacctgcaagatggacacgagccacaagctgcactgtgaacctgggcactccgcgccgatgccaccggcctgtgggtctctgaagggacccccccccaatcggactgccaaattctccgagacaaaccagacatgggggaaatcgccagcttcgataaggccaagctgaagaaaacggagacgcaggagaagaacaccctgccgaccaaagagaccattgagcaggagaagcggagtgaaatttcctaagatcctggaggatttcctacccccgtcctcttcgagaccccagtcgtgatgtggaggaagagccacctgcaagatggacacgagccacaagctgcactgtgaacctgggcactccgcgccgatgccaccggcctgtgggtctctgaagggacccccccccaatcggactgccaaattctccggtttgccccgggatattatagaaaattatttgtatgaataatgaaaataaaacacacctcgtggca

SEQ ID NO: 408243 - DNA, 846 bp, Homo sapiens
  misc_feature (65)..(65): n is a, c, g, or t
  misc_feature (71)..(71): n is a, c, g, or t
  misc_feature (89)..(89): n is a, c, g, or t
gagagagagagagagagagagagagagagagagagagagacagagagagagagagagagagagcngagagngaggagagagaggagggncaacgcgagtgggagcaccaggatctcgggctcggaacgagactgcacattgttttaagaaaatggcagacaaaccagacatgggggaaatcgccagcttcgataaggccaagctgaagaaaacggagacgcaggagaagaacaccctgccgaccaaagagaccattgagcaggagaagcggagtgaaatttcctaagatcctggaggatttcctacccccgtcctcttcgagaccccagtcgtgatgtggaggaagagccacctgcaagatggacacgagccacaagctgcactgtgaacctgggcactccgcgccgatgccaccggcctgtgggtctctgaagggacccccccccaatcggactgccaaattctccgagacaaaccagacatgggggaaatcgccagcttcgataaggccaagctgaagaaaacggagacgcaggagaagaacaccctgccgaccaaagagaccattgagcaggagaagcggagtgaaatttcctaagatcctggaggatttcctacccccgtcctcttcgagaccccagtcgtgatgtggaggaagagccacctgcaagatggacacgagccacaagctgcactgtgaacctgggcactccgcgccgatgccaccggcctgtgggtctctgaagggacccccccccaatcggactgccaaattctccggtttgccccgggatattatagaaaattatttgtatgaataatgaaaataaaacacacctcgtggca

SEQ ID NO: 408244 - DNA, 1000 bp, Homo sapiens
gtaccgctgccacgaagtgggagctggggttcctgtgtgcacgctgccctcacgaagtgggagctggggttcctgtgtgcacgctgccctcacgaagtgggagctggggttcctgtgtgcacgctgccttcaggaagtgggagctggggttcctgtgtgcacgctgccttcacaaagtgggagctggggttcctgtgtacacattgccttcacttcgtgggagcacttcgtgggcagcgctgccaacgcgagtgggagcaccaggatctcgggctcggaacgagactgcacattgttttaagaaaatggcagacaaaccagacatgggggaaatcgccagcttcgataaggccaagctgaagaaaacggagacgcaggagaagaacaccctgccgaccaaagagaccattgagcaggagaagcggagtgaaatttcctaagatcctggaggatttcctacccccgtcctcttcgagaccccagtcgtgatgtggaggaagagccacctgcaagatggacacgagccacaagctgcactgtgaacctgggcactccgcgccgatgccaccggcctgtgggtctctgaagggacccccccccaatcggactgccaaattctccgagacaaaccagacatgggggaaatcgccagcttcgataaggccaagctgaagaaaacggagacgcaggagaagaacaccctgccgaccaaagagaccattgagcaggagaagcggagtgaaatttcctaagatcctggaggatttcctacccccgtcctcttcgagaccccagtcgtgatgtggaggaagagccacctgcaagatggacacgagccacaagctgcactgtgaacctgggcactccgcgccgatgccaccggcctgtgggtctctgaagggacccccccccaatcggactgccaaattctccggtttgccccgggatattatagaaaattatttgtatgaataatgaaaataaaacacacctcgtggca

SEQ ID NO: 408245 - DNA, 419 bp, Homo sapiens
  misc_feature (14)..(14): n is a, c, g, or t
  misc_feature (17)..(17): n is a, c, g, or t
  misc_feature (23)..(23): n is a, c, g, or t
tcagctcggtaccnggnacttcntgtgggggtttcttgctgcagcaacgcgagtgggagcaccaggatctcgggctcggaacgagactgcacggattgttttaagaaaatggcagacaaaccagacatgggggaaatcgccagcttcgataaggccaagctgaagaaaacggagacgcaggagaagaacaccctgccgaccaaagagaccattgagcaggagaagcggagtgaaatttcctaagatcctggaggatttcctacccccgtcctcttcgagaccccagtcgtgatgtggaggaagagccacctgcaagatggacacgagccacaagctgcactgtgaacctgggcactccgcgccgatgccaccggcctgtgggtctctgaagggacacaaaacaaacaatcgacatcaca

SEQ ID NO: 408246 - DNA, 753 bp, Homo sapiens
  misc_feature (14)..(14): n is a, c, g, or t
  misc_feature (17)..(17): n is a, c, g, or t
  misc_feature (23)..(23): n is a, c, g, or t
  misc_feature (551)..(551): n is a, c, g, or t
  misc_feature (553)..(553): n is a, c, g, or t
  misc_feature (557)..(557): n is a, c, g, or t
  misc_feature (559)..(559): n is a, c, g, or t
  misc_feature (564)..(564): n is a, c, g, or t
  misc_feature (576)..(578): n is a, c, g, or t
  misc_feature (612)..(612): n is a, c, g, or t
  misc_feature (615)..(615): n is a, c, g, or t
  misc_feature (619)..(619): n is a, c, g, or t
  misc_feature (625)..(625): n is a, c, g, or t
  misc_feature (631)..(631): n is a, c, g, or t
  misc_feature (633)..(633): n is a, c, g, or t
  misc_feature (640)..(640): n is a, c, g, or t
  misc_feature (646)..(646): n is a, c, g, or t
  misc_feature (649)..(649): n is a, c, g, or t
  misc_feature (651)..(651): n is a, c, g, or t
  misc_feature (654)..(654): n is a, c, g, or t
  misc_feature (659)..(660): n is a, c, g, or t
  misc_feature (663)..(663): n is a, c, g, or t
  misc_feature (672)..(672): n is a, c, g, or t
  misc_feature (675)..(675): n is a, c, g, or t
  misc_feature (686)..(686): n is a, c, g, or t
  misc_feature (691)..(691): n is a, c, g, or t
  misc_feature (696)..(696): n is a, c, g, or t
  misc_feature (700)..(700): n is a, c, g, or t
tcagctcggtaccnggnacttcntgtgggggtttcttgctgcagcaacgcgagtgggagcaccaggatctcgggctcggaacgagactgcacagacaaaccagacatgggggaaatcgccagcttcgataaggccaagctgaagaaaacggagacgcaggagaagaacaccctgccgaccaaagagaccattgagcaggagaagcggagtgaaatttcctaagatcctggaggatttcctacccccgtcctcttcgagaccccagtcgtgatgtggaggaagagccacctgcaagatggacacgagccacaagctgcactgtgaacctgggcactccgcgccgatgccaccggcctgtgggtctctgaagggacccccccccaatcggactgccaaattctccggtttgccccgggatattatagaaaattatttgtatgaataatgaaaataaaacacacctcgtggcaaaaaaaaaaaaaaaaaaaaaaaaaaaaaaaaaaaacaaaaaaaaaaaaaaaaaaagggaaaaaaaaaaaaacaaaaaaaancntgtngnccgcntgggccaagtgnnntttagactgagcaggtttatgcatgcggccgaanttngggntaattngcccantngccctangggggncgntntanaaatnnatngcccgcggnttnaaaacggcggnactgngaaancccnggggtaccaaatttattcgctttggagcacatcccccttttcgcaggtgggga

SEQ ID NO: 408247 - DNA, 345 bp, Homo sapiens
ccacttcgatcgaagtgtgcacacttcgatcgcggagaagaacaccctgccgaccaaagagaccattgagcaggagaagcggagtgaaatttcctaagatcctggaggatttcctacccccgtcctcttcgagaccccagtcgtgatgtggaggaagagccacctgcaagatggacacgagccacaagctgcactgtgaacctgggcactccgcgccgatgccaccggcctgtgggtctctgaagggacccccccccaatcggactgccaaattctccggtttgccccgggatattatagaaaattatttgtatgaataatgaaaataaaacacacctcgtggca

SEQ ID NO: 408248 - DNA, 659 bp, Homo sapiens
  misc_feature (14)..(14): n is a, c, g, or t
  misc_feature (17)..(17): n is a, c, g, or t
  misc_feature (23)..(23): n is a, c, g, or t
  misc_feature (495)..(495): n is a, c, g, or t
  misc_feature (500)..(500): n is a, c, g, or t
  misc_feature (513)..(514): n is a, c, g, or t
  misc_feature (524)..(525): n is a, c, g, or t
  misc_feature (533)..(533): n is a, c, g, or t
tcagctcggtaccnggnacttcntgtgggggtttcttgctgcagcaacgcgagtgggagcaccaggatctcgggctcggaacgagactgcacagacaaaccagacatgggggaaatcgccagcttcgataaggccaagctgaagaaaacggagacgcaggagaagaacaccctgccgaccaaagagaccattgagcaggagaagcggagtgaaatttcctaagatcctggaggatttcctacccccgtcctcttcgagaccccagtcgtgatgtggaggaagagccacctgcaagatggacacgagccacaagctgcactgtgaacctgggcactccgcgccgatgccaccggcctgtgggtctctgaagggacccccccccaatcggactgccaaattctccggtttgccccgggatattatagaaaattatttgtatgaataatgaaaataaaacacacctcgtggcatggcaaaaaaaaaaaaaaaaaaaanaaaanaaaaaaaaaaaanngaaaaaaaannaaaaaaanaaaaaagcggccgaatttcgggctcattgggcacaatccccttatagggagccggtttacatttcattgcccggcggtttaacaacgtgtaactggggaataccctgggtgtaccaaccttttgcc

SEQ ID NO: 408249 - DNA, 633 bp, Homo sapiens
  misc_feature (14)..(14): n is a, c, g, or t
  misc_feature (17)..(17): n is a, c, g, or t
  misc_feature (23)..(23): n is a, c, g, or t
tcagctcggtaccnggnacttcntgtgggggtttcttgctgcagcaacgcgagtgggagcaccaggatctcgggctcggaacgagactgcacagacaaaccagacatgggggaaatcgccagcttcgataaggccaagctgaagaaaacggagacgcaggagaagaacaccctgccgaccaaagagaccattgagcaggagaagcggagtgaaatttcctaagatcctggaggatttcctacccccgtcctcttcgagaccccagtcgtgatgtggaggaagagccacctgcaagatggacacgagccacaagctgcactgtgaacctgggcactccgcgccgatgccaccggcctgtgggtctctgaagggacccccccccaatcggactgccaaattctccggtttgccccgggatattatagaaaattatttgtatgaataatgaaaataaaacacacctcgtggcatggcaaaaaaaaaaaaaaaaaaatttaatttaataattaatttaaataaaacaaatataatattcaaacatctcataataaaatttaaaaataaataaaaaaaaaatgcgggcgcaaattcggggctctattgggcctcgccccttatagggggggggattcc

SEQ ID NO: 408250 - DNA, 749 bp, Homo sapiens
  misc_feature (14)..(14): n is a, c, g, or t
  misc_feature (17)..(17): n is a, c, g, or t
  misc_feature (23)..(23): n is a, c, g, or t
tcagctcggtaccnggnacttcntgtgggggtttcttgctgcagcaacgcgagtgggagcaccaggatctcgggctcggaacgagactgcacagacaaaccagacatgggggaaatcgccagcttcgataaggccaagctgaagaaaacggagacgcaggagaagaacaccctgccgaccaaagagaccattgagcaggagaagcggagtgaaatttcctaagatcctggaggatttcctacccccgtcctcttcgagaccccagtcgtgatgtggaggaagagccacctgcaagatggacacgagccacaagctgcactgtgaacctgggcactccgcgccgatgccaccggcctgtgggtctctgaagggacccccccccaatcggactgccaaattctccggtttgccccgggatattatagaaaattatttgtatgaataatgaaaataaaacacacctcgtggcatgggtgggacgacagtgaaatctagagtaaaaccaagctggcccaaggtgtactgcaggctagaatgcagtttaatcagaagtgccattattttttttgataaaatgatcttggtggccggcctgcgcccttttttttttatgcctaggaaaagtttttcatggggcccaaatttgggctttttgggccattccccttttgggggtggtttaaaaaaattggccggggtttcacaaggggggaggggaaaacccgggggtatccaaataaagccttggg

SEQ ID NO: 408251 - DNA, 506 bp, Homo sapiens
  misc_feature (14)..(14): n is a, c, g, or t
  misc_feature (17)..(17): n is a, c, g, or t
  misc_feature (23)..(23): n is a, c, g, or t
tcagctcggtaccnggnacttcntgtgggggtttcttgctgcagcaacgcgagtgggagcaccaggatctcgggctcggaacgagactgcacgacaaaccagacatgggggaaatcgccagcttcgataaggccaagctgaagaaaacggagacgcaggagaagaacaccctgccgaccaaagagaccattgagcaggagcgcccgcttcccgctctccacagccattgagcaggagaagcggagtgaaatttcctaagatcctggaggatttcctacccccgtcctcttcgagaccccagtcgtgatgtggaggaagagccacctgcaagatggacacgagccacaagctgcactgtgaacctgggcactccgcgccgatgccaccggcctgtgggtctctgaagggacccccccccaatcggactgccaaattctccggtttgccccgggatattatagaaaattatttgtatgaataatgaaaataaaacacacctcgtggca

SEQ ID NO: 408252 - DNA, 725 bp, Homo sapiens
  misc_feature (14)..(14): n is a, c, g, or t
  misc_feature (17)..(17): n is a, c, g, or t
  misc_feature (23)..(23): n is a, c, g, or t
  misc_feature (483)..(483): n is a, c, g, or t
tcagctcggtaccnggnacttcntgtgggggtttcttgctgcagcaacgcgagtgggagcaccaggatctcgggctcggaacgagactgcacattgttttaagaaaatggcagacaaaccagacatgggggaaatcgccagcttcgataaggccaagctgaggagaagaacaccctgccgaccaaagagaccattgagcaggagaagcggagtgaaatttcctaagatcctggaggatttcctacccccgtcctcttcgagaccccagtcgtgatgtggaggaagagccacctgcaagatggacacgagccacaagctgcactgtgaacctgggcactccgcgccgatgccaccggcctgtgggtctctgaagggacccccccccaatcggactgccaaattctccggtttgccccgggatattatagaaaattatttgtatgaataatgaaaataaaacacacctcgtggcatggcaaaaanaaacaactgatctgattccccctctcactatataactcttcagcccctttcaaatacatggaaccactactttaacccaatgcctctttaaatcggtcaagcctaacgatccgactgcccaattgggactccattcgtcccattggcccttaaccatactcttctctctcaataggccgtgctttctaatccttacctctggctacaccctcgggggttcctctagttacatgttcttctgt

SEQ ID NO: 408253 - DNA, 929 bp, Homo sapiens
  misc_feature (766)..(766): n is a, c, g, or t
  misc_feature (771)..(771): n is a, c, g, or t
  misc_feature (784)..(785): n is a, c, g, or t
  misc_feature (795)..(796): n is a, c, g, or t
  misc_feature (804)..(804): n is a, c, g, or t
gtaccgctgccacgaagtgggagctggggttcctgtgtgcacgctgccctcacgaagtgggagctggggttcctgtgtgcacgctgccctcacgaagtgggagctggggttcctgtgtgcacgctgccttcaggaagtgggagctggggttcctgtgtgcacgctgccttcacaaagtgggagctggggttcctgtgtacacattgccttcacttcgtgggagcacttcgtgggcagcgctgccaacgcgagtgggagcaccaggatctcgggctcggaacgagactgcacattgttttaagaaaatggcagacaaaccagacatgggggaaatcgccagcttcgataaggccaagctgaagaaaacggagacgcaggagaagaacaccctgccgaccaaagagaccattgagcaggagttgagcaggagaagcggagtgaaatttcctaagatcctggaggatttcctacccccgtcctcttcgagaccccagtcgtgatgtggaggaagagccacctgcaagatggacacgagccacaagctgcactgtgaacctgggcactccgcgccgatgccaccggcctgtgggtctctgaagggacccccccccaatcggactgccaaattctccggtttgccccgggatattatagaaaattatttgtatgaataatgaaaataaaacacacctcgtggcaaaaaaaaaaaaaaaaaaaaaaaaaaaaaaaacaaaaaaaaaaaaaaaaaaagggaaaaaaaaaaaanaaaanaaaaaaaaaaaanngaaaaaaaannaaaaaaanaaaaaaaaaaaatggcggcccgcttggcccaatgttttttaaatttgggaaagtttttttttggggcccgatttggaggttttttgggcaattccccttaagggggagggtatattaatgccttg

SEQ ID NO: 408254 - DNA, 726 bp, Homo sapiens
gtaccgctgccacgaagtgggagctggggttcctgtgtgcacgctgccctcacgaagtgggagctggggttcctgtgtgcacgctgccctcacgaagtgggagctggggttcctgtgtgcacgctgccttcaggaagtgggagctggggttcctgtgtgcacgctgccttcacaaagtgggagctggggttcctgtgtacacattgccttcacttcgtgggagcacttcgtgggcagcgctgccaacgcgagtgggagcaccaggatctcgggctcggaacgagactgcacattgttttaagaaaatggcagacaaaccagacatgggggaaatcgccagcttcgataaggccaagctgaagaaaacggagacgcaggagaagaacaccctgccgaccaaagagaccattgagcaggagttgagcaggagaagcggagtgaaatttcctaagatcctggaggatttcctacccccgtcctcttcgagaccccagtcgtgatgtggaggaagagccacctgcaagatggacacgagccacaagctgcactgtgaacctgggcactccgcgccgatgccaccggcctgtgggtctctgaagggacccccccccaatcggactgccaaattctccggtttgccccgggatattatagaaaattatttgtatgaataatgaaaataaaacacacctcgtggcagcggccgcgaatttagtagtagtaggc

SEQ ID NO: 408255 - DNA, 934 bp, Homo sapiens
gtaccgctgccacgaagtgggagctggggttcctgtgtgcacgctgccctcacgaagtgggagctggggttcctgtgtgcacgctgccctcacgaagtgggagctggggttcctgtgtgcacgctgccttcaggaagtgggagctggggttcctgtgtgcacgctgccttcacaaagtgggagctggggttcctgtgtacacattgccttcacttcgtgggagcacttcgtgggcagcgctgccaacgcgagtgggagcaccaggatctcgggctcggaacgagactgcacattgttttaagaaaatggcagacaaaccagacatgggggaaatcgccagcttcgataaggccaagctgaagaaaacggagacgcaggagaagaacaccctgccgaccaaagagaccattgagcaggagttgagcaggagaagcggagtgaaatttcctaagatcctggaggatttcctacccccgtcctcttcgagaccccagtcgtgatgtggaggaagagccacctgcaagatggacacgagccacaagctgcactgtgaacctgggcactccgcgccgatgccaccggcctgtgggtctctgaagggacccccccccaatcggactgccaaattctccggtttgccccgggatattatagaaaattatttgtatgaataatgaaaataaaacacacctcgtggcattaaacaagttttaaactgggacaaacgtggtaggaacctaacttgaatggacttgaaaaaaccttgtccgtccgcctttgccccagtcgacttttaaattggaccaacctttatccatgctgcccgaatttggagctcaactggccaattcacccctatagggaggccgaataaacattcactggccggcggttaaccgtcgggacttggacccttgggcttacccactgtcgc

SEQ ID NO: 408256 - DNA, 468 bp, Homo sapiens
  misc_feature (20)..(20): n is a, c, g, or t
gcttctgtttcttgctgcancaacgcgagtgggagcaccaggatctcgggctcggaacgagactgcacattgttttaagaaaatggcagacaaaccagacatgggggaaatcgccagcttcgataaggccaagctgaagaaaacggagacgcaggagaagaacaccctgccgaccaaagagaccattgagcaggagaagcggagtgaaatttcctaagatcctggaggatttcctacccccgtcctcttcgagaccccagtcgtgatgtggaggaagagccacctgcaagatggacacgagccacaagctgcactgtgaacctgggcactccgcgccgatgccaccggcctgtgggtctctgaagggaccccccccccccaatcggactgccaaattctccggtttgccccgggatattatagaaaattatttgtatgaataatgaaaataaaacacacctcgtggca

SEQ ID NO: 408257 - DNA, 715 bp, Homo sapiens
  misc_feature (14)..(14): n is a, c, g, or t
  misc_feature (17)..(17): n is a, c, g, or t
  misc_feature (23)..(23): n is a, c, g, or t
tcagctcggtaccnggnacttcntgtgggggtttcttgctgcagcaacgcgagtgggagcaccaggatctcgggctcggaacgagactgcacgacaaaccagacatgggggaaatcgccagcttcgataaggccaagctgaagaaaacggagacgcaggagaagaacaccctgccgaccaaagagaccattgagcaggagttgagcaggagaagcggagtgaaatttcctaagatcctggaggatttcctacccccgtcctcttcgagaccccagtcgtgatgtggaggaagagccacctgcaagatggacacgagccacaagctgcactgtgaacctgggcactccgcgccgatgccaccggcctgtgggtctctgaagggacccccccccaatcggactgccaaattctccggtttgccccgggatattatagaaaattatttgtatgaataatgaaaataaaacacacctcgtggcatggcaaacaaaaaataaccacccccacttctccatcccctcctcacacaacacggcaccaaaaatctctccactcaaaagacattgtcggccgccttgggcccattcgattttagaactggagccaagtttttgcattgcggcccgaaattcgagggtcatttgggccaaatttgcccctatagcggagccggattacttcacttgtccgggggttttaacaacggcgggttggg

SEQ ID NO: 408258 - DNA, 407 bp, Homo sapiens
  misc_feature (20)..(20): n is a, c, g, or t
  misc_feature (373)..(373): n is a, c, g, or t
  misc_feature (380)..(380): n is a, c, g, or t
  misc_feature (382)..(382): n is a, c, g, or t
gcttctgtttcttgctgcancaacgcgagtgggagcaccaggatctcgggctcggaacgagactgcacattgttttaagaaaatggcagacaaaccagacatgggggaaatcgccagcttcgataaggccaagctgaagaaaacggagacgcaggagaagaacaccctgccgaccaaagagaccattgagcaggagaagcggagtgaaatttcctaagatcctggaggatttcctacccccgtcctcttcgagaccccagtcgtgatgtggaggaagagccacctgcaagatggacacgagccacaagctgcactgtgaacctgggcactccgcgccgatgccaccggcctgtgggtctctgaagggaccccnttaaacncncacagtcggggatcgttggcccaaa

SEQ ID NO: 408259 - DNA, 689 bp, Homo sapiens
  misc_feature (14)..(14): n is a, c, g, or t
  misc_feature (17)..(17): n is a, c, g, or t
  misc_feature (23)..(23): n is a, c, g, or t
  misc_feature (345)..(345): n is a, c, g, or t
tcagctcggtaccnggnacttcntgtgggggtttcttgctgcagcaacgcgagtgggagcaccaggatctcgggctcggaacgagactgcacagacaaaccagacatgggggaaatcgccagcttcgataaggccaagctgaagaaaacggagacgcaggagaagaacaccctgccgaccaaagagaccattgagcaggagaagcggagtgaaatttcctaagatcctggaggatttcctaccccccccccccaatcggactgccaaattctccggtttgccccgggatattatagaaaattatttgtatgaataatgaaaataaaacacacctcgtggcattgncaaaaaaacatacaatcaaaaaaccacaaacaacaaatctttttgtcggggccggcttacgggagccttagaaaaaaagtgttatctcaagacacgaactcgttgggggccgccgggcgccaagggatgtgtacctgtgcgacaacctggtcacaagcgctggcccaaaggagagacgccggtggacaaggcaataacgcggtgggtctccccaccaataaaaaaaccgccgcgggcggaaccccggcgggtctggaacgactccacgaggggatgcccgagggcgcacaacacggggtccaccaacgggggtccaggagcccgataaatacgcccgcggtggg

SEQ ID NO: 408260 - DNA, 319 bp, Homo sapiens
ttaggccaacgagcccatttttttttcccccccttcttaaaacaactacatttattttgctcatgagtctgcaatttcagcagggacaactcatctctgctccacttggcattagctggggcagtttgaagcttcgaagtctccttcacttgtgtggttagtggttgatgctggctgttagctctgacctcagctgaggctgtggctggaatgccgacatgtggcctttccttgtagatgcttgattttctcacaaactgagtgctcccaggttgtctggccggtgcggtggtgacccgctggcgttgcgtatggcgat

SEQ ID NO: 408261 - DNA, 491 bp, Homo sapiens
  misc_feature (14)..(14): n is a, c, g, or t
  misc_feature (17)..(17): n is a, c, g, or t
  misc_feature (23)..(23): n is a, c, g, or t
tcagctcggtaccnggnacttcntgtgggggtttcttgctgcagcaacgcgagtgggagcaccaggatctcgggctcggaacgagactgcacggattgttttaagaaaatggcagacaaaccagacatgggggaaatcgccagcttcgataaggccaagctgaagaaaacggagacgcaggagaagaacaccctgccgaccaaagagaccattgagcaggagaagcggagtgaaatttcctaagatcctggaggatttcctacccccgtcctcttcgagaccccagtcgtgatgtggaggaagagccacctgcaagatggacacgagccacaagctgcactgtgaacctgggcactccgcgccgatgccaccggcctgtgggtctctgaagggacccccccccaatcggactgccaaattctccggtttgccccgggatattatagaaaattatttgtatgaataatgaaaataaaacacacctcgtggca

SEQ ID NO: 408262 - DNA, 755 bp, Homo sapiens
  misc_feature (14)..(14): n is a, c, g, or t
  misc_feature (17)..(17): n is a, c, g, or t
  misc_feature (23)..(23): n is a, c, g, or t
  misc_feature (601)..(602): n is a, c, g, or t
  misc_feature (608)..(608): n is a, c, g, or t
  misc_feature (616)..(616): n is a, c, g, or t
  misc_feature (618)..(618): n is a, c, g, or t
  misc_feature (622)..(622): n is a, c, g, or t
  misc_feature (629)..(629): n is a, c, g, or t
  misc_feature (635)..(635): n is a, c, g, or t
  misc_feature (643)..(646): n is a, c, g, or t
  misc_feature (648)..(648): n is a, c, g, or t
  misc_feature (650)..(650): n is a, c, g, or t
  misc_feature (655)..(655): n is a, c, g, or t
  misc_feature (661)..(662): n is a, c, g, or t
  misc_feature (664)..(664): n is a, c, g, or t
  misc_feature (666)..(666): n is a, c, g, or t
  misc_feature (673)..(673): n is a, c, g, or t
  misc_feature (680)..(680): n is a, c, g, or t
  misc_feature (683)..(683): n is a, c, g, or t
  misc_feature (686)..(686): n is a, c, g, or t
  misc_feature (695)..(695): n is a, c, g, or t
  misc_feature (704)..(704): n is a, c, g, or t
  misc_feature (714)..(714): n is a, c, g, or t
tcagctcggtaccnggnacttcntgtgggggtttcttgctgcagcaacgcgagtgggagcaccaggatctcgggctcggaacgagactgcacggattgttttaagaaaatggcagacaaaccagacatgggggaaatcgccagcttcgataaggccaagctgaagaaaacggagacgcaggagaagaacaccctgccgaccaaagagaccattgagcaggagaagcggagtgaaatttcctaagatcctggaggatttcctacccccgtcctcttcgagaccccagtcgtgatgtggaggaagagccacctgcaagatggacacgagccacaagctgcactgtgaacctgggcactccgcgccgatgccaccggcctgtgggtctctgaagggacccccccccaatcggactgccaaattctccggtttgccccgggatattatagaaaattatttgtatgaataatgaaaataaaacacacctcgtggcaaaaaaaaaaaaaaaaaaaaaaaaaaaaaaaaaaaaaaaaaaaaaaaaaaaaaaaaacaaaaaaaaaaaaaaaaaaagggaaaaaaaaaaaaaaaaaaaaaaaaaaccttnngggccntttggccnantganttttaanttgggnaagctttnnnntngngcccnaatttnngncnaattggncaattcnccntanggggggcgnttaaaaatnaagggccggngtttaaggtcgaacgggccctgtgggtccccattttgcttt

SEQ ID NO: 408263 - DNA, 652 bp, Homo sapiens
  misc_feature (14)..(14): n is a, c, g, or t
  misc_feature (17)..(17): n is a, c, g, or t
  misc_feature (23)..(23): n is a, c, g, or t
tcagctcggtaccnggnacttcntgtgggggtttcttgctgcagcaacgcgagtgggagcaccaggatctcgggctcggaacgagactgcacggattgttttaagaaaatggcagacaaaccagacatgggggaaatcgccagcttcgataaggccaagctgaagaaaacggagacgcaggagaagaacaccctgccgaccaaagagaccattgagcaggagaagcggagtgaaatttcctaagatcctggaggatttcctacccccgtcctcttcgagaccccagtcgtgatgtggaggaagagccacctgcaagatggacacgagccacaagctgcactgtgaacctgggcactccgcgccgatgccaccggcctgtgggtctctgaagggacccccccccaatcggactgccaaattctccggtttgccccgggatattatagaaaattatttgtatgaataatgaaaataaaacacacctcgtggcataaaacacaccttcgtgggaaaatctttctcttctacctattaacctttgtcggcctcttgggccaagtggatttttaactcggccaatcttatccctaggggccgaattttggattaccttggcaaattcccccttataggggagcggtttacttgggcg

SEQ ID NO: 408264 - DNA, 415 bp, Homo sapiens
  misc_feature (14)..(14): n is a, c, g, or t
  misc_feature (17)..(17): n is a, c, g, or t
  misc_feature (23)..(23): n is a, c, g, or t
tcagctcggtaccnggnacttcntgtgggggtttcttgctgcagcaacgcgagtgggagcaccaggatctcgggctcggaacgagactgcacagacaaaccagacatgggggaaatcgccagcttcgataaggccaagctgaagaaaacggagacgcaggagaagaacaccctgccgaccaaagagaccattgagcaggagaagcggagtgaaatttcctaagatcctggaggatttcctacccccgtcctcttcgagaccccagtcgtgatgtggaggaagagccacctgcaagatggacacgagccacaagctgcactgtgaacctgggcacttcccgggcgggccccccccccggggggaaaaattttttggggggacccccccccccccaaaactgccaaattctccggtt

SEQ ID NO: 408265 - DNA, 531 bp, Homo sapiens
attatgaaggagaacttcccctacttccgtagtgcctgtgacgattagggctcagattacctctccgatgtctttgagtttaaggtacaaggatgaggattagaagattgatttttctgagtttctgtccttgtctgggagacatagccacagacgtacctctagcagagccatggaagcagcgccctgttccgggggcagccaatgacccagccccaccaatgggcctccagagaccccaggtaccataaaatgctcttctccgcgatcgaagtgtgcacacttcgatcgcttgagcaggagaagcggagtgaaatttcctaagatcctggaggatttcctacccccgtcctcttcgagaccccagtcgtgatgtggaggaagagccacctgcaagatggacacgagccacaagctgcactgtgaacctgggcactccgcgccgatgccaccggcctgtgggtctctgaagggacccccccccaatcggactgccaaattctccgcgatcgaagtgtgtaatacctcgag

SEQ ID NO: 408266 - DNA, 783 bp, Homo sapiens
  misc_feature (14)..(14): n is a, c, g, or t
  misc_feature (17)..(17): n is a, c, g, or t
  misc_feature (23)..(23): n is a, c, g, or t
  misc_feature (552)..(552): n is a, c, g, or t
  misc_feature (554)..(554): n is a, c, g, or t
  misc_feature (558)..(558): n is a, c, g, or t
  misc_feature (560)..(560): n is a, c, g, or t
  misc_feature (565)..(565): n is a, c, g, or t
  misc_feature (577)..(579): n is a, c, g, or t
  misc_feature (613)..(613): n is a, c, g, or t
  misc_feature (616)..(616): n is a, c, g, or t
  misc_feature (620)..(620): n is a, c, g, or t
  misc_feature (626)..(626): n is a, c, g, or t
  misc_feature (632)..(632): n is a, c, g, or t
  misc_feature (634)..(634): n is a, c, g, or t
  misc_feature (641)..(641): n is a, c, g, or t
  misc_feature (647)..(647): n is a, c, g, or t
  misc_feature (650)..(650): n is a, c, g, or t
  misc_feature (652)..(652): n is a, c, g, or t
  misc_feature (655)..(655): n is a, c, g, or t
  misc_feature (660)..(661): n is a, c, g, or t
  misc_feature (664)..(664): n is a, c, g, or t
  misc_feature (673)..(673): n is a, c, g, or t
  misc_feature (676)..(676): n is a, c, g, or t
  misc_feature (687)..(687): n is a, c, g, or t
  misc_feature (692)..(692): n is a, c, g, or t
  misc_feature (697)..(697): n is a, c, g, or t
  misc_feature (701)..(701): n is a, c, g, or t
tcagctcggtaccnggnacttcntgtgggggtttcttgctgcagcaacgcgagtgggagcaccaggatctcgggctcggaacgagactgcacggattgttttaagaaaatggcagacaaaccagacatgggggaaatcgccagcttcgataaggccaagctgaagaaaacggagacgcaggagaagaacaccctgccgaccaaagagaccattgagcaggagaagcggagtgaaatttcctaagatcctggaggatttcctacccccgtcctcttcgagaccccagtcgtgatgtggaggaagagccacctgcaagatggacacgagccacaagctgcactgtgaacctgggcactccgcgccgatgccaccggcctgtgggtctctgaagggacccccccccaatcggactgccaaattctccggtttgccccgggatattatagaaaattatttgtatgaataatgaaaataaaacacacctcgtggcaaaaaaaaaaaaaaaaaaaaaaaaaatccatagaatgactaaaaaaacgcaacaaaaaaaancntgtngnccgcntgggccaagtgnnntttagactgagcaggtttatgcatgcggccgaanttngggntaattngcccantngccctangggggncgntntanaaatnnatngcccgcggnttnaaaacggcggnactgngaaancccnggggtaacccaactttaaagcctttggaacaaattcccctttttgccaagtgggataccgggcgcccaacacggcgctttac

SEQ ID NO: 408267 - DNA, 781 bp, Homo sapiens
  misc_feature (14)..(14): n is a, c, g, or t
  misc_feature (17)..(17): n is a, c, g, or t
  misc_feature (23)..(23): n is a, c, g, or t
  misc_feature (504)..(504): n is a, c, g, or t
  misc_feature (557)..(557): n is a, c, g, or t
  misc_feature (566)..(566): n is a, c, g, or t
  misc_feature (568)..(568): n is a, c, g, or t
  misc_feature (572)..(574): n is a, c, g, or t
tcagctcggtaccnggnacttcntgtgggggtttcttgctgcagcaacgcgagtgggagcaccaggatctcgggctcggaacgagactgcacggattgttttaagaaaatggcagacaaaccagacatgggggaaatcgccagcttcgataaggccaagctgaagaaaacggagacgcaggagaagaacaccctgccgaccaaagagaccattgagcaggagaagcggagtgaaatttcctaagatcctggaggatttcctacccccgtcctcttcgagaccccagtcgtgatgtggaggaagagccacctgcaagatggacacgagccacaagctgcactgtgaacctgggcactccgcgccgatgccaccggcctgtgggtctctgaagggacccccccccaatcggactgccaaattctccggtttgccccgggatattatagaaaattatttgtatgaataatgaaaataaaacacacctcgtggcaaaataaaaaaaancaaaaaaaaaaaaaaaaattgtgggggggctgggcctagaaaaaaatttttanaaccatcgntngggnnngggggccaagaggataaggggaaacctggggcaaacccggtgcccaaggaaaccggtccagcacacgggtgggtttctcccataaaaaacgccgcgggaccggcttccgaacacaccagaggatccgagcaacagggccaaacgggcaggatcaattacggccgggggtgacccgagaacgaaacaccaaagaaccaacagacaccc

SEQ ID NO: 408268 - DNA, 774 bp, Homo sapiens
  misc_feature (14)..(14): n is a, c, g, or t
  misc_feature (17)..(17): n is a, c, g, or t
  misc_feature (23)..(23): n is a, c, g, or t
tcagctcggtaccnggnacttcntgtgggggtttcttgctgcagcaacgcgagtgggagcaccaggatctcgggctcggaacgagactgcacgtgagtgcggcgccggggcggggggcccacccagggtgtggtcggatccggtgcaccgggcgggcgcgccgcaaccgcgacaggcgcccttctcggaccggacgcaggggccggcgaccacgccctgggaccgagaagaggggtgcgggacgcgcccagatcctcggccttggggctgctcggcacgccttggcgcgagtgccacgtcgagaggcgtcggcggggagcgcggaaggggacgctggcccccaggcccaggtcaagcgccttggtttgcccactaggattgttttaagaaaatggcagacaaaccagacatgggggaaatcgccagcttcgataaggccaagctgaagaaaacggagacgcaggagaagaacaccctgccgaccaaagagaccattgagcaggagaagcggagtgaaatttcctaagatcctggaggatttcctacccccgtcctcttcgagaccccagtcgtgatgtggaggaagagccacctgcaagatggacacgagccacaagctgcactgtgaacctgggcactccgcgccgatgccaccggcctgtgggtctctgaagggacccccccccaatcggactgccaaattctccggtttgccccgggatattatagaaaattatttgtatgaataatgaaaataaaacacacctcgtggca

SEQ ID NO: 408269 - DNA, 661 bp, Homo sapiens
  misc_feature (14)..(14): n is a, c, g, or t
  misc_feature (17)..(17): n is a, c, g, or t
  misc_feature (23)..(23): n is a, c, g, or t
tcagctcggtaccnggnacttcntgtgggggtttcttgctgcagcaacgcgagtgggagcaccaggatctcgggctcggaacgagactgcacggattgttttaagaaaatggcagacaaaccagacatgggggaaatcgccagcttcgataaggccaagctgaagaaaacggagacgcaggagaagaacaccctgccgaccaaagagaccattgagcaggagaagcggagtgaaatttcctaagatcctggaggatttcctacccccgtcctcttcgagaccccagtcgtgatgtggaggaagagccacctgcaagatggacacgagccacaagctgcactgtgaacctgggcactccgcgccgatgccaccggcctgtgggtctctgaagggacccccccccaatcggactgccaaattctccgcgatcgaagtgtgcacacttcgatcgcggagaatgggggataggtgtatgaacatgagggtgttttctcgtgtgaatgagggttttatgttgttaatgtggtgggtgagtgagccccattgtgttgtggtaaatatgtagagggagtatagggctgtgactagtatgttgagtcctgtaagtaggagagtgatatttgatcaggagaacgtgttactacacagagtcttctcttta

SEQ ID NO: 408270 - DNA, 449 bp, Homo sapiens
  misc_feature (14)..(14): n is a, c, g, or t
  misc_feature (17)..(17): n is a, c, g, or t
  misc_feature (23)..(23): n is a, c, g, or t
tcagctcggtaccnggnacttcntgtgggggtttcttgctgcagcaacgcgagtgggagcaccaggatctcgggctcggaacgagactgcacggattgttttaagaaaatggcagacaaaccagacatgggggaaatcgccagcttcgataaggccaagctgaagaaaacggagacgcaggagaagaacaccctgccgaccaaagagaccattgagcaggagaagcggagtgaaatttcctaagatcctggaggatttcctacccccgtcctcttcgagaccccagtcgtgatgtggaggaagagccacctgcaagatggacacgagccacaagctgcactgtgaacctgggcactccgcgccgatgccaccggcctgtgggtctctgaagggacccccccccaatcggactgccaaattctccgcgatcgtaagcggggcgagctcaa

SEQ ID NO: 408271 - DNA, 470 bp, Homo sapiens
  misc_feature (14)..(14): n is a, c, g, or t
  misc_feature (17)..(17): n is a, c, g, or t
  misc_feature (23)..(23): n is a, c, g, or t
tcagctcggtaccnggnacttcntgtgggggtttcttgctgcagcaacgcgagtgggagcaccaggatctcgggctcggaacgagactgcacagacaaaccagacatgggggaaatcgccagcttcgataaggccaagctgaagaaaacggagacgcaggagaagaacaccctgccgaccaaagagaccattgagcaggagaagcggagtgaaatttcctaagatcctggaggatttcctacccccgtcctcttcgagaccccagtcgtgatgtggaggaagagccacctgcaagatggacacgagccacaagctgcactgtgaacctgggcactccgcgccgatgccaccggcctgtgggtctctgaagggacccccccccaatcggactgccaaattctccggtttgccccgggatattatagaaaattatttgtatgaataatgaaaataaaacacacctcgtggca

SEQ ID NO: 408272 - DNA, 1038 bp, Homo sapiens
  misc_feature (14)..(14): n is a, c, g, or t
  misc_feature (17)..(17): n is a, c, g, or t
  misc_feature (23)..(23): n is a, c, g, or t
  misc_feature (884)..(885): n is a, c, g, or t
  misc_feature (891)..(891): n is a, c, g, or t
  misc_feature (899)..(899): n is a, c, g, or t
  misc_feature (901)..(901): n is a, c, g, or t
  misc_feature (905)..(905): n is a, c, g, or t
  misc_feature (912)..(912): n is a, c, g, or t
  misc_feature (918)..(918): n is a, c, g, or t
  misc_feature (926)..(929): n is a, c, g, or t
  misc_feature (931)..(931): n is a, c, g, or t
  misc_feature (933)..(933): n is a, c, g, or t
  misc_feature (938)..(938): n is a, c, g, or t
  misc_feature (944)..(945): n is a, c, g, or t
  misc_feature (947)..(947): n is a, c, g, or t
  misc_feature (949)..(949): n is a, c, g, or t
  misc_feature (956)..(956): n is a, c, g, or t
  misc_feature (963)..(963): n is a, c, g, or t
  misc_feature (966)..(966): n is a, c, g, or t
  misc_feature (969)..(969): n is a, c, g, or t
  misc_feature (978)..(978): n is a, c, g, or t
  misc_feature (987)..(987): n is a, c, g, or t
  misc_feature (997)..(997): n is a, c, g, or t
tcagctcggtaccnggnacttcntgtgggggtttcttgctgcagcaacgcgagtgggagcaccaggatctcgggctcggaacgagactgcacgtgagtgcggcgccggggcggggggcccacccagggtgtggtcggatccggtgcaccgggcgggcgcgccgcaaccgcgacaggcgcccttctcggaccggacgcaggggccggcgaccacgccctgggaccgagaagaggggtgcgggacgcgcccagatcctcggccttggggctgctcggcacgccttggcgcgagtgccacgtcgagaggcgtcggcggggagcgcggaaggggacgctggcccccaggcccaggtcaagcgccttggtttgcccactaggattgttttaagaaaatggcagacaaaccagacatgggggaaatcgccagcttcgataaggccaagctgaagaaaacggagacgcaggagaagaacaccctgccgaccaaagagaccattgagcaggagaagcggagtgaaatttcctaagatcctggaggatttcctacccccgtcctcttcgagaccccagtcgtgatgtggaggaagagccacctgcaagatggacacgagccacaagctgcactgtgaacctgggcactccgcgccgatgccaccggcctgtgggtctctgaagggacccccccccaatcggactgccaaattctccggtttgccccgggatattatagaaaattatttgtatgaataatgaaaataaaacacacctcgtggcaaaaaaaaaaaaaaaaaaaaaaaaaaaaaaaaaaaaaaaaaaaaaaaaaaaaaaaaacaaaaaaaaaaaaaaaaaaagggaaaaaaaaaaaaaaaaaaaaaaaaaaccttnngggccntttggccnantganttttaanttgggnaagctttnnnntngngcccnaatttnngncnaattggncaattcnccntanggggggcgnttaaaaatnaagggccggngtttaaggtcgaacgggccctgtgggtccccattttgcttt

SEQ ID NO: 408273 - DNA, 878 bp, Homo sapiens
  misc_feature (14)..(14): n is a, c, g, or t
  misc_feature (17)..(17): n is a, c, g, or t
  misc_feature (23)..(23): n is a, c, g, or t
tcagctcggtaccnggnacttcntgtgggggtttcttgctgcagcaacgcgagtgggagcaccaggatctcgggctcggaacgagactgcacagacaaaccagacatgggggaaatcgccagcttcgataaggccaagctgaagaaaacggagacgcaggagaagaacaccctgccgaccaaagagaccattgagcaggagaagcggagtgaaatttcctaagatcctggaggatttcctacccccgtcctcttcgagaccccagtcgtgatgtggaggaagagccacctgcaagatggacacgagccacaagctgcactgtgaacctgggcactccgcgccgatgccaccggcctgtgggtctctgaagggacccccccccaatcggactgccaaattctccggtttgccccgggatattatagaaaattatttgtatgaataatgaaaataaaacacacctcgtggcatggcaaaaaaaaaaaaaaaaaaaaaaaaaaaaacaaaaaaaaaaaaaaaaaaagggaaaaaaaaaaagggggggcaaaaaaattccccggggggggccacaagtataagggcacaccccaaggtattgtggtgcaaaagggggggccccaaataaggagcgagccgcgataaaataagacgacaagagaacggagacagagccgacgggtcattataaaacaaagagcgcggcatcgacgtgagggggaacaaaccgcgggccacagcagggagggacaaccactgggcgaaagaggaacaccaccgcaacacgagcgggggggggggggccaacaatttgggggcccacaccaacgccgccagagaggacgatttgaaacgcgccgcgacgagggacagcaactaac

SEQ ID NO: 408274 - DNA, 787 bp, Homo sapiens
  misc_feature (14)..(14): n is a, c, g, or t
  misc_feature (17)..(17): n is a, c, g, or t
  misc_feature (23)..(23): n is a, c, g, or t
tcagctcggtaccnggnacttcntgtgggggtttcttgctgcagcaacgcgagtgggagcaccaggatctcgggctcggaacgagactgcacagacaaaccagacatgggggaaatcgccagcttcgataaggccaagctgaagaaaacggagacgcaggagaagaacaccctgccgaccaaagagaccattgagcaggagaagcggagtgaaatttcctaagatcctggaggatttcctacccccgtcctcttcgagaccccagtcgtgatgtggaggaagagccacctgcaagatggacacgagccacaagctgcactgtgaacctgggcactccgcgccgatgccaccggcctgtgggtctctgaagggacccccccccaatcggactgccaaattctccggtttgccccgggatattatagaaaattatttgtatgaataatgaaaataaaacacacctcgtggcatggcaaaaagacgaaaaaaggggcggccagggccggggggcctccatgatccaccccaacgtgccggccatcatgatcgcgcccatgtgcccccaatcgctgtccttccggcccatcgtgggtccccgcaggggtcagagctgaagatcatgctgtcaccggaagcagggaacacagcatgggtgctccttggatggaccggaagagacaagagatccgccagggagaccagcatcagcatcaataccctcatgctacccattccgctccatctgtgtgcggggaccctgtgagcgactgggtttgaaagcctcgca

SEQ ID NO: 408275 - DNA, 699 bp, Homo sapiens
gtaccgctgccacgaagtgggagctggggttcctgtgtgcacgctgccctcacgaagtgggagctggggttcctgtgtgcacgctgccctcacgaagtgggagctggggttcctgtgtgcacgctgccttcaggaagtgggagctggggttcctgtgtgcacgctgccttcacaaagtgggagctggggttcctgtgtacacattgccttcacttcgtgggagcacttcgtgggcagcgctgccaacgcgagtgggagcaccaggatctcgggctcggaacgagactgcacattgttttaagaaaatggcagacaaaccagacatgggggaaatcgccagcttcgataaggccaagctgaagaaaacggagacgcaggagaagaacaccctgccgaccaaagagaccattgagcaggagttgagcaggagaagcggagtgaaatttcctaagatcctggaggatttcctacccccgtcctcttcgagaccccagtcgtgatgtggaggaagagccacctgcaagatggacacgagccacaagctgcactgtgaacctgggcactccgcgccgatgccaccggcctgtgggtctctgaagggacccccccccaatcggactgccaaattctccggtttgccccgggatattatagaaaattatttgtatgaataatgaaaataaaacacacctcgtggca

SEQ ID NO: 408276 - DNA, 943 bp, Homo sapiens
  misc_feature (923)..(923): n is a, c, g, or t
gtaccgctgccacgaagtgggagctggggttcctgtgtgcacgctgccctcacgaagtgggagctggggttcctgtgtgcacgctgccctcacgaagtgggagctggggttcctgtgtgcacgctgccttcaggaagtgggagctggggttcctgtgtgcacgctgccttcacaaagtgggagctggggttcctgtgtacacattgccttcacttcgtgggagcacttcgtgggcagcgctgccaacgcgagtgggagcaccaggatctcgggctcggaacgagactgcacattgttttaagaaaatggcagacaaaccagacatgggggaaatcgccagcttcgataaggccaagctgaagaaaacggagacgcaggagaagaacaccctgccgaccaaagagaccattgagcaggagttgagcaggagaagcggagtgaaatttcctaagatcctggaggatttcctacccccgtcctcttcgagaccccagtcgtgatgtggaggaagagccacctgcaagatggacacgagccacaagctgcactgtgaacctgggcactccgcgccgatgccaccggcctgtgggtctctgaagggacccccccccaatcggactgccaaattctccggtttgccccgggatattatagaaaattatttgtatgaataatgaaaataaaacacacctcgtggcaaaaaaaaaaaaaaaaaaaaaaaaaacaaaaaaacaatactaaattaccatactcataacatactataaaaaactcataaataaaaaaaaaacttgtggcccgcttgggccaaatggcctttagcctcgagcaagcttatcaatgcggccgaaattcgggttaattgtgccatttggccttattgggagcggatttacaattcgtgcccggtgtttaccaccttncctggacctctggttacccc

SEQ ID NO: 408277 - DNA, 600 bp, Homo sapiens
  misc_feature (14)..(14): n is a, c, g, or t
  misc_feature (17)..(17): n is a, c, g, or t
  misc_feature (23)..(23): n is a, c, g, or t
tcagctcggtaccnggnacttcntgtgggggtttcttgctgcagcaacgcgagtgggagcaccaggatctcgggctcggaacgagactgcacgacaaaccagacatgggggaaatcgccagcttcgataaggccaagctgaagaaaacggagacgcaggagaagaacaccctgccgaccaaagagaccattgagcaggagttgagcaggagaagcggagtgaaatttcctaagatcctggaggatttcctacccccgtcctcttcgagaccccagtcgtgatgtggaggaagagccacctgcaagatggacacgagccacaagctgcactgtgaacctgggcactccgcgccgatgccaccggcctgtgggtctctgaagggacccccccccaatcggactgccaaattctccggtttgccccgggatattatagaaaattatttgtatgaataatgaaaataaaacacacctcgtggcatggaaaaaacaccccccctcctctcctctattctccactctctatttactccaacaggggaaagggaacatccaatctcactacctcataacatggggcccaaatctcgggctttggcct

SEQ ID NO: 408278 - DNA, 497 bp, Homo sapiens
  misc_feature (421)..(421): n is a, c, g, or t
  misc_feature (425)..(425): n is a, c, g, or t
  misc_feature (427)..(427): n is a, c, g, or t
  misc_feature (431)..(431): n is a, c, g, or t
  misc_feature (463)..(463): n is a, c, g, or t
  misc_feature (465)..(465): n is a, c, g, or t
gtaccgctgccacgaagtgggagctggggttcctgtgtgcacgctgccctcacgaagtgggagctggggttcctgtgtgcacgctgccctcacgaagtgggagctggggttcctgtgtgcacgctgccttcaggaagtgggagctggggttcctgtgtgcacgctgccttcacaaagtgggagctggggttcctgtgtacacattgccttcacttcgtgggagcacttcgtgggcagcgctgccaacgcgagtgggagcaccaggatctcgggctcggaacgagactgcacattgttttaagaaaatggcagacaaaccagacatgggggaaatcgccagcttcgataaggccaagctgaagaaaacggagacgcaggagaagaacaccctgccgaccaaagagaccattgagcaggagcnagcngngtgnccatttcctaagcatcctagttccagcctggncnaaaaaagaaaactctgcctcaaaaaaaaaaaa

SEQ ID NO: 408279 - DNA, 3406 bp, Homo sapiens
cgagcctcctgttcattagcagttgagaaaaattcctttctagtttgatcaatccttgttttcctcggcagagcccgggcgcccgcccagcgcggagacgggcgcgcggggtctctccgcggcgggggcgccgggcctcgggggagcgcagaagtagccgcccgggggtcaggccggagcgccgccggggcttctccctccctccctcgccggttgcctttttttccacttctctccctcccccttccgtttctatttgtgaagggaggaggaaggcagaggcgggctggtgtctctggccggggactggaatttcatctgaatgactgcccctgcgcgcacgcagcgccccggagtcggcccgcccgcgccccgcagcccgcgcccggccagccagccgggggacgcctgcaccgtggcccggggaccgccggcctgcccctcccgccccgtccggatctagcagccctcggcgcggccgccctcgcctcctggccccgcagaccccgggctccggcccctgcgagggaggtgcggcgccgacgagccaggcaggagccgccgctgccgccgccgccggaagaagtgtgctgctcccaagctccgtctgccgcggggcgcgccccaatgtcagccgcggggacgagcgcaggccgcgggccgccactgccctagccgcgccgacggggaggcggcctcttatatggaatttggaccccggcgctcccctccaaggctggagtcccggccgcggccctggcgcagtccgccgcctcccgctaggcgctcgggaggaggaggagacgcagcccgctgcgcgcgcggcgtgaggaccgcggctccctcctccggggggcgggcacgcggaaggcgctgctgactgagcgaccgtcggggccggctggggccggagctcggggctcggtgggcctacagcggctccggacggacccccggggctggggagtcggggaggcctgccccggccccctgcccgcggccgccatggcggagaattggaagaactgcttcgaggaggagctcatctgccctatctgcctgcacgttttcgtggagccagtgcagctgccgtgcaaacacaacttctgccggggctgcatcggcgaggcgtgggccaaggacagcggcctcgtacgctgcccagagtgcaaccaggcctacaaccagaagccgggcctggagaagaacctgaagctcaccaacatcgtggagaagttcaatgccctgcacgtggagaagccgccggcggcgctgcactgcgtgttctgccgccgcggccccccgctgcccgcgcagaaggtctgcctgcgctgcgaggcgccctgctgccagtcccacgtgcagacgcacctgcagcagccctccaccgcccgcgggcacctcctggtggaggcggacgacgtgcgggcctggagctgcccgcagcacaacgcctaccgcctctaccactgcgaggccgagcaggtggccgtgtgccagtactgctgctactacagcggcgcgcatcagggacactcggtgtgcgacgtggagatccgaaggaatgaaatccggaagatgctcatgaagcagcaggaccggctggaggagcgagagcaggacattgaggaccagctgtacaaactcgagtcagacaagcgcctggtggaggagaaagtgaaccaactgaaggaggaagttcggctgcagtacgagaagctgcaccagctgctggacgaggacctgcggcagacagtggaggtcctagacaaggcccaggccaagttctgcagcgagaacgcagcgcaggcgctgcacctcggggagcgcatgcaggaggccaagaagctgctgggctccctgcagctgctctttgataagacggaggatgtcagcttcatgaagaacaccaagtctgtgaaaatcctgatggacaggacccagacctgcacgagcagcagcctttcccccactaagatcggccacctgaactccaagctcttcctgaacgaagtggccaagaaggagaagcagctgcggaaaatgctagaaggccccttcagcacgccggtgcccttcctgcagagtgtccccctgtacccttgcggcgtgagcagctctggggcggaaaagcgcaagcactcaacggccttcccagaggccagtttcctagagacgtcgtcgggccctgtgggcggccagtacggggcggcgggcacagccagcggtgagggccagtctgggcagcccctggggccctgcagctccacgcagcacttggtggccctgccgggcggcgcccaaccagtgcactcaagccccgtgttccccccatcgcagtatcccaatggctccgccgcccagcagcccatgctcccccagtatggcggccgcaagattctcgtctgttctgtggacaactgttactgttcttccgtggccaaccatggcggccaccagccctacccccgctccggccactttccctggacagtgccctcgcaggagtactcacacccgctcccgcccacaccctccgtcccccagtcccttcccagcctggcggtcagagactggcttgacgcctcccagcagcccggccaccaggatttctacagggtgtatgggcagccgtccaccaaacactacgtgacgagctaacgccacgcaggcggcggggcgctggggaatcttcctccccagcccccgggctcgggagttatgcatccagagacctgcccttctaccttcctcgcctcccctcttcctcattccattgccccaggtcttttccttttggattttgttttggttttggctttgtttttgatttttttttattatgaatctcctggacgcagaggtgacagtgggagctggcctgggccaggacggcaggtggccctggagatgggaaagtgtctgtgtcgaggcgctgagctctctctctgtttctccttttttcctctactccttccccttcacacccccgtggctggaaggaacctcggcttccctgaaagcttgggggtcccacccttcttaccccacccgggaggaacgcccagggccccgggcttgtttctcctcttgttttccttttgggcagtttgatcactgatcgagtaaggaatgacctttagattgtgcgacttttgtttttgtttttttaaatttttttaaaccaagaatgatttctcctgcttccttctcctcaccatcttcccagacggagttcaaaggccacttctcaagcagcttttggcaccttcagcctcagagtggaatcttttaaagacaggacccctatgtccaggaaaggggaaaaggaactttgccaatgatagtgaccacagcaaaagcaaataataataatattaataataataaagagaaataaaataat

SEQ ID NO: 408280 - DNA, 3714 bp, Homo sapiens
cgagcctcctgttcattagcagttgagaaaaattcctttctagtttgatcaatccttgttttcctcggcagagcccgggcgcccgcccagcgcggagacgggcgcgcggggtctctccgcggcgggggcgccgggcctcgggggagcgcagaagtagccgcccgggggtcaggccggagcgccgccggggcttctccctccctccctcgccggttgcctttttttccacttctctccctcccccttccgtttctatttgtgaagggaggaggaaggcagaggcgggctggtgtctctggccggggactggaatttcatctgaatgactgcccctgcgcgcacgcagcgccccggagtcggcccgcccgcgccccgcagcccgcgcccggccagccagccgggggacgcctgcaccgtggcccggggaccgccggcctgcccctcccgccccgtccggatctagcagccctcggcgcggccgccctcgcctcctggccccgcagaccccgggctccggcccctgcgagggaggtgcggcgccgacgagccaggcaggagccgccgctgccgccgccgccggaagaagtgtgctgctcccaagctccgtctgccgcggggcgcgccccaatgtcagccgcggggacgagcgcaggccgcgggccgccactgccctagccgcgccgacggggaggcggcctcttatatggaatttggaccccggcgctcccctccaaggctggagtcccggccgcggccctggcgcagtccgccgcctcccgctaggcgctcgggaggaggaggagacgcagcccgctgcgcgcgcggcgtgaggaccgcggctccctcctccggggggcgggcacgcggaaggcgctgctgactgagcgaccgtcggggccggctggggccggagctcggggctcggtgggcctacagcggctccggacggacccccggggctggggagtcggggaggcctgccccggccccctgcccgcggccgccatggcggagaattggaagaactgcttcgaggaggagctcatctgccctatctgcctgcacgttttcgtggagccagtgcagctgccgtgcaaacacaacttctgccggggctgcatcggcgaggcgtgggccaaggacagcggcctcgtacgctgcccagagtgcaaccaggcctacaaccagaagccgggcctggagaagaacctgaagctcaccaacatcgtggagaagttcaatgccctgcacgtggagaagccgccggcggcgctgcactgcgtgttctgccgccgcggccccccgctgcccgcgcagaaggtctgcctgcgctgcgaggcgccctgctgccagtcccacgtgcagacgcacctgcagcagccctccaccgcccgcgggcacctcctggtggaggcggacgacgtgcgggcctggagctgcccgcagcacaacgcctaccgcctctaccactgcgaggccgagcaggtggccgtgtgccagtactgctgctactacagcggcgcgcatcagggacactcggtgtgcgacgtggagatccgaaggaatgaaatccggaagatgctcatgaagcagcaggaccggctggaggagcgagagcaggacattgaggaccagctgtacaaactcgagtcagacaagcgcctggtggaggagaaagtgaaccaactgaaggaggaagttcggctgcagtacgagaagctgcaccagctgctggacgaggacctgcggcagacagtggaggtcctagacaaggcccaggccaagttctgcagcgagaacgcagcgcaggcgctgcacctcggggagcgcatgcaggaggccaagaagctgctgggctccctgcagctgctctttgataagacggaggatgtcagcttcatgaagaacaccaagtctgtgaaaatcctgatggacaggacccagacctgcacgagcagcagcctttcccccactaagatcggccacctgaactccaagctcttcctgaacgaagtggccaagaaggagaagcagctgcggaaaatgctagaaggccccttcagcacgccggtgcccttcctgcagagtgtccccctgtacccttgcggcgtgagcagctctggggcggaaaagcgcaagcactcaacggccttcccagaggccagtttcctagagacgtcgtcgggccctgtgggcggccagtacggggcggcgggcacagccagcggtgagggccagtctgggcagcccctggggccctgcagctccacgcagcacttggtggccctgccgggcggcgcccaaccagtgcactcaagccccgtgttccccccatcgcagtatcccaatggctccgccgcccagcagcccatgctcccccagtatggcggccgcaagattctcgtctgttctgtggacaactgttactgttcttccgtggccaaccatggcggccaccagccctacccccgctccggccactttccctggacagtgccctcgcaggagtactcacacccgctcccgcccacaccctccgtcccccagtcccttcccagcctggcggtcagagactggcttgacgcctcccagcagcccggccaccaggatttctacagggtgtatgggcagccgtccaccaaacactacgtgacgagctaacgccacgcaggcggcggggcgctggggaatcttcctccccagcccccgggctcgggagttatgcatccagagacctgcccttctaccttcctcgcctcccctcttcctcattccattgccccaggtcttttccttttggattttgttttggttttggctttgtttttgatttttttttattatgaatctcctggacgcagaggtgacagtgggagctggcctgggccaggacggcaggtggccctggagatgggaaagtgtctgtgtcgaggcgctgagctctctctctgtttctccttttttcctctactccttccccttcacacccccgtggctggaaggaacctcggcttccctgaaagcttgggggtcccacccttcttaccccacccgggaggaacgcccagggccccgggcttgtttctcctcttgttttccttttgggcagtttgatcactgatcgagtaaggaatgacctttagattgtgcgacttttgtttttgtttttttaaatttttttaaaccaagaatgatttctcctgcttccttctcctcaccatcttcccagacggagttcaaaggccacttctcaagcagcttttggcaccttcagcctcagagtggaatcttttaaagacaggacccctatgtccaggaaaggggaaaaggaactttgccaatgatagtgaccacagcaaaagcaaataataataatattaataataataaagagaaataaaataataaaataaaaaacaatagcacagcccttgttgaggtcagcagggaggaggggctgcccggagttgggtccttgcctggattttgacacagcaacttcctgtagtgagcactttgtatgaatcgtggacttcctgttctcaaggcgcaggtatttattctgtatctgtctagagcacacaccaaaatccaaccttctaataaacatgatggcgcagtcccactccctgcctcgcctgttcccctatcccccccaggcctgggatcttcaggcgtcggtgtggggaggggcccctgccctccttgccttga

SEQ ID NO: 408281 - DNA, 2072 bp, Homo sapiens
tcccacccaaatgtccctgcagaagatgctcatgaagcagcaggaccggctggaggagcgagagcaggacattgaggaccagctgtacaaactcgagtcagacaagcgcctggtggaggagaaagtgaaccaactgaaggaggaagttcggctgcagtacgagaagctgcaccagctgctggacgaggacctgcggcagacagtggaggtcctagacaaggcccaggccaagttctgcagcgagaacgcagcgcaggcgctgcacctcggggagcgcatgcaggaggccaagaagctgctgggctccctgcagctgctctttgataagacggaggatgtcagcttcatgaagaacaccaagtctgtgaaaatcctgatggacaggacccagacctgcacgagcagcagcctttcccccactaagatcggccacctgaactccaagctcttcctgaacgaagtggccaagaaggagaagcagctgcggaaaatgctagaaggccccttcagcacgccggtgcccttcctgcagagtgtccccctgtacccttgcggcgtgagcagctctggggcggaaaagcgcaagcactcaacggccttcccagaggccagtttcctagagacgtcgtcgggccctgtgggcggccagtacggggcggcgggcacagccagcggtgagggccagtctgggcagcccctggggccctgcagctccacgcagcacttggtggccctgccgggcggcgcccaaccagtgcactcaagccccgtgttccccccatcgcagtatcccaatggctccgccgcccagcagcccatgctcccccagtatggcggccgcaagattctcgtctgttctgtggacaactgttactgttcttccgtggccaaccatggcggccaccagccctacccccgctccggccactttccctggacagtgccctcgcaggagtactcacacccgctcccgcccacaccctccgtcccccagtcccttcccagcctggcggtcagagactggcttgacgcctcccagcagcccggccaccaggatttctacagggtgtatgggcagccgtccaccaaacactacgtgacgagctaacgccacgcaggcggcggggcgctggggaatcttcctccccagcccccgggctcgggagttatgcatccagagacctgcccttctaccttcctcgcctcccctcttcctcattccattgccccaggtcttttccttttggattttgttttggttttggctttgtttttgatttttttttattatgaatctcctggacgcagaggtgacagtgggagctggcctgggccaggacggcaggtggccctggagatgggaaagtgtctgtgtcgaggcgctgagctctctctctgtttctccttttttcctctactccttccccttcacacccccgtggctggaaggaacctcggcttccctgaaagcttgggggtcccacccttcttaccccacccgggaggaacgcccagggccccgggcttgtttctcctcttgttttccttttgggcagtttgatcactgatcgagtaaggaatgacctttagattgtgcgacttttgtttttgtttttttaaatttttttaaaccaagaatgatttctcctgcttccttctcctcaccatcttcccagacggagttcaaaggccacttctcaagcagcttttggcaccttcagcctcagagtggaatcttttaaagacaggacccctatgtccaggaaaggggaaaaggaactttgccaatgatagtgaccacagcaaaagcaaataataataatattaataataataaagagaaataaaataataaaataaaaaacaatagcacagcccttgttgaggtcagcagggaggaggggctgcccggagttgggtccttgcctggattttgacacagcaacttcctgtagtgagcactttgtatgaatcgtggacttcctgttctcaaggcgcaggtatttattctgtatctgtctagagcacacaccaaaatccaaccttctaataaacatgatggcgcagtccca

SEQ ID NO: 408282 - DNA, 3007 bp, Homo sapiens
cgagcctcctgttcattagcagttgagaaaaattcctttctagtttgatcaatccttgttttcctcggcagagcccgggcgcccgcccagcgcggagacgggcgcgcggggtctctccgcggcgggggcgccgggcctcgggggagcgcagaagtagccgcccgggggtcaggccggagcgccgccggggcttctccctccctccctcgccggttgcctttttttccacttctctccctcccccttccgtttctatttgtgaagggaggaggaaggcagaggcgggctggtgtctctggccggggactggaatttcatctgaatgactgcccctgcgcgcacgcagcgccccggagtcggcccgcccgcgccccgcagcccgcgcccggccagccagccgggggacgcctgcaccgtggcccggggaccgccggcctgcccctcccgccccgtccggatctagcagccctcggcgcggccgccctcgcctcctggccccgcagaccccgggctccggcccctgcgagggaggtgcggcgccgacgagccaggcaggagccgccgctgccgccgccgccggaagaagtgtgctgctcccaagctccgtctgccgcggggcgcgccccaatgtcagccgcggggacgagcgcaggccgcgggccgccactgccctagccgcgccgacggggaggcggcctcttatatggaatttggaccccggcgctcccctccaaggctggagtcccggccgcggccctggcgcagtccgccgcctcccgctaggcgctcgggaggaggaggagacgcagcccgctgcgcgcgcggcgtgaggaccgcggctccctcctccggggggcgggcacgcggaaggcgctgctgactgagcgaccgtcggggccggctggggccggagctcggggctcggtgggcctacagcggctccggacggacccccggggctggggagtcggggaggcctgccccggccccctgcccgcggccgccatggcggagaattggaagaactgcttcgaggaggagctcatctgccctatctgcctgcacgttttcgtggagccagtgcagctgccgtgcaaacacaacttctgccggggctgcatcggcgaggcgtgggccaaggacagcggcctcgtacgctgcccagagtgcaaccaggcctacaaccagaagccgggcctggagaagaacctgaagctcaccaacatcgtggagaagttcaatgccctgcacgtggagaagccgccggcggcgctgcactgcgtgttctgccgccgcggccccccgctgcccgcgcagaaggtctgcctgcgctgcgaggcgccctgctgccagtcccacgtgcagacgcacctgcagcagccctccaccgcccgcgggcacctcctggtggaggcggacgacgtgcgggcctggagctgcccgcagcacaacgcctaccgcctctaccactgcgaggccgagcaggtggccgtgtgccagtactgctgctactacagcggcgcgcatcagggacactcggtgtgcgacgtggagatccgaaggaatgaaatccggaagatgctcatgaagcagcaggaccggctggaggagcgagagcaggacattgaggaccagctgtacaaactcgagtcagacaagcgcctggtggaggagaaagtgaaccaactgaaggaggaagttcggctgcagtacgagaagctgcaccagctgctggacgaggacctgcggcagacagtggaggtcctagacaaggcccaggccaagttctgcagcgagaacgcagcgcaggcgctgcacctcggggagcgcatgcaggaggccaagaagctgctgggctccctgcagctgctctttgataagacggaggatgtcagcttcatgaagaacaccaagtctgtgaaaatcctgatggacaggacccagacctgcacgagcagcagcctttcccccactaagatcggccacctgaactccaagctcttcctgaacgaagtggccaagaaggagaagcagctgcggaaaatgctagaaggccccttcagcacgccggtgcccttcctgcagagtgtccccctgtacccttgcggcgtgagcagctctggggcggaaaagcgcaagcactcaacggccttcccagaggccagtttcctagagacgtcgtcgggccctgtgggcggccagtacggggcggcgggcacagccagcggtgagggccagtctgggcagcccctggggccctgcagctccacgcagcacttggtggccctgccgggcggcgcccaaccagtgcactcaagccccgtgttccccccatcgcagtatcccaatggctccgccgcccagcagcccatgctcccccagtatggcggccgcaagattctcgtctgttctgtggacaactgttactgttcttccgtggccaaccatggcggccaccagccctacccccgctccggccactttccctggacagtgccctcgcaggagtactcacacccgctcccgcccacaccctccgtcccccagtcccttcccagcctggcggtcagagactggcttgacgcctcccagcagcccggccaccaggatttctacagggtgtatgggcagccgtccaccaaacactacgtgacgagctaacgccacgcaggcggcggggcgctggggaatcttcctccccagcccccgggctcgggagttatgcatccagagacctgcccttctaccttcctcgcctcccctcttcctcattccattgccccaggtcttttccttttggattttgttttggttttggctttgtttttgatttttttttattatgaatctcctggacgcagaggtgacagtgggagctggcctgggccaggacggcaggtggccctggagatgggaaagtgtctgtgtcgaggcgctgagctctctctctgtttctccttttttcctctactcctacctatctccccttttatactaataatcttat

SEQ ID NO: 408283 - DNA, 1820 bp, Homo sapiens
tccaggctttgccacttgtagctgtgggacagtgggtaagcaacatgacctccccagcctccatttcttcagcttaaagtggggatataactattctgtacctcctaatggtagaggagcaagcatcacctgagatgtaacattcttgggcctctaggtgtcaatggtccccaggtccaacccagggagaggaggcctgggttgcttggggtgggagctttggcgacttttgccccaactctccacaggccccttcagcacgccggtgcccttcctgcagagtgtccccctgtacccttgcggcgtgagcagctctggggcggaaaagcgcaagcactcaacggccttcccagaggccagtttcctagagacgtcgtcgggccctgtgggcggccagtacggggcggcgggcacagccagcggtgagggccagtctgggcagcccctggggccctgcagctccacgcagcacttggtggccctgccgggcggcgcccaaccagtgcactcaagccccgtgttccccccatcgcagtatcccaatggctccgccgcccagcagcccatgctcccccagtatggcggccgcaagattctcgtctgttctgtggacaactgttactgttcttccgtggccaaccatggcggccaccagccctacccccgctccggccactttccctggacagtgccctcgcaggagtactcacacccgctcccgcccacaccctccgtcccccagtcccttcccagcctggcggtcagagactggcttgacgcctcccagcagcccggccaccaggatttctacagggtgtatgggcagccgtccaccaaacactacgtgacgagctaacgccacgcaggcggcggggcgctggggaatcttcctccccagcccccgggctcgggagttatgcatccagagacctgcccttctaccttcctcgcctcccctcttcctcattccattgccccaggtcttttccttttggattttgttttggttttggctttgtttttgatttttttttattatgaatctcctggacgcagaggtgacagtgggagctggcctgggccaggacggcaggtggccctggagatgggaaagtgtctgtgtcgaggcgctgagctctctctctgtttctccttttttcctctactccttccccttcacacccccgtggctggaaggaacctcggcttccctgaaagcttgggggtcccacccttcttaccccacccgggaggaacgcccagggccccgggcttgtttctcctcttgttttccttttgggcagtttgatcactgatcgagtaaggaatgacctttagattgtgcgacttttgtttttgtttttttaaatttttttaaaccaagaatgatttctcctgcttccttctcctcaccatcttcccagacggagttcaaaggccacttctcaagcagcttttggcaccttcagcctcagagtggaatcttttaaagacaggacccctatgtccaggaaaggggaaaaggaactttgccaatgatagtgaccacagcaaaagcaaataataataatattaataataataaagagaaataaaataataaaataaaaaacaatagcacagcccttgttgaggtcagcagggaggaggggctgcccggagttgggtccttgcctggattttgacacagcaacttcctgtagtgagcactttgtatgaatcgtggacttcctgttctcaaggcgcaggtatttattctgtatctgtctagagcacacaccaaaatccaaccttctaataaacatgatggcgcagtccca

SEQ ID NO: 408284 - DNA, 2275 bp, Homo sapiens
cgagcctcctgttcattagcagttgagaaaaattcctttctagtttgatcaatccttgttttcctcggcagagcccgggcgcccgcccagcgcggagacgggcgcgcggggtctctccgcggcgggggcgccgggcctcgggggagcgcagaagtagccgcccgggggtcaggccggagcgccgccggggcttctccctccctccctcgccggttgcctttttttccacttctctccctcccccttccgtttctatttgtgaagggaggaggaaggcagaggcgggctggtgtctctggccggggactggaatttcatctgaatgactgcccctgcgcgcacgcagcgccccggagtcggcccgcccgcgccccgcagcccgcgcccggccagccagccgggggacgcctgcaccgtggcccggggaccgccggcctgcccctcccgccccgtccggatctagcagccctcggcgcggccgccctcgcctcctggccccgcagaccccgggctccggcccctgcgagggaggtgcggcgccgacgagccaggcaggagccgccgctgccgccgccgccggaagaagtgtgctgctcccaagctccgtctgccgcggggcgcgccccaatgtcagccgcggggacgagcgcaggccgcgggccgccactgccctagccgcgccgacggggaggcggcctcttatatggaatttggaccccggcgctcccctccaaggctggagtcccggccgcggccctggcgcagtccgccgcctcccgctaggcgctcgggaggaggaggagacgcagcccgctgcgcgcgcggcgtgaggaccgcggctccctcctccggggggcgggcacgcggaaggcgctgctgactgagcgaccgtcggggccggctggggccggagctcggggctcggtgggcctacagcggctccggacggacccccggggctggggagtcggggaggcctgccccggccccctgcccgcggccgccatggcggagaattggaagaactgcttcgaggaggagctcatctgccctatctgcctgcacgttttcgtggagccagtgcagctgccgtgcaaacacaacttctgccggggctgcatcggcgaggcgtgggccaaggacagcggcctcgtacgctgcccagagtgcaaccaggcctacaaccagaagccgggcctggagaagaacctgaagctcaccaacatcgtggagaagttcaatgccctgcacgtggagaagccgccggcggcgctgcactgcgtgttctgccgccgcggccccccgctgcccgcgcagaaggtctgcctgcggctggggaatcttcctccccagcccccgggctcgggagttatgcatccagagacctgcccttctaccttcctcgcctcccctcttcctcattccattgccccaggtcttttccttttggattttgttttggttttggctttgtttttgatttttttttattatgaatctcctggacgcagaggtgacagtgggagctggcctgggccaggacggcaggtggccctggagatgggaaagtgtctgtgtcgaggcgctgagctctctctctgtttctccttttttcctctactccttccccttcacacccccgtggctggaaggaacctcggcttccctgaaagcttgggggtcccacccttcttaccccacccgggaggaacgcccagggccccgggcttgtttctcctcttgttttccttttgggcagtttgatcactgatcgagtaaggaatgacctttagattgtgcgacttttgtttttgtttttttaaatttttttaaaccaagaatgatttctcctgcttccttctcctcaccatcttcccagacggagttcaaaggccacttctcaagcagcttttggcaccttcagcctcagagtggaatcttttaaagacaggacccctatgtccaggaaaggggaaaaggaactttgccaatgatagtgaccacagcaaaagcaaataataataatattaataataataaagagaaataaaataataaaataaaaaacaatagcacagcccttgttgaggtcagcagggaggaggggctgcccggagttgggtccttgcctggattttgacacagcaacttcctgtagtgagcactttgtatgaatcgtggacttcctgttctcaaggcgcaggtatttattctgtatctgtctagagcacacaccaaaatccaaccttctaataaacatgatggcgcagtccca

SEQ ID NO: 408285 - DNA, 2028 bp, Homo sapiens
  misc_feature (2018)..(2019): n is a, c, g, or t
cgagcctcctgttcattagcagttgagaaaaattcctttctagtttgatcaatccttgttttcctcggcagagcccgggcgcccgcccagcgcggagacgggcgcgcggggtctctccgcggcgggggcgccgggcctcgggggagcgcagaagtagccgcccgggggtcaggccggagcgccgccggggcttctccctccctccctcgccggttgcctttttttccacttctctccctcccccttccgtttctatttgtgaagggaggaggaaggcagaggcgggctggtgtctctggccggggactggaatttcatctgaatgactgcccctgcgcgcacgcagcgccccggagtcggcccgcccgcgccccgcagcccgcgcccggccagccagccgggggacgcctgcaccgtggcccggggaccgccggcctgcccctcccgccccgtccggatctagcagccctcggcgcggccgccctcgcctcctggccccgcagaccccgggctccggcccctgcgagggaggtgcggcgccgacgagccaggcaggagccgccgctgccgccgccgccggaagaagtgtgctgctcccaagctccgtctgccgcggggcgcgccccaatgtcagccgcggggacgagcgcaggccgcgggccgccactgccctagccgcgccgacggggaggcggcctcttatatggaatttggaccccggcgctcccctccaaggctggagtcccggccgcggccctggcgcagtccgccgcctcccgctaggcgctcgggaggaggaggagacgcagcccgctgcgcgcgcggcgtgaggaccgcggctccctcctccggggggcgggcacgcggaaggcgctgctgactgagcgaccgtcggggccggctggggccggagctcggggctcggtgggcctacagcggctccggacggacccccggggctggggagtcggggaggcctgccccggccccctgcccgcggccgccatggcggagaattggaagaactgcttcgaggaggagctcatctgccctatctgcctgcacgttttcgtggagccagtgcagctgccgtgcaaacacaacttctgccggggctgcatcggcgaggcgtgggccaaggacagcggcctcgtacgctgcccagagtgcaaccaggcctacaaccagaagccgggcctggagaagaacctgaagctcaccaacatcgtggagaagttcaatgccctgcacgtggagaagccgccggcggcgctgcactgcgtgttctgccgccgcggccccccgctgcccgcgcagaaggtctgcctgcgctgcgaggcgccctgctgccagtcccacgtgcagacgcacctgcagcagccctccaccgcccgcgggcacctcctggtggaggcggacgacgtgcgggcctggagctgcccgcagcacaacgcctaccgcctctaccactgcgaggccgagcaggtggccgtgtgccagtactgctgctactacagcggcgcgcatcagggacactcggtgtgcgacgtggagatccgaaggaatgaaatccggaagatgctcatgaagcagcaggaccggctggaggagcgagagcaggacattgaggaccagctgtacaaactcgagtcagacaagcgcctggtggaggagaaagtgaaccaactgaaggaggaagttcggctgcagtacgagaagctgcaccagctgctggacgaggacctgcggcagacagtggaggtcctagacaaggcccaggccaagttctgcagcgagaacgcagcgcaggcgctgcacctcggggagcgcatgcaggaggccaagaagctgctgggctccctgcagctgctctttgataagacggaggatgtcagcttcatgaagaacaccaagtctgtgaaaatcctgatggacaggacccagacctgcacgagcagcagcctttcccccactaagatcggccacctgaactccaagctcttcctgatcctcgctcnntctacctcg

SEQ ID NO: 408286 - DNA, 3625 bp, Homo sapiens
cgagcctcctgttcattagcagttgagaaaaattcctttctagtttgatcaatccttgttttcctcggcagagcccgggcgcccgcccagcgcggagacgggcgcgcggggtctctccgcggcgggggcgccgggcctcgggggagcgcagaagtagccgcccgggggtcaggccggagcgccgccggggcttctccctccctccctcgccggttgcctttttttccacttctctccctcccccttccgtttctatttgtgaagggaggaggaaggcagaggcgggctggtgtctctggccggggactggaatttcatctgaatgactgcccctgcgcgcacgcagcgccccggagtcggcccgcccgcgccccgcagcccgcgcccggccagccagccgggggacgcctgcaccgtggcccggggaccgccggcctgcccctcccgccccgtccggatctagcagccctcggcgcggccgccctcgcctcctggccccgcagaccccgggctccggcccctgcgagggaggtgcggcgccgacgagccaggcaggagccgccgctgccgccgccgccggaagaagtgtgctgctcccaagctccgtctgccgcggggcgcgccccaatgtcagccgcggggacgagcgcaggccgcgggccgccactgccctagccgcgccgacggggaggcggcctcttatatggaatttggaccccggcgctcccctccaaggctggagtcccggccgcggccctggcgcagtccgccgcctcccgctaggcgctcgggaggaggaggagacgcagcccgctgcgcgcgcggcgtgaggaccgcggctccctcctccggggggcgggcacgcggaaggcgctgctgactgagcgaccgtcggggccggctggggccggagctcggggctcggtgggcctacagcggctccggacggacccccggggctggggagtcggggaggcctgccccggccccctgcccgcggccgccatggcggagaattggaagaactgcttcgaggaggagctcatctgccctatctgcctgcacgttttcgtggagccagtgcagctgccgtgcaaacacaacttctgccggggctgcatcggcgaggcgtgggccaaggacagcggcctcgtacgctgcccagagtgcaaccaggcctacaaccagaagccgggcctggagaagaacctgaagctcaccaacatcgtggagaagttcaatgccctgcacgtggagaagccgccggcggcgctgcactgcgtgttctgccgccgcggccccccgctgcccgcgcagaaggtctgcctgcgctgcgaggcgccctgctgccagtcccacgtgcagacgcacctgcagcagccctccaccgcccgcgggcacctcctggtggaggcggacgacgtgcgggcctggagctgcccgcagcacaacgcctaccgcctctaccactgcgaggccgagcaggtggccgtgtgccagtactgctgctactacagcggcgcgcatcagggacactcggtgtgcgacgtggagatccgaaggaatgaaatccggaagatgctcatgaagcagcaggaccggctggaggagcgagagcaggacattgaggaccagctgtacaaactcgagtcagacaagcgcctggtggaggagaaagtgaaccaactgaaggaggaagttcggctgcagtacgagaagctgcaccagctgctggacgaggacctgcggcagacagtggaggtcctagacaaggcccaggccaagttctgcagcgagaacgcagcgcaggcgctgcacctcggggagcgcatgcaggaggccaagaagctgctgggctccctgcagctgctctttgataagacggaggatgtcagcttcatgaagaacaccaagtctgtgaaaatcctgatggacaggacccagacctgcacgagcagcagcctttcccccactaagatcggccacctgaactccaagctcttcctgaacgaagtggccaagaaggagaagcagctgcggaaaatgctagaaggccccttcagcacgccggtgcccttcctgcagagtgtccccctgtacccttgcggcgtgagcagctctggggcggaaaagcgcaagcactcaacggccttcccagaggccagtttcctagagacgtcgtcgggccctgtgggcggccagtacggggcggcgggcacagccagcggtgagggccagtctgggcagcccctggggccctgcagctccacgcagcacttggtggccctgccgggcggcgcccaaccagtgcactcaagccccgtgttccccccatcgcagtatcccaatggctccgccgcccagcagcccatgctcccccagtatggcggccgcaagattctcgtctgttctgtggacaactgttactgttcttccgtggccaaccatggcggccaccagccctacccccgctccggccactttccctggacagtgccctcgcaggagtactcacacccgctcccgcccacaccctccgtcccccagtcccttcccagcctggcggtcagagactggcttgacgcctcccagcagcccggccaccaggatttctacagggtgtatgggcagccgtccaccaaacactacgtgacgagctaacgccacgcaggcggcggggcgctggggaatcttcctccccagcccccgggctcgggagttatgcatccagagacctgcccttctaccttcctcgcctcccctcttcctcattccattgccccaggtcttttccttttggattttgttttggttttggctttgtttttgatttttttttattatgaatctcctggacgcagaggtgacagtgggagctggcctgggccaggacggcaggtggccctggagatgggaaagtgtctgtgtcgaggcgctgagctctctctctgtttctccttttttcctctactccttccccttcacacccccgtggctggaaggaacctcggcttccctgaaagcttgggggtcccacccttcttaccccacccgggaggaacgcccagggccccgggcttgtttctcctcttgttttccttttgggcagtttgatcactgatcgagtaaggaatgacctttagattgtgcgacttttgtttttgtttttttaaatttttttaaaccaagaatgatttctcctgcttccttctcctcaccatcttcccagacggagttcaaaggccacttctcaagcagcttttggcaccttcagcctcagagtggaatcttttaaagacaggacccctatgtccaggaaaggggaaaaggaactttgccaatgatagtgaccacagcaaaagcaaataataataatattaataataataaagagaaataaaataataaaataaaaaacaatagcacagcccttgttgaggtcagcagggaggaggggctgcccggagttgggtccttgcctggattttgacacagcaacttcctgtagtgagcactttgtatgaatcgtggacttcctgttctcaaggcgcaggtatttattctgtatctgtctagagcacacaccaaaatccaaccttctaataaacatgatggcgcagtccca

SEQ ID NO: 408287 - DNA, 3650 bp, Homo sapiens
cgagcctcctgttcattagcagttgagaaaaattcctttctagtttgatcaatccttgttttcctcggcagagcccgggcgcccgcccagcgcggagacgggcgcgcggggtctctccgcggcgggggcgccgggcctcgggggagcgcagaagtagccgcccgggggtcaggccggagcgccgccggggcttctccctccctccctcgccggttgcctttttttccacttctctccctcccccttccgtttctatttgtgaagggaggaggaaggcagaggcgggctggtgtctctggccggggactggaatttcatctgaatgactgcccctgcgcgcacgcagcgccccggagtcggcccgcccgcgccccgcagcccgcgcccggccagccagccgggggacgcctgcaccgtggcccggggaccgccggcctgcccctcccgccccgtccggatctagcagccctcggcgcggccgccctcgcctcctggccccgcagaccccgggctccggcccctgcgagggaggtgcggcgccgacgagccaggcaggagccgccgctgccgccgccgccggaagaagtgtgctgctcccaagctccgtctgccgcggggcgcgccccaatgtcagccgcggggacgagcgcaggccgcgggccgccactgccctagccgcgccgacggggaggcggcctcttatatggaatttggaccccggcgctcccctccaaggctggagtcccggccgcggccctggcgcagtccgccgcctcccgctaggcgctcgggaggaggaggagacgcagcccgctgcgcgcgcggcgtgaggaccgcggctccctcctccggggggcgggcacgcggaaggcgctgctgactgagcgaccgtcggggccggctggggccggagctcggggctcggtgggcctacagcggctccggacggacccccggggctggggagtcggggaggcctgccccggccccctgcccgcggccgccatggcggagaattggaagaactgcttcgaggaggagctcatctgccctatctgcctgcacgttttcgtggagccagtgcagctgccgtgcaaacacaacttctgccggggctgcatcggcgaggcgtgggccaaggacagcggcctcgtacgctgcccagagtgcaaccaggcctacaaccagaagccgggcctggagaagaacctgaagctcaccaacatcgtggagaagttcaatgccctgcacgtggagaagccgccggcggcgctgcactgcgtgttctgccgccgcggccccccgctgcccgcgcagaaggtctgcctgcgctgcgaggcgccctgctgccagtcccacgtgcagacgcacctgcagcagccctccaccgcccgcgggcacctcctggtggaggcggacgacgtgcgggcctggagctgcccgcagcacaacgcctaccgcctctaccactgcgaggccgagcaggtggccgtgtgccagtactgctgctactacagcggcgcgcatcagggacactcggtgtgcgacgtggagatccgaaggaatgaaatccggaagatgctcatgaagcagcaggaccggctggaggagcgagagcaggacattgaggaccagctgtacaaactcgagtcagacaagcgcctggtggaggagaaagtgaaccaactgaaggaggaagttcggctgcagtacgagaagctgcaccagctgctggacgaggacctgcggcagacagtggaggtcctagacaaggcccaggccaagttctgcagcgagaacgcagcgcaggcgctgcacctcggggagcgcatgcaggaggccaagaagctgctgggctccctgcagctgctctttgataagacggaggatgtcagcttcatgaagaacaccaagtctgtgaaaatcctgatggacagcagatgccccgtccactgcccccaggacccagacctgcacgagcagcagcctttcccccactaagatcggccacctgaactccaagctcttcctgaacgaagtggccaagaaggagaagcagctgcggaaaatgctagaaggccccttcagcacgccggtgcccttcctgcagagtgtccccctgtacccttgcggcgtgagcagctctggggcggaaaagcgcaagcactcaacggccttcccagaggccagtttcctagagacgtcgtcgggccctgtgggcggccagtacggggcggcgggcacagccagcggtgagggccagtctgggcagcccctggggccctgcagctccacgcagcacttggtggccctgccgggcggcgcccaaccagtgcactcaagccccgtgttccccccatcgcagtatcccaatggctccgccgcccagcagcccatgctcccccagtatggcggccgcaagattctcgtctgttctgtggacaactgttactgttcttccgtggccaaccatggcggccaccagccctacccccgctccggccactttccctggacagtgccctcgcaggagtactcacacccgctcccgcccacaccctccgtcccccagtcccttcccagcctggcggtcagagactggcttgacgcctcccagcagcccggccaccaggatttctacagggtgtatgggcagccgtccaccaaacactacgtgacgagctaacgccacgcaggcggcggggcgctggggaatcttcctccccagcccccgggctcgggagttatgcatccagagacctgcccttctaccttcctcgcctcccctcttcctcattccattgccccaggtcttttccttttggattttgttttggttttggctttgtttttgatttttttttattatgaatctcctggacgcagaggtgacagtgggagctggcctgggccaggacggcaggtggccctggagatgggaaagtgtctgtgtcgaggcgctgagctctctctctgtttctccttttttcctctactccttccccttcacacccccgtggctggaaggaacctcggcttccctgaaagcttgggggtcccacccttcttaccccacccgggaggaacgcccagggccccgggcttgtttctcctcttgttttccttttgggcagtttgatcactgatcgagtaaggaatgacctttagattgtgcgacttttgtttttgtttttttaaatttttttaaaccaagaatgatttctcctgcttccttctcctcaccatcttcccagacggagttcaaaggccacttctcaagcagcttttggcaccttcagcctcagagtggaatcttttaaagacaggacccctatgtccaggaaaggggaaaaggaactttgccaatgatagtgaccacagcaaaagcaaataataataatattaataataataaagagaaataaaataataaaataaaaaacaatagcacagcccttgttgaggtcagcagggaggaggggctgcccggagttgggtccttgcctggattttgacacagcaacttcctgtagtgagcactttgtatgaatcgtggacttcctgttctcaaggcgcaggtatttattctgtatctgtctagagcacacaccaaaatccaaccttctaataaacatgatggcgcagtccca

SEQ ID NO: 408288 - DNA, 2125 bp, Homo sapiens
cctgcgagttgaagttgagtgtgccttcctgacagttggcagcactactgtgctgctgtgtgagtgcccgctcagaagatgctcatgaagcagcaggaccggctggaggagcgagagcaggacattgaggaccagctgtacaaactcgagtcagacaagcgcctggtggaggagaaagtgaaccaactgaaggaggaagttcggctgcagtacgagaagctgcaccagctgctggacgaggacctgcggcagacagtggaggtcctagacaaggcccaggccaagttctgcagcgagaacgcagcgcaggcgctgcacctcggggagcgcatgcaggaggccaagaagctgctgggctccctgcagctgctctttgataagacggaggatgtcagcttcatgaagaacaccaagtctgtgaaaatcctgatggacaggacccagacctgcacgagcagcagcctttcccccactaagatcggccacctgaactccaagctcttcctgaacgaagtggccaagaaggagaagcagctgcggaaaatgctagaaggccccttcagcacgccggtgcccttcctgcagagtgtccccctgtacccttgcggcgtgagcagctctggggcggaaaagcgcaagcactcaacggccttcccagaggccagtttcctagagacgtcgtcgggccctgtgggcggccagtacggggcggcgggcacagccagcggtgagggccagtctgggcagcccctggggccctgcagctccacgcagcacttggtggccctgccgggcggcgcccaaccagtgcactcaagccccgtgttccccccatcgcagtatcccaatggctccgccgcccagcagcccatgctcccccagtatggcggccgcaagattctcgtctgttctgtggacaactgttactgttcttccgtggccaaccatggcggccaccagccctacccccgctccggccactttccctggacagtgccctcgcaggagtactcacacccgctcccgcccacaccctccgtcccccagtcccttcccagcctggcggtcagagactggcttgacgcctcccagcagcccggccaccaggatttctacagggtgtatgggcagccgtccaccaaacactacgtgacgagctaacgccacgcaggcggcggggcgctggggaatcttcctccccagcccccgggctcgggagttatgcatccagagacctgcccttctaccttcctcgcctcccctcttcctcattccattgccccaggtcttttccttttggattttgttttggttttggctttgtttttgatttttttttattatgaatctcctggacgcagaggtgacagtgggagctggcctgggccaggacggcaggtggccctggagatgggaaagtgtctgtgtcgaggcgctgagctctctctctgtttctccttttttcctctactccttccccttcacacccccgtggctggaaggaacctcggcttccctgaaagcttgggggtcccacccttcttaccccacccgggaggaacgcccagggccccgggcttgtttctcctcttgttttccttttgggcagtttgatcactgatcgagtaaggaatgacctttagattgtgcgacttttgtttttgtttttttaaatttttttaaaccaagaatgatttctcctgcttccttctcctcaccatcttcccagacggagttcaaaggccacttctcaagcagcttttggcaccttcagcctcagagtggaatcttttaaagacaggacccctatgtccaggaaaggggaaaaggaactttgccaatgatagtgaccacagcaaaagcaaataataataatattaataataataaagagaaataaaataataaaataaaaaacaatagcacagcccttgttgaggtcagcagggaggaggggctgcccggagttgggtccttgcctggattttgacacagcaacttcctgtagtgagcactttgtatgaatcgtggacttcctgttctcaaggcgcaggtatttattctgtatctgtctagagcacacaccaaaatccaaccttctaataaacatgatggcgcagtccca

SEQ ID NO: 408289 - DNA, 1723 bp, Homo sapiens
  misc_feature (290)..(290): n is a, c, g, or t
  misc_feature (325)..(325): n is a, c, g, or t
gtgcaggcagtgggcgtggggtaaggcttcctgatgccccctgtccctgcccagaacctgatggccctcattagtccttggctcttatcttggaagcacaggcgctgacagccgtcccagcccttctgtctgcgggcctgaaccaaacggtgccatggggaactgtctgcacagggtgagtatggggccaggccccagagtcccttatccctatgcccctcatttcccctgctgtttgcccctcagtctttatatctcttccttttcctcctcatcttttctcccttccngcttttttcctcttccttcaaagtctttttccttntctccttcctatgctagcctcctagctccctcttgtgtccctccctttgcctttgagtcagttccatcctggtctcttggtgcctttccttctgaccttgcactgctcctccagccccagctgccctggcttccccaggactgttcctgctccggctcttcaggctccctgctttgtccttttccactgtccgcactgcatctgactcctgcagagaccttgttctcccacccgaccttcctctctgtcctcccctcccacctgcccctcaattcccaggagactcttccggtgtaactctgatggcctcctctgggtatgtcctccaggcggagctctccccctcaactgagaactcaagtcagctggacttcgaagatgtatggaattcttcctatggtgtgaatgattccttcccagatggagactatgatgccaacctggaagcagctgccccctgccactcctgtaacctgctggatgactctgcactgcccttcttcatcctcaccagtgtcctgggtatcctagctagcagcactgtcctcttcatgcttttcagacctctcttccgctggcagctctgccctggctggcctgtcctggcacagctggctgtgggcagtgccctcttcagcattgtggtgcccgtcttggccccagggctaggtagcactcgcagctctgccctgtgtagcctgggctactgtgtctggtatggctcagcctttgcccaggctttgctgctagggtgccatgcctccctgggccacagactgggtgcaggccaggtcccaggcctcaccctggggctcactgtgggaatttggggagtggctgccctactgacactgcctgtcaccctggccagtggtgcttctggtggactctgcaccctgatatacagcacggagctgaaggctttgcaggccacacacactgtagcctgtcttgccatctttgtcttgttgccattgggtttgtttggagccaaggggctgaagaaggcattgggtatggggccaggcccctggatgaatatcctgtgggcctggtttattttctggtggcctcatggggtggttctaggactggatttcctggtgaggtccaagctgttgctgttgtcaacatgtctggcccagcaggctctggacctgctgctgaacctggcagaagccctggcaattttgcactgtgtggctacgcccctgctcctcgccctattctgccaccaggccacccgcaccctcttgccctctctgcccctccctgaaggatggtcttctcatctggacacccttggaagcaaatcctagttctcttcccacctgtcaacctgaattaaaggcagtgtagactttaagtcgagcggttttttatttagtagtagtaggc

SEQ ID NO: 408290 - DNA, 1224 bp, Homo sapiens
gtgcaggcagtgggcgtggggtaaggcttcctgatgccccctgtccctgcccagaacctgatggccctcattagtccttggctcttatcttggaagcacaggcgctgacagccgtcccagcccttctgtctgcgggcctgaaccaaacggtgccatggggaactgtctgcacagggcggagctctccccctcaactgagaactcaagtcagctggacttcgaagatgtatggaattcttcctatggtgtgaatgattccttcccagatggagactatgatgccaacctggaagcagctgccccctgccactcctgtaacctgctggatgactctgcactgcccttcttcatcctcaccagtgtcctgggtatcctagctagcagcactgtcctcttcatgcttttcagacctctcttccgctggcagctctgccctggctggcctgtcctggcacagctggctgtgggcagtgccctcttcagcattgtggtgcccgtcttggccccagggctaggtagcactcgcagctctgccctgtgtagcctgggctactgtgtctggtatggctcagcctttgcccaggctttgctgctagggtgccatgcctccctgggccacagactgggtgcaggccaggtcccaggcctcaccctggggctcactgtgggaatttggggagtggctgccctactgacactgcctgtcaccctggccagtggtgcttctggtggactctgcaccctgatatacagcacggagctgaaggctttgcaggccacacacactgtagcctgtcttgccatctttgtcttgttgccattgggtttgtttggagccaaggggctgaagaaggcattgggtatggggccaggcccctggatgaatatcctgtgggcctggtttattttctggtggcctcatggggtggttctaggactggatttcctggtgaggtccaagctgttgctgttgtcaacatgtctggcccagcaggctctggacctgctgctgaacctggcagaagccctggcaattttgcactgtgtggctacgcccctgctcctcgccctattctgccaccaggccacccgcaccctcttgccctctctgcccctccctgaaggatggtcttctcatctggacacccttggaagcaaatcctagttctcttcccacctgtcaacctgaattaaagtctacactgcctttgtgaaaaaaaaagt

SEQ ID NO: 408291 - DNA, 486 bp, Homo sapiens
ttcccgggtcgattaatactgcttatactactactaatttcgcggccgcgtagacgttgccattgggtttgtttggagccaaggggctgaagaaggcattgggtatggggccaggcccctggatgaatatcctgtgggcctggtttattttctggtggcctcatggggtggttctaggactggatttcctggtgaggtccaagctgttgctgttgtcaacatgtctggcccagcaggctctggacctgctgctgaacctggcagaagccctggcaattttgcactgtgtggctacgcccctgctcctcgccctattctgccaccaggccacccgcaccctcttgccctctctgcccctccctgaaggatggtcttctcatctggacacccttggaagcaaatcctagttctcttcccacctgtcaacctgaattaaaggcagtgtagactttaagtcgagcggttttttatttagtagtagtaggc

SEQ ID NO: 408292 - DNA, 1703 bp, Homo sapiens
  misc_feature (290)..(290): n is a, c, g, or t
  misc_feature (325)..(325): n is a, c, g, or t
gtgcaggcagtgggcgtggggtaaggcttcctgatgccccctgtccctgcccagaacctgatggccctcattagtccttggctcttatcttggaagcacaggcgctgacagccgtcccagcccttctgtctgcgggcctgaaccaaacggtgccatggggaactgtctgcacagggtgagtatggggccaggccccagagtcccttatccctatgcccctcatttcccctgctgtttgcccctcagtctttatatctcttccttttcctcctcatcttttctcccttccngcttttttcctcttccttcaaagtctttttccttntctccttcctatgctagcctcctagctccctcttgtgtccctccctttgcctttgagtcagttccatcctggtctcttggtgcctttccttctgaccttgcactgctcctccagccccagctgccctggcttccccaggactgttcctgctccggctcttcaggctccctgctttgtccttttccactgtccgcactgcatctgactcctgcagagaccttgttctcccacccgaccttcctctctgtcctcccctcccacctgcccctcaattcccaggagactcttccggtgtaactctgatggcctcctctgggtatgtcctccaggcggagctctccccctcaactgagaactcaagtcagctggacttcgaagatgtatggaattcttcctatggtgtgaatgattccttcccagatggagactatgatgccaacctggaagcagctgccccctgccactcctgtaacctgctggatgactctgcactgcccttcttcatcctcaccagtgtcctgggtatcctagctagcagcactgtcctcttcatgcttttcagacctctcttccgctggcagctctgccctggctggcctgtcctggcacagctggctgtgggcagtgccctcttcagcattgtggtgcccgtcttggccccagggctaggtagcactcgcagctctgccctgtgtagcctgggctactgtgtctggtatggctcagcctttgcccaggctttgctgctagggtgccatgcctccctgggccacagactgggtgcaggccaggtcccaggcctcaccctggggctcactgtgggaatttggggagtggctgccctactgacactgcctgtcaccctggccagtggtgcttctggtggactctgcaccctgatatacagcacggagctgaaggctttgcaggccacacacactgtagcctgtcttgccatctttgtcttgttgccattgggtttgtttggagccaaggggctgaagaaggcattgggtatggggccaggcccctggatgaatatcctgtgggcctggtttattttctggtggcctcatggggtggttctaggactggatttcctggtgaggtccaagctgttgctgttgtcaacatgtctggcccagcaggctctggacctgctgctgaacctggcagaagccctggcaattttgcactgtgtggctacgcccctgctcctcgccctattctgccaccaggccacccgcaccctcttgccctctctgcccctccctgaaggatggtcttctcatctggacacccttggaagcaaatcctagttctcttcccacctgtcaacctgaattaaagtctacactgcctttgtgaaaaaaaaagt

SEQ ID NO: 408293 - DNA, 688 bp, Homo sapiens
tgcctgtttttctttaaaaaaaaaaaattgggagtaattttaaagacaaagtttatgtgaagatacatttttaaggtgctattttgtgtatagcccattttcatgttttcttcctttttgtgagaatatagcctctcctaattcatagcaagaatttgatatgatgttccatagttttaagaaagtcattatatttctgtttctgcttattaaacgtgtgtgtagcaaaatgatgatgattacaccaaagtgttataaattcattgcataaggtgttttctgatttattatttctcatggtggccctgtgcccctctctactgatttgttattatgttaacttcaagcattagttcttggtcatgggaagttgaagatgattgtgggtaggaaagagtgaactggccgggcgctgtggctcacgcctgtaatcctagctctttgagaggctgaagcgggcagattgcctgaggtcaggagtgtgagaccagcctgggcaacatggtaaaaccctctttactaaagtacaaaaaattagccaggtgtggtggcccactcctgcagtcctaactgcataggaggctaaggcaccagaatcttttgaacctgggaggcggaggttgcattgagccacgattgtgccatttgcattctagcctgggcaacagggcaagactctgtctcaaaa

SEQ ID NO: 408294 - DNA, 782 bp, Homo sapiens
gtaacagccttatggcttccatgctataatcaaagggatgtatttgattcagttaagatagaatctgtgtttctatttcttttatttcatcttattagaaaagtaatgctctgtatagaaactagaagaaaattaaaatcatctagtccccacctaccagacaaccagctttgatgtacatcatttgatgtatgtttttgtttttttaacataaaaggattatatccttttccgccagctgttttcactcaatacattgtgaaaatattttcacatatgttgcatgggtttctataacatttgaaatgactgccaaatatttcactgtatgatcatcatttaatattattatcaattttgtatatttaagttagaacttttccattaccataaacatcattatgaatgagctttcttgaactgtattttaatatacttccttaggataaatgcttaaagtaataattattgaattgctttccaaaaacattgcactccatcccaattgttttggaataccctttaccatatatccttgatcatactgcctgtttttctttaaaaaaaaaaaattgggagtaattttaaagacaaagtttatgtgaagatacatttttaaggtgctattttgtgtatagcccattttcatgttttcttcctttttgtgagaatatagcctctcctaattcatagcaagaatttgatatgatgttccatagttttaagaaagtcattatatttctgtttctgcttattaaacgtgtgtgtagcaaaatgatgat

SEQ ID NO: 408295 - DNA, 857 bp, Homo sapiens
  misc_feature (34)..(34): n is a, c, g, or t
  misc_feature (47)..(47): n is a, c, g, or t
  misc_feature (49)..(49): n is a, c, g, or t
  misc_feature (56)..(56): n is a, c, g, or t
  misc_feature (60)..(60): n is a, c, g, or t
cgccgggacgggtgctcggggggggggggggggncgcgacgccccancnccccctnctcngttaagggaggaatttgtatttagaatatgtaaagaactgttacaataataattaaaaggcatataattcaatttttaaaaatcaacaagagatctgaattaacagttctccaaagaagatacacaaaaggccaataagcacatgaaaaggttctcaacatcactagccatcagggaaatgcaaatgagatctacaatgagatatcacttaacactcactggaatagatatataatcaaagtgataatatcaagtgttggtgaggatgcagagaaattggaaccctcatgcactgttggtggatacccacgtgatataaaaacaaatgtctacacaaaaacttgtgcacagatgttctttgcagcattatttataatagcccaaaattgaaacagccctaatttctatcaactaacaagtgaataaacaaaacgtggcatatccatacaaggaatattattcagcaataaaaaaagagatgaagtactgatatgcaccacaacatggaaaaaccttgcatttatatgaaatgtccagaacaggcgaatatatatagagagaaggcagattagtggttgcttaggctgaagggttggggaggacaaaggggtgactgctaattagtatggggtttcttttttggggtgatgtaaacgttgtaaagttgattgtggtaatggtggcacaactctgaatatactaaaaaccactgaattgtatactttgaatgtttgaactgtgtggtatgtagattttatctcaagttgttataaaaaattaaattacaaatgcaattt

SEQ ID NO: 408296 - DNA, 502 bp, Homo sapiens
acctcctacttcccggccttccatcccagtttcttctaggaattcggagcctcccctgcagcgactcggaagattcgaggcggcgggggacaagtcggcgccccagagcggacgaggtgaggagaggagaggtccccgcggagagctgagcagacgcgcgggtgggctcagcctgtgagatgcggtggagatagcgggccgggctcgggctgtcgctgggaggggcccgcgagcctggccttcgggtcccggcgccgcgaggcgaccccggccgggccgagagagggagaaggcggcgagcattcgggcctccctgcgaggaatggagggagagcggaaacgcagagagtttcactgcgaggaagggagggagagcggtcagcgcagctccagcatttctaagtagaaaggcgagggattgcaattcggatttcttttctttcttttttggcggacagtggtggtgctgtggctggggaataaagaactgatgaagctgagg

SEQ ID NO: 408297 - DNA, 5825 bp, Homo sapiens
cctcagatttctcaggagaccagaactgatctgccagccttgctgccttttgttgctctgctctttacattgtctttacagtcaccaggtgtcaagatgctgcaagtacataggactggactgggcaggctgggggtcagcctctccaagggtcttcaccacaaagctgtgttggccgtccggagggaggatgtgaacgcctgggagagaagggccccgctagctcccaagcacatcaaaggcatcaccaatctgggatacaaggtcttgatacagccttcgaatcggcgggccattcatgataaggactatgtcaaagctggtggcattcttcaggaggatatttctgaagcttgtctaattttaggagttaaaagacctccagaggaaaaattaatgtccaggaagacttatgcatttttctcccacacaataaaagctcaggaggccaatatgggcttgttggatgagattctaaaacaggaaattcgccttattgattatgagaaaatggtggatcatagaggagtacgggtagtggcatttggacagtgggctggtgtggcaggaatgatcaacattttacatggaatgggtttaaggctccttgctttgggacatcacacaccttttatgcacattggcatggctcataactacaggaatagcagtcaggctgtgcaagctgtccgtgatgctggctatgaaatatctttgggtttgatgcctaagtcaataggacccttaacatttgtgttcacaggaactggtaatgtttctaagggagcccaagcaatctttaatgagctaccttgtgaatatgtggagccccatgaattaaaagaagtttcccaaactggagacctcagaaaagtgtatgggacggtgttaagtcgtcatcatcatcttgtcaggaaaacagatgctgtgtatgatcctgcagagtatgacaaacatccggagcgctacataagtcgttttaatactgatattgcaccctatacaacttgcttaattaatggaatctactgggaacaaaacactcctcgcctcctaacccgccaagatgctcagagtctcctggctccgggcaagttctcacctgctggtgtggaaggctgccctgcattaccacacaaactcgtggcaatatgtgacatttcagctgacacaggagggtctatagagtttatgactgagtgtacaacaatagagcatcccttttgcatgtatgatgcagaccagcatattattcatgacagtgttgaaggctcggggatcctgatgtgttccattgacaatttgccggcacagctcccaattgaagctacagaatgctttggagacatgctttacccttatgttgaagaaatgatattatcagacgcgacacagcctcttgaaagtcagaatttttctcctgtggtgagagatgcagtgattacatccaacggtacattacctgataaatataaatatatccagacactccgggagagcagggaacgtgctcagtcactttcaatgggcaccaggagaaaggttttggttcttggatctggctacatatctgagcctgtattagaatatttatcaagagatggcaatatagaaataacagtaggatctgacatgaagaatcaaattgaacagttaggcaagaaatataatattaatcctgttagcatggacatttgtaaacaagaagagaagctgggcttcttggtggcaaaacaggatcttgtcatcagcttgttgccttatgtattgcaccctcttgtggccaaggcctgcatcacaaacaaagttaacatggtcactgcaagctacatcacaccagcactaaaagaattggaaaagagtgtggaagatgctggcatcacaatcattggtgaattgggattggaccctggtctggatcacatgttagcaatggaaacaatagataaagccaaggaagtgggagccacgattgaatcatatatttcctactgtggtgggcttccagcccctgaacattcaaacaatccattgagatataaatttagctggagtccagtgggagttttgatgaatgtaatgcagtctgccacctatctgctcgatggaaaggttgtgaatgttgcaggaggcatctcctttcttgatgccgttacgtccatggatttttttccaggattaaatttggaaggctatcctaacagagacagtacgaaatatgctgagatttatggcatttcttctgctcacactttgttgcgggggacactgagatataagggatatatgaaagctttgaatggatttgtaaaattaggtcttataaacagagaagcgcttcctgcctttagacctgaggccaaccctctcacctggaaacaactcctctgtgacctagttgggatttcaccctcctctgagcatgatgtgttgaaggaagctgttcttaagaaactaggaggagacaatacccagttggaggctgctgaatggttgggcttacttggggatgaacaagttcctcaggcagagtccattctggatgccctctccaagcatttggtcatgaagctttcctatggtcctgaagaaaaagatatgattgtgatgagagacagctttggaatcagacatccttctggacatttagaacataaaacgattgatcttgtggcttatggggacatcaatggcttttcagccatggctaaaaccgtggggttacccaccgccatggcagccaaaatgttgcttgatggtgaaattggagccaaaggcctaatggggcccttttcaaaggagatctatggaccaatattggagcgaattaaagcagaaggcattatatatactacacagagtacaattaaaccataattgggaattatattttgtttttttcttcccaggcaatacacctctgaacatgtgtgtgataaatgggtttgctaatgtgctgttttaaagtataaagcataatatgttttggttaacacaatgtactttttgaactataaatctttattttaatatggaaatgtttggaacaggagatgcaagccactaacagagaactttaataattctaccctgtattttataaatacgtatgtgaaagtgatgatcatgctatttgttaatttattgtgccactttttttcttttgttttttttttgttgttgttgttttttgagatggagtctcgctctgtcacccaggctggagtgcagtggcgcgatctcggctcactgcaagctccgcctcctgggttcacgccattctcctgcctcagcctcccaagtagctgggactacaggcacccgccaccacgcccggctaaattttttgtatttttcagtagagacggggtttcaccatgttagccaggatgtccacttttttcttaaatgaacatattgtcttataaccagcaaatgaagttttacttttttaatcagaaaaaatttcgtcataaagctatatttttatatttttaaaattgatacagttagataccttcagattacctaagttaagtttttgccaaaatgctattttatgccctttttgtaaagttatgatttattttgtaaatatagttccttatagttttctcttgagtgtttggacatgagaatagataagattaaattacaatttacaagatcacttcattaggcacaggaaaagtatttaacaaaattcaacaccctttcacaataaaaaataaaaaataaaaaaccctcaacaaactaggaatagaaggaaacttcctcaacctgataaagggcatctatgaagaacccatggttagcatcatacttaatggtgaaggactggattatttccccctgagatcagaaacaagacaaggatgtctgctttggccatttctattcaacttgtactggacagtcaagaaagggcaattaggcaagaaaataaaataaaagtcatctaggttggaaaggaagaagtataactaaatagagatgggagacgatatggtggttttgtgcatagtaatccaagggaaaactatagaaaatccaaaggcatgatttattaataaataaattcagcaaagttacaggatacaggattaaatatgcagaaattggttatctttcaatatagtatcaatgaataaatcaaaaatgatgttaagaaaacaatttaattttcaacaatggtcaagcttggtggcttgtgcctgtaatcccaacactttgggagtctgaggcagaaagactgctagaggccaggagaccagcctgggaaacagtgagatcccatctctacaaaaacaaacaaacaaaaaacaacaagcaaacaaaaaacagctggatgtgatgacactcatctgtcgtctcagctactcagaggctgaggtgtaaggatggcttgagccccaaagttcgaagctgcaatgagctataactgggtcactgcaatccagcctggatgacagagttagaccttgactcaaaaaaaacaaaaaagaaaagaaaaaaattgacagcatcagaaagagtaaaataccaatataattgagggtccagaaatattgatcacatttatcatcaactgacttttgaaaatagtgctaagacaattcaatgggggcaaaatagtctttttcattaaatgatgcttggaaacatggatatccacatgcaaaataatgaaattggactcctacctcatattgcatataaaaattaactcaaagttgacctaagatctaaatgtaagagctaatattgtaagtatcttcaaagaaaacatggcgtaaatctttctgactttgaattaggcaatgatttcttaaataaatgacactaaaaacacaagcaacaaaagaagaaaataggtaaattaaaattaaaaccatttgtgtttccaaggacaatatcaagaaagcaaaaatacaacccacagaatgagataattttttttaaaatcatgtattagttaagggaggaatttgtatttagaatatgtaaagaactgttacaataataattaaaaggcatataattcaatttttaaaaatcaacaagagatctgaattaacagttctccaaagaagatacacaaaaggccaataagcacatgaaaaggttctcaacatcactagccatcagggaaatgcaaatgagatctacaatgagatatcacttaacactcactggaatagatatataatcaaagtgataatatcaagtgttggtgaggatgcagagaaattggaaccctcatgcactgttggtggatacccacgtgatataaaaacaaatgtctacacaaaaacttgtgcacagatgttctttgcagcattatttataatagcccaaaattgaaacagccctaatttctatcaactaacaagtgaataaacaaaacgtggcatatccatacaaggaatattattcagcaataaaaaaagagatgaagtactgatatgcaccacaacatggaaaaaccttgaaaacatatcaagtgaagaatgccagacatgaaaggccacatattatatgatttcatttatatgaaatgtccagaacaggcgaatatatatagagagaaggcagattagtggttgcttaggctgaagggttggggaggacaaaggggtgactgctaattagtatggggtttcttttttggggtgatgtaaacgttgtaaagttgattgtggtaatggtggcacaactctgaatatactaaaaaccactgaattgtatactttgaatgtttgaactgtgtggtatgtagattttatctcaagttgttataaaaaattaaattacaaatgcaattt

SEQ ID NO: 408298 - DNA, 5860 bp, Homo sapiens
acctcctacttcccggccttccatcccagtttcttctaggaattcggagcctcccctgcagcgactcggaagattcgaggcggcgggggacaagtcggcgccccagagcggacgagtcaccaggtgtcaagatgctgcaagtacataggactggactgggcaggctgggggtcagcctctccaagggtcttcaccacaaagctgtgttggccgtccggagggaggatgtgaacgcctgggagagaagggccccgctagctcccaagcacatcaaaggcatcaccaatctgggatacaaggtcttgatacagccttcgaatcggcgggccattcatgataaggactatgtcaaagctggtggcattcttcaggaggatatttctgaagcttgtctaattttaggagttaaaagacctccagaggaaaaattaatgtccaggaagacttatgcatttttctcccacacaataaaagctcaggaggccaatatgggcttgttggatgagattctaaaacaggaaattcgccttattgattatgagaaaatggtggatcatagaggagtacgggtagtggcatttggacagtgggctggtgtggcaggaatgatcaacattttacatggaatgggtttaaggctccttgctttgggacatcacacaccttttatgcacattggcatggctcataactacaggaatagcagtcaggctgtgcaagctgtccgtgatgctggctatgaaatatctttgggtttgatgcctaagtcaataggacccttaacatttgtgttcacaggaactggtaatgtttctaagggagcccaagcaatctttaatgagctaccttgtgaatatgtggagccccatgaattaaaagaagtttcccaaactggagacctcagaaaagtgtatgggacggtgttaagtcgtcatcatcatcttgtcaggaaaacagatgctgtgtatgatcctgcagagtatgacaaacatccggagcgctacataagtcgttttaatactgatattgcaccctatacaacttgcttaattaatggaatctactgggaacaaaacactcctcgcctcctaacccgccaagatgctcagagtctcctggctccgggcaagttctcacctgctggtgtggaaggctgccctgcattaccacacaaactcgtggcaatatgtgacatttcagctgacacaggagggtctatagagtttatgactgagtgtacaacaatagagcatcccttttgcatgtatgatgcagaccagcatattattcatgacagtgttgaaggctcggggatcctgatgtgttccattgacaatttgccggcacagctcccaattgaagctacagaatgctttggagacatgctttacccttatgttgaagaaatgatattatcagacgcgacacagcctcttgaaagtcagaatttttctcctgtggtgagagatgcagtgattacatccaacggtacattacctgataaatataaatatatccagacactccgggagagcagggaacgtgctcagtcactttcaatgggcaccaggagaaaggttttggttcttggatctggctacatatctgagcctgtattagaatatttatcaagagatggcaatatagaaataacagtaggatctgacatgaagaatcaaattgaacagttaggcaagaaatataatattaatcctgttagcatggacatttgtaaacaagaagagaagctgggcttcttggtggcaaaacaggatcttgtcatcagcttgttgccttatgtattgcaccctcttgtggccaaggcctgcatcacaaacaaagttaacatggtcactgcaagctacatcacaccagcactaaaagaattggaaaagagtgtggaagatgctggcatcacaatcattggtgaattgggattggaccctggtctggatcacatgttagcaatggaaacaatagataaagccaaggaagtgggagccacgattgaatcatatatttcctactgtggtgggcttccagcccctgaacattcaaacaatccattgagatataaatttagctggagtccagtgggagttttgatgaatgtaatgcagtctgccacctatctgctcgatggaaaggttgtgaatgttgcaggaggcatctcctttcttgatgccgttacgtccatggatttttttccaggattaaatttggaaggctatcctaacagagacagtacgaaatatgctgagatttatggcatttcttctgctcacactttgttgcgggggacactgagatataagggatatatgaaagctttgaatggatttgtaaaattaggtcttataaacagagaagcgcttcctgcctttagacctgaggccaaccctctcacctggaaacaactcctctgtgacctagttgggatttcaccctcctctgagcatgatgtgttgaaggaagctgttcttaagaaactaggaggagacaatacccagttggaggctgctgaatggttgggcttacttggggatgaacaagttcctcaggcagagtccattctggatgccctctccaagcatttggtcatgaagctttcctatggtcctgaagaaaaagatatgattgtgatgagagacagctttggaatcagacatccttctggacatttagaacataaaacgattgatcttgtggcttatggggacatcaatggcttttcagccatggctaaaaccgtggggttacccaccgccatggcagccaaaatgttgcttgatggtgaaattggagccaaaggcctaatggggcccttttcaaaggagatctatggaccaatattggagcgaattaaagcagaaggcattatatatactacacagagtacaattaaaccataattgggaattatattttgtttttttcttcccaggcaatacacctctgaacatgtgtgtgataaatgggtttgctaatgtgctgttttaaagtataaagcataatatgttttggttaacacaatgtactttttgaactataaatctttattttaatatggaaatgtttggaacaggagatgcaagccactaacagagaactttaataattctaccctgtattttataaatacgtatgtgaaagtgatgatcatgctatttgttaatttattgtgccactttttttcttttgttttttttttgttgttgttgttttttgagatggagtctcgctctgtcacccaggctggagtgcagtggcgcgatctcggctcactgcaagctccgcctcctgggttcacgccattctcctgcctcagcctcccaagtagctgggactacaggcacccgccaccacgcccggctaaattttttgtatttttcagtagagacggggtttcaccatgttagccaggatgtccacttttttcttaaatgaacatattgtcttataaccagcaaatgaagttttacttttttaatcagaaaaaatttcgtcataaagctatatttttatatttttaaaattgatacagttagataccttcagattacctaagttaagtttttgccaaaatgctattttatgccctttttgtaaagttatgatttattttgtaaatatagttccttatagttttctcttgagtgtttggacatgagaatagataagattaaattacaatttacaagatcacttcattaggcacaggaaaagtatttaacaaaattcaacaccctttcacaataaaaaataaaaaataaaaaaccctcaacaaactaggaatagaaggaaacttcctcaacctgataaagggcatctatgaagaacccatggttagcatcatacttaatggtgaaggactggattatttccccctgagatcagaaacaagacaaggatgtctgctttggccatttctattcaacttgtactggacagtcaagaaagggcaattaggcaagaaaataaaataaaagtcatctaggttggaaaggaagaagtataactaaatagagatgggagacgatatggtggttttgtgcatagtaatccaagggaaaactatagaaaatccaaaggcatgatttattaataaataaattcagcaaagttacaggatacaggattaaatatgcagaaattggttatctttcaatatagtatcaatgaataaatcaaaaatgatgttaagaaaacaatttaattttcaacaatggtcaagcttggtggcttgtgcctgtaatcccaacactttgggagtctgaggcagaaagactgctagaggccaggagaccagcctgggaaacagtgagatcccatctctacaaaaacaaacaaacaaaaaacaacaagcaaacaaaaaacagctggatgtgatgacactcatctgtcgtctcagctactcagaggctgaggtgtaaggatggcttgagccccaaagttcgaagctgcaatgagctataactgggtcactgcaatccagcctggatgacagagttagaccttgactcaaaaaaaacaaaaaagaaaagaaaaaaattgacagcatcagaaagagtaaaataccaatataattgagggtccagaaatattgatcacatttatcatcaactgacttttgaaaatagtgctaagacaattcaatgggggcaaaatagtctttttcattaaatgatgcttggaaacatggatatccacatgcaaaataatgaaattggactcctacctcatattgcatataaaaattaactcaaagttgacctaagatctaaatgtaagagctaatattgtaagtatcttcaaagaaaacatggcgtaaatctttctgactttgaattaggcaatgatttcttaaataaatgacactaaaaacacaagcaacaaaagaagaaaataggtaaattaaaattaaaaccatttgtgtttccaaggacaatatcaagaaagcaaaaatacaacccacagaatgagataattttttttaaaatcatgtattagttaagggaggaatttgtatttagaatatgtaaagaactgttacaataataattaaaaggcatataattcaatttttaaaaatcaacaagagatctgaattaacagttctccaaagaagatacacaaaaggccaataagcacatgaaaaggttctcaacatcactagccatcagggaaatgcaaatgagatctacaatgagatatcacttaacactcactggaatagatatataatcaaagtgataatatcaagtgttggtgaggatgcagagaaattggaaccctcatgcactgttggtggatacccacgtgatataaaaacaaatgtctacacaaaaacttgtgcacagatgttctttgcagcattatttataatagcccaaaattgaaacagccctaatttctatcaactaacaagtgaataaacaaaacgtggcatatccatacaaggaatattattcagcaataaaaaaagagatgaagtactgatatgcaccacaacatggaaaaaccttgaaaacatatcaagtgaagaatgccagacatgaaaggccacatattatatgatttcatttatatgaaatgtccagaacaggcgaatatatatagagagaaggcagattagtggttgcttaggctgaagggttggggaggacaaaggggtgactgctaattagtatggggtttcttttttggggtgatgtaaacgttgtaaagttgattgtggtaatggtggcacaactctgaatatactaaaaaccactgaattgtatactttgaatgtttgaactgtgtggtatgtagattttatctcaagttgttataaaaaattaaattacaaatgcaattt

SEQ ID NO: 408299 - DNA, 6786 bp, Homo sapiens
acctcctacttcccggccttccatcccagtttcttctaggaattcggagcctcccctgcagcgactcggaagattcgaggcggcgggggacaagtcggcgccccagagcggacgagtcaccaggtgtcaagatgctgcaagtacataggactggactgggcaggctgggggtcagcctctccaagggtcttcaccacaaagctgtgttggccgtccggagggaggatgtgaacgcctgggagagaagggccccgctagctcccaagcacatcaaaggcatcaccaatctgggatacaaggtcttgatacagccttcgaatcggcgggccattcatgataaggactatgtcaaagctggtggcattcttcaggaggatatttctgaagcttgtctaattttaggagttaaaagacctccagaggaaaaattaatgtccaggaagacttatgcatttttctcccacacaataaaagctcaggaggccaatatgggcttgttggatgagattctaaaacaggaaattcgccttattgattatgagaaaatggtggatcatagaggagtacgggtagtggcatttggacagtgggctggtgtggcaggaatgatcaacattttacatggaatgggtttaaggctccttgctttgggacatcacacaccttttatgcacattggcatggctcataactacaggaatagcagtcaggctgtgcaagctgtccgtgatgctggctatgaaatatctttgggtttgatgcctaagtcaataggacccttaacatttgtgttcacaggaactggtaatgtttctaagggagcccaagcaatctttaatgagctaccttgtgaatatgtggagccccatgaattaaaagaagtttcccaaactggagacctcagaaaagtgtatgggacggtgttaagtcgtcatcatcatcttgtcaggaaaacagatgctgtgtatgatcctgcagagtatgacaaacatccggagcgctacataagtcgttttaatactgatattgcaccctatacaacttgcttaattaatggaatctactgggaacaaaacactcctcgcctcctaacccgccaagatgctcagagtctcctggctccgggcaagttctcacctgctggtgtggaaggctgccctgcattaccacacaatcttgttggagacttcagaatttcatcctctcatctaagtattgatgttattttcagactcgtggcaatatgtgacatttcagctgacacaggagggtctatagagtttatgactgagtgtacaacaatagagcatcccttttgcatgtatgatgcagaccagcatattattcatgacagtgttgaaggctcggggatcctgatgtgttccattgacaatttgccggcacagctcccaattgaagctacagaatgctttggagacatgctttacccttatgttgaagaaatgattctcgccctgttgcccaggctggagtgcagtgatgcaattgcggctcactgcaacctccacctcccaggttcaagcgattcttcctgcctcagcctcccgagtagccaggaccacagatattatcagacgcgacacagcctcttgaaagtcagaatttttctcctgtggtgagagatgcagtgattacatccaacggtacattacctgataaatataaatatatccagacactccgggagagcagggaacgtgctcagtcactttcaatgggcaccaggagaaaggttttggttcttggatctggctacatatctgagcctgtattagaatatttatcaagagatggcaatatagaaataacagtaggatctgacatgaagaatcaaattgaacagttaggcaagaaatataatattaatcctgttagcatggacatttgtaaacaagaagagaagctgggcttcttggtggcaaaacaggatcttgtcatcagcttgttgccttatgtattgcaccctcttgtggccaaggcctgcatcacaaacaaagttaacatggtcactgcaagctacatcacaccagcactaaaagaattggaaaagagtgtggaagatgctggcatcacaatcattggtgaattgggattggaccctggtctggatcacatgttagcaatggaaacaatagataaagccaaggaagtgggagccacgattgaatcatatatttcctactgtggtgggcttccagcccctgaacattcaaacaatccattgagatataaatttagctggagtccagtgggagttttgatgaatgtaatgcagtctgccacctatctgctcgatggaaaggttgtgaatgttgcaggaggcatctcctttcttgatgccgttacgtccatggatttttttccaggattaaatttggaaggctatcctaacagagacagtacgaaatatgctgagatttatggcatttcttctgctcacactttgttgcgggggacactgagatataagggattggaatgctgaataatggattggaatgttgaataatgttgaataccttcctatggtatcctccctaactccttccccttgaaccacccagccccatctatggatatatgaaagctttgaatggatttgtaaaattaggtcttataaacagagaagcgcttcctgcctttagacctgaggccaaccctctcacctggaaacaactcctctgtgacctagttgggatttcaccctcctctgagcatgatgtgttgaaggaagctgttcttaagaaactaggaggagacaatacccagttggaggctgctgaatggtaggcacccaccactcaacttagagcaaaatatactggatcaatgattgctaatttctactcaaaaaaagttaaatattttacatttgtctttgattaattcgttgctctaatgtgggtagagagattaccatgtgccatgttcatgtgggcataaagagtagataaagagaggagctcaatggcaattagaatttgagaaatgcttatctcgaaacactttaccactcagttcccaagcatagtggggtatttttgctttcctgtaggagatttggagtagtcatagaatattacatgaaaacattctttcatatgaccgctgtggcatcctgctggtatacctaatgttggagaactaacctataaattaatctcataaagatctttgtaagaacatgggattacaatccatcatctctgccctgctccagggagcagtgcctgggtgagtctggagaagattctgaaggttaaaacattgctattgttattgttattttacattttaggagaatcctacaacttgagttaccaccttgtaattctgccctttcaagattaaattcaaggagctcccttttgcttcccaaatgagaacatgtataggacttgaactaatgcagccatctcctgtgcttttcaggttgggcttacttggggatgaacaagttcctcaggcagagtccattctggatgccctctccaagcatttggtcatgaagctttcctatggtcctgaagaaaaagatatgattgtgatgagagacagctttggaatcagacatccttctggacatttagaacataaaacgattgatcttgtggcttatggggacatcaatggcttttcagccatggctaaaaccgtggggttacccaccgccatggcagccaaaatgttgcttgatggtgaaattggagccaaaggcctaatggggcccttttcaaaggagatctatggaccaatattggagcgaattaaagcagaaggcattatatatactacacagagtacaattaaaccataattgggaattatattttgtttttttcttcccaggcaatacacctctgaacatgtgtgtgataaatgggtttgctaatgtgctgttttaaagtataaagcataatatgttttggttaacacaatgtactttttgaactataaatctttattttaatatggaaatgtttggaacaggagatgcaagccactaacagagaactttaataattctaccctgtattttataaatacgtatgtgaaagtgatgatcatgctatttgttaatttattgtgccactttttttcttttgttttttttttgttgttgttgttttttgagatggagtctcgctctgtcacccaggctggagtgcagtggcgcgatctcggctcactgcaagctccgcctcctgggttcacgccattctcctgcctcagcctcccaagtagctgggactacaggcacccgccaccacgcccggctaaattttttgtatttttcagtagagacggggtttcaccatgttagccaggatgtccacttttttcttaaatgaacatattgtcttataaccagcaaatgaagttttacttttttaatcagaaaaaatttcgtcataaagctatatttttatatttttaaaattgatacagttagataccttcagattacctaagttaagtttttgccaaaatgctattttatgccctttttgtaaagttatgatttattttgtaaatatagttccttatagttttctcttgagtgtttggacatgagaatagataagattaaattacaatttacaagatcacttcattaggcacaggaaaagtatttaacaaaattcaacaccctttcacaataaaaaataaaaaataaaaaaccctcaacaaactaggaatagaaggaaacttcctcaacctgataaagggcatctatgaagaacccatggttagcatcatacttaatggtgaaggactggattatttccccctgagatcagaaacaagacaaggatgtctgctttggccatttctattcaacttgtactggacagtcaagaaagggcaattaggcaagaaaataaaataaaagtcatctaggttggaaaggaagaagtataactaaatagagatgggagacgatatggtggttttgtgcatagtaatccaagggaaaactatagaaaatccaaaggcatgatttattaataaataaattcagcaaagttacaggatacaggattaaatatgcagaaattggttatctttcaatatagtatcaatgaataaatcaaaaatgatgttaagaaaacaatttaattttcaacaatggtcaagcttggtggcttgtgcctgtaatcccaacactttgggagtctgaggcagaaagactgctagaggccaggagaccagcctgggaaacagtgagatcccatctctacaaaaacaaacaaacaaaaaacaacaagcaaacaaaaaacagctggatgtgatgacactcatctgtcgtctcagctactcagaggctgaggtgtaaggatggcttgagccccaaagttcgaagctgcaatgagctataactgggtcactgcaatccagcctggatgacagagttagaccttgactcaaaaaaaacaaaaaagaaaagaaaaaaattgacagcatcagaaagagtaaaataccaatataattgagggtccagaaatattgatcacatttatcatcaactgacttttgaaaatagtgctaagacaattcaatgggggcaaaatagtctttttcattaaatgatgcttggaaacatggatatccacatgcaaaataatgaaattggactcctacctcatattgcatataaaaattaactcaaagttgacctaagatctaaatgtaagagctaatattgtaagtatcttcaaagaaaacatggcgtaaatctttctgactttgaattaggcaatgatttcttaaataaatgacactaaaaacacaagcaacaaaagaagaaaataggtaaattaaaattaaaaccatttgtgtttccaaggacaatatcaagaaagcaaaaatacaacccacagaatgagataattttttttaaaatcatgtattagttaagggaggaatttgtatttagaatatgtaaagaactgttacaataataattaaaaggcatataattcaatttttaaaaatcaacaagagatctgaattaacagttctccaaagaagatacacaaaaggccaataagcacatgaaaaggttctcaacatcactagccatcagggaaatgcaaatgagatctacaatgagatatcacttaacactcactggaatagatatataatcaaagtgataatatcaagtgttggtgaggatgcagagaaattggaaccctcatgcactgttggtggatacccacgtgatataaaaacaaatgtctacacaaaaacttgtgcacagatgttctttgcagcattatttataatagcccaaaattgaaacagccctaatttctatcaactaacaagtgaataaacaaaacgtggcatatccatacaaggaatattattcagcaataaaaaaagagatgaagtactgatatgcaccacaacatggaaaaaccttgaaaacatatcaagtgaagaatgccagacatgaaaggccacatattatatgatttcatttatatgaaatgtccagaacaggcgaatatatatagagagaaggcagattagtggttgcttaggctgaagggttggggaggacaaaggggtgactgctaattagtatggggtttcttttttggggtgatgtaaacgttgtaaagttgattgtggtaatggtggcacaactctgaatatactaaaaaccactgaattgtatactttgaatgtttgaactgtgtggtatgtagattttatctcaagttgttataaaaaattaaattacaaatgcaattt

SEQ ID NO: 408300 - DNA, 3356 bp, Homo sapiens
actttgttctctgattgtcctggcagaaattaatgcagttaagtgtacaagttctgacaatatccctaggtccggctgtgctttcaatctaaaatcaactccttttccttacaaagtgttgaataagtaataatttactaagggacgtttttaagcagctacttaaaaaatgcctaggcctccaagaattcattgactctgagtttgcttctttgtggagactcttgatggggaaattaacctctgacacaacctttgaaatggtaattacacatttattttcttccaggtgaaattggagccaaaggcctaatggggcccttttcaaaggagatctatggaccaatattggagcgaattaaagcagaaggcattatatatactacacagagtacaattaaaccataattgggaattatattttgtttttttcttcccaggcaatacacctctgaacatgtgtgtgataaatgggtttgctaatgtgctgttttaaagtataaagcataatatgttttggttaacacaatgtactttttgaactataaatctttattttaatatggaaatgtttggaacaggagatgcaagccactaacagagaactttaataattctaccctgtattttataaatacgtatgtgaaagtgatgatcatgctatttgttaatttattgtgccactttttttcttttgttttttttttgttgttgttgttttttgagatggagtctcgctctgtcacccaggctggagtgcagtggcgcgatctcggctcactgcaagctccgcctcctgggttcacgccattctcctgcctcagcctcccaagtagctgggactacaggcacccgccaccacgcccggctaaattttttgtatttttcagtagagacggggtttcaccatgttagccaggatgtccacttttttcttaaatgaacatattgtcttataaccagcaaatgaagttttacttttttaatcagaaaaaatttcgtcataaagctatatttttatatttttaaaattgatacagttagataccttcagattacctaagttaagtttttgccaaaatgctattttatgccctttttgtaaagttatgatttattttgtaaatatagttccttatagttttctcttgagtgtttggacatgagaatagataagattaaattacaatttacaagatcacttcattaggcacaggaaaagtatttaacaaaattcaacaccctttcacaataaaaaataaaaaataaaaaaccctcaacaaactaggaatagaaggaaacttcctcaacctgataaagggcatctatgaagaacccatggttagcatcatacttaatggtgaaggactggattatttccccctgagatcagaaacaagacaaggatgtctgctttggccatttctattcaacttgtactggacagtcaagaaagggcaattaggcaagaaaataaaataaaagtcatctaggttggaaaggaagaagtataactaaatagagatgggagacgatatggtggttttgtgcatagtaatccaagggaaaactatagaaaatccaaaggcatgatttattaataaataaattcagcaaagttacaggatacaggattaaatatgcagaaattggttatctttcaatatagtatcaatgaataaatcaaaaatgatgttaagaaaacaatttaattttcaacaatggtcaagcttggtggcttgtgcctgtaatcccaacactttgggagtctgaggcagaaagactgctagaggccaggagaccagcctgggaaacagtgagatcccatctctacaaaaacaaacaaacaaaaaacaacaagcaaacaaaaaacagctggatgtgatgacactcatctgtcgtctcagctactcagaggctgaggtgtaaggatggcttgagccccaaagttcgaagctgcaatgagctataactgggtcactgcaatccagcctggatgacagagttagaccttgactcaaaaaaaacaaaaaagaaaagaaaaaaattgacagcatcagaaagagtaaaataccaatataattgagggtccagaaatattgatcacatttatcatcaactgacttttgaaaatagtgctaagacaattcaatgggggcaaaatagtctttttcattaaatgatgcttggaaacatggatatccacatgcaaaataatgaaattggactcctacctcatattgcatataaaaattaactcaaagttgacctaagatctaaatgtaagagctaatattgtaagtatcttcaaagaaaacatggcgtaaatctttctgactttgaattaggcaatgatttcttaaataaatgacactaaaaacacaagcaacaaaagaagaaaataggtaaattaaaattaaaaccatttgtgtttccaaggacaatatcaagaaagcaaaaatacaacccacagaatgagataattttttttaaaatcatgtattagttaagggaggaatttgtatttagaatatgtaaagaactgttacaataataattaaaaggcatataattcaatttttaaaaatcaacaagagatctgaattaacagttctccaaagaagatacacaaaaggccaataagcacatgaaaaggttctcaacatcactagccatcagggaaatgcaaatgagatctacaatgagatatcacttaacactcactggaatagatatataatcaaagtgataatatcaagtgttggtgaggatgcagagaaattggaaccctcatgcactgttggtggatacccacgtgatataaaaacaaatgtctacacaaaaacttgtgcacagatgttctttgcagcattatttataatagcccaaaattgaaacagccctaatttctatcaactaacaagtgaataaacaaaacgtggcatatccatacaaggaatattattcagcaataaaaaaagagatgaagtactgatatgcaccacaacatggaaaaaccttgaaaacatatcaagtgaagaatgccagacatgaaaggccacatattatatgatttcatttatatgaaatgtccagaacaggcgaatatatatagagagaaggcagattagtggttgcttaggctgaagggttggggaggacaaaggggtgactgctaattagtatggggtttcttttttggggtgatgtaaacgttgtaaagttgattgtggtaatggtggcacaactctgaatatactaaaaaccactgaattgtatactttgaatgtttgaactgtgtggtatgtagattttatctcaagttgttataaaaaattaaattacaaatgcaattt

SEQ ID NO: 408301 - DNA, 1822 bp, Homo sapiens
gcggccgcctactactactactgctcgaattcaagcttctaacgatgtacggggcatgatttattaataaataaattcagcaaagttacaggatacaggattaaatatgcagaaattggttatctttcaatatagtatcaatgaataaatcaaaaatgatgttaagaaaacaatttaattttcaacaatggtcaagcttggtggcttgtgcctgtaatcccaacactttgggagtctgaggcagaaagactgctagaggccaggagaccagcctgggaaacagtgagatcccatctctacaaaaacaaacaaacaaaaaacaacaagcaaacaaaaaacagctggatgtgatgacactcatctgtcgtctcagctactcagaggctgaggtgtaaggatggcttgagccccaaagttcgaagctgcaatgagctataactgggtcactgcaatccagcctggatgacagagttagaccttgactcaaaaaaaacaaaaaagaaaagaaaaaaattgacagcatcagaaagagtaaaataccaatataattgagggtccagaaatattgatcacatttatcatcaactgacttttgaaaatagtgctaagacaattcaatgggggcaaaatagtctttttcattaaatgatgcttggaaacatggatatccacatgcaaaataatgaaattggactcctacctcatattgcatataaaaattaactcaaagttgacctaagatctaaatgtaagagctaatattgtaagtatcttcaaagaaaacatggcgtaaatctttctgactttgaattaggcaatgatttcttaaataaatgacactaaaaacacaagcaacaaaagaagaaaataggtaaattaaaattaaaaccatttgtgtttccaaggacaatatcaagaaagcaaaaatacaacccacagaatgagataattttttttaaaatcatgtattagttaagggaggaatttgtatttagaatatgtaaagaactgttacaataataattaaaaggcatataattcaatttttaaaaatcaacaagagatctgaattaacagttctccaaagaagatacacaaaaggccaataagcacatgaaaaggttctcaacatcactagccatcagggaaatgcaaatgagatctacaatgagatatcacttaacactcactggaatagatatataatcaaagtgataatatcaagtgttggtgaggatgcagagaaattggaaccctcatgcactgttggtggatacccacgtgatataaaaacaaatgtctacacaaaaacttgtgcacagatgttctttgcagcattatttataatagcccaaaattgaaacagccctaatttctatcaactaacaagtgaataaacaaaacgtggcatatccatacaaggaatattattcagcaataaaaaaagagatgaagtactgatatgcaccacaacatggaaaaaccttgaaaacatatcaagtgaagaatgccagacatgaaaggccacatattatatgatttcatttatatgaaatgtccagaacaggcgaatatatatagagagaaggcagattagtggttgcttaggctgaagggttggggaggacaaaggggtgactgctaattagtatggggtttcttttttggggtgatgtaaacgttgtaaagttgattgtggtaatggtggcacaactctgaatatactaaaaaccactgaattgtatactttgaatgtttgaactgtgtggtatgtagattttatctcaagttgttataaaaaattaaattacaaatgcaattt

SEQ ID NO: 408302 - DNA, 911 bp, Homo sapiens
  misc_feature (34)..(34): n is a, c, g, or t
  misc_feature (47)..(47): n is a, c, g, or t
  misc_feature (49)..(49): n is a, c, g, or t
  misc_feature (56)..(56): n is a, c, g, or t
  misc_feature (60)..(60): n is a, c, g, or t
cgccgggacgggtgctcggggggggggggggggncgcgacgccccancnccccctnctcngttaagggaggaatttgtatttagaatatgtaaagaactgttacaataataattaaaaggcatataattcaatttttaaaaatcaacaagagatctgaattaacagttctccaaagaagatacacaaaaggccaataagcacatgaaaaggttctcaacatcactagccatcagggaaatgcaaatgagatctacaatgagatatcacttaacactcactggaatagatatataatcaaagtgataatatcaagtgttggtgaggatgcagagaaattggaaccctcatgcactgttggtggatacccacgtgatataaaaacaaatgtctacacaaaaacttgtgcacagatgttctttgcagcattatttataatagcccaaaattgaaacagccctaatttctatcaactaacaagtgaataaacaaaacgtggcatatccatacaaggaatattattcagcaataaaaaaagagatgaagtactgatatgcaccacaacatggaaaaaccttgaaaacatatcaagtgaagaatgccagacatgaaaggccacatattatatgatttcatttatatgaaatgtccagaacaggcgaatatatatagagagaaggcagattagtggttgcttaggctgaagggttggggaggacaaaggggtgactgctaattagtatggggtttcttttttggggtgatgtaaacgttgtaaagttgattgtggtaatggtggcacaactctgaatatactaaaaaccactgaattgtatactttgaatgtttgaactgtgtggtatgtagattttatctcaagttgttataaaaaattaaattacaaatgcaattt

SEQ ID NO: 408303 - DNA, 692 bp, Homo sapiens
ttaatatgatacatttaactggttggaaaggataagcttttttgtgttcacagcaagcaaagatgattataatccaattttagttttaaaattgggacttgtgctgaaacaccatagtcttgtgggcagagttgattgcttgtagaagacttctattagcaatcacttatactcggtgatcctcagaaaactgtttcttaaattatttttttcccttgattaatattttaatatggatacaaacaccaagaggccttctttgcagtgtcatttatctcttacaaatctcattttcctttcagatattatcagacgcgacacagcctcttgaaagtcagaatttttctcctgtggtgagagatgtaagttatgagcagaatattttttcataaatgtatttttttactaccatttttgctctcttctctctgtttctctctctctccatctttgtcattctgtcttttctctatcagtcatgacaccttgtttgtaggactaaaatgtggatactaaagaaatgtcttgtgtcatatacatttaggcagtgattacatccaacggtacattacctgataaatataaatatatccagacactccgggagagcaggtaagtattgttcaaatcctcttgttttatacatttattcttatcttggaattcatgagtattttttaatgcttcaatgg

SEQ ID NO: 408304 - DNA, 5771 bp, Homo sapiens
cctcagatttctcaggagaccagaactgatctgccagccttgctgccttttgttgctctgctctttacattgtctttacagtcaccaggtgtcaagatgctgcaagtacataggactggactgggcaggctgggggtcagcctctccaagggtcttcaccacaaagctgtgttggccgtccggagggaggatgtgaacgcctgggagagaagggccccgctagctcccaagcacatcaaaggcatcaccaatctgggatacaaggtcttgatacagccttcgaatcggcgggccattcatgataaggactatgtcaaagctggtggcattcttcaggaggatatttctgaagcttgtctaattttaggagttaaaagacctccagaggaaaaattaatgtccaggaagacttatgcatttttctcccacacaataaaagctcaggaggccaatatgggcttgttggatgagattctaaaacaggaaattcgccttattgattatgagaaaatggtggatcatagaggagtacgggtagtggcatttggacagtgggctggtgtggcaggaatgatcaacattttacatggaatgggtttaaggctccttgctttgggacatcacacaccttttatgcacattggcatggctcataactacaggaatagcagtcaggctgtgcaagctgtccgtgatgctggctatgaaatatctttgggtttgatgcctaagtcaataggacccttaacatttgtgttcacaggaactggtaatgtttctaagggagcccaagcaatctttaatgagctaccttgtgaatatgtggagccccatgaattaaaagaagtttcccaaactggagacctcagaaaagtgtatgggacggtgttaagtcgtcatcatcatcttgtcaggaaaacagatgctgtgtatgatcctgcagagtatgacaaacatccggagcgctacataagtcgttttaatactgatattgcaccctatacaacttgcttaattaatggaatctactgggaacaaaacactcctcgcctcctaacccgccaagatgctcagagtctcctggctccgggcaagttctcacctgctggtgtggaaggctgccctgcattaccacacaaactcgtggcaatatgtgacatttcagctgacacaggagggtctatagagtttatgactgagtgtacaacaatagagcatcccttttgcatgtatgatgcagaccagcatattattcatgacagtgttgaaggctcggggatcctgatgtgttccattgacaatttgccggcacagctcccaattgaagctacagaatgctttggagacatgctttacccttatgttgaagaaatgatattatcagacgcgacacagcctcttgaaagtcagaatttttctcctgtggtgagagatgcagtgattacatccaacggtacattacctgataaatataaatatatccagacactccgggagagcagggaacgtgctcagtcactttcaatgggcaccaggagaaaggttttggttcttggatctggctacatatctgagcctgtattagaatatttatcaagagatggcaatatagaaataacagtaggatctgacatgaagaatcaaattgaacagttaggcaagaaatataatattaatcctgttagcatggacatttgtaaacaagaagagaagctgggcttcttggtggcaaaacaggatcttgtcatcagcttgttgccttatgtattgcaccctcttgtggccaaggcctgcatcacaaacaaagttaacatggtcactgcaagctacatcacaccagcactaaaagaattggaaaagagtgtggaagatgctggcatcacaatcattggtgaattgggattggaccctggtctggatcacatgttagcaatggaaacaatagataaagccaaggaagtgggagccacgattgaatcatatatttcctactgtggtgggcttccagcccctgaacattcaaacaatccattgagatataaatttagctggagtccagtgggagttttgatgaatgtaatgcagtctgccacctatctgctcgatggaaaggttgtgaatgttgcaggaggcatctcctttcttgatgccgttacgtccatggatttttttccaggattaaatttggaaggctatcctaacagagacagtacgaaatatgctgagatttatggcatttcttctgctcacactttgttgcgggggacactgagatataagggatatatgaaagctttgaatggatttgtaaaattaggtcttataaacagagaagcgcttcctgcctttagacctgaggccaaccctctcacctggaaacaactcctctgtgacctagttgggatttcaccctcctctgagcatgatgtgttgaaggaagctgttcttaagaaactaggaggagacaatacccagttggaggctgctgaatggttgggcttacttggggatgaacaagttcctcaggcagagtccattctggatgccctctccaagcatttggtcatgaagctttcctatggtcctgaagaaaaagatatgattgtgatgagagacagctttggaatcagacatccttctggacatttagaacataaaacgattgatcttgtggcttatggggacatcaatggcttttcagccatggctaaaaccgtggggttacccaccgccatggcagccaaaatgttgcttgatggtgaaattggagccaaaggcctaatggggcccttttcaaaggagatctatggaccaatattggagcgaattaaagcagaaggcattatatatactacacagagtacaattaaaccataattgggaattatattttgtttttttcttcccaggcaatacacctctgaacatgtgtgtgataaatgggtttgctaatgtgctgttttaaagtataaagcataatatgttttggttaacacaatgtactttttgaactataaatctttattttaatatggaaatgtttggaacaggagatgcaagccactaacagagaactttaataattctaccctgtattttataaatacgtatgtgaaagtgatgatcatgctatttgttaatttattgtgccactttttttcttttgttttttttttgttgttgttgttttttgagatggagtctcgctctgtcacccaggctggagtgcagtggcgcgatctcggctcactgcaagctccgcctcctgggttcacgccattctcctgcctcagcctcccaagtagctgggactacaggcacccgccaccacgcccggctaaattttttgtatttttcagtagagacggggtttcaccatgttagccaggatgtccacttttttcttaaatgaacatattgtcttataaccagcaaatgaagttttacttttttaatcagaaaaaatttcgtcataaagctatatttttatatttttaaaattgatacagttagataccttcagattacctaagttaagtttttgccaaaatgctattttatgccctttttgtaaagttatgatttattttgtaaatatagttccttatagttttctcttgagtgtttggacatgagaatagataagattaaattacaatttacaagatcacttcattaggcacaggaaaagtatttaacaaaattcaacaccctttcacaataaaaaataaaaaataaatctatgaagaacccatggttagcatcatacttaatggtgaaggactggattatttccccctgagatcagaaacaagacaaggatgtctgctttggccatttctattcaacttgtactggacagtcaagaaagggcaattaggcaagaaaataaaataaaagtcatctaggttggaaaggaagaagtataactaaatagagatgggagacgatatggtggttttgtgcatagtaatccaagggaaaactatagaaaatccaaaggcatgatttattaataaataaattcagcaaagttacaggatacaggattaaatatgcagaaattggttatctttcaatatagtatcaatgaataaatcaaaaatgatgttaagaaaacaatttaattttcaacaatggtcaagcttggtggcttgtgcctgtaatcccaacactttgggagtctgaggcagaaagactgctagaggccaggagaccagcctgggaaacagtgagatcccatctctacaaaaacaaacaaacaaaaaacaacaagcaaacaaaaaacagctggatgtgatgacactcatctgtcgtctcagctactcagaggctgaggtgtaaggatggcttgagccccaaagttcgaagctgcaatgagctataactgggtcactgcaatccagcctggatgacagagttagaccttgactcaaaaaaaacaaaaaagaaaagaaaaaaattgacagcatcagaaagagtaaaataccaatataattgagggtccagaaatattgatcacatttatcatcaactgacttttgaaaatagtgctaagacaattcaatgggggcaaaatagtctttttcattaaatgatgcttggaaacatggatatccacatgcaaaataatgaaattggactcctacctcatattgcatataaaaattaactcaaagttgacctaagatctaaatgtaagagctaatattgtaagtatcttcaaagaaaacatggcgtaaatctttctgactttgaattaggcaatgatttcttaaataaatgacactaaaaacacaagcaacaaaagaagaaaataggtaaattaaaattaaaaccatttgtgtttccaaggacaatatcaagaaagcaaaaatacaacccacagaatgagataattttttttaaaatcatgtattagttaagggaggaatttgtatttagaatatgtaaagaactgttacaataataattaaaaggcatataattcaatttttaaaaatcaacaagagatctgaattaacagttctccaaagaagatacacaaaaggccaataagcacatgaaaaggttctcaacatcactagccatcagggaaatgcaaatgagatctacaatgagatatcacttaacactcactggaatagatatataatcaaagtgataatatcaagtgttggtgaggatgcagagaaattggaaccctcatgcactgttggtggatacccacgtgatataaaaacaaatgtctacacaaaaacttgtgcacagatgttctttgcagcattatttataatagcccaaaattgaaacagccctaatttctatcaactaacaagtgaataaacaaaacgtggcatatccatacaaggaatattattcagcaataaaaaaagagatgaagtactgatatgcaccacaacatggaaaaaccttgaaaacatatcaagtgaagaatgccagacatgaaaggccacatattatatgatttcatttatatgaaatgtccagaacaggcgaatatatatagagagaaggcagattagtggttgcttaggctgaagggttggggaggacaaaggggtgactgctaattagtatggggtttcttttttggggtgatgtaaacgttgtaaagttgattgtggtaatggtggcacaactctgaatatactaaaaaccactgaattgtatactttgaatgtttgaactgtgtggtatgtagattttatctcaagttgttataaaaaattaaattacaaatgcaattt

SEQ ID NO: 408305 - DNA, 726 bp, Homo sapiens
acctcctacttcccggccttccatcccagtttcttctaggaattcggagcctcccctgcagcgactcggaagattcgaggcggcgggggacaagtcggcgccccagagcggacgagtcaccaggtgtcaagatgctgcaagtacataggactggactgggcaggctgggggtcagcctctccaagggtcttcaccacaaagctgtgttggccgtccggagggaggatgtgaacgcctgggagagaagggccccgctagctcccaagcacatcaaaggcatcaccaatctgggatacaaggtcttgatacagccttcgaatcggcgggccattcatgataaggactatgtcaaagctggtggcattcttcaggaggatatttctgaagcttgtctaattttaggagttaaaagacctccagaggaaaaattaatgtccaggaagacttatgcatttttctcccacacaataaaagctcaggaggccaatatgggcttgttggatgagattctaaaacaggaaattcgccttattgattatgagaaaatggtggatcatagaggagtacgggtagtggcatttggacagtgggctggtgtggcaggtaagtatgccagggcttacatcacccacttcctaaattggcttggggaataactgtgagttttctcttttctgcggcaaggggataggagtgtttatttccatggaaaaaattaaaatgaag

SEQ ID NO: 408306 - DNA, 2078 bp, Homo sapiens
tcttttgaacttaacattttccccctgacattggagactctcctgctacctctctcctaagaaaaaagggcaggtggtggggggacaagccccttccaccttcccatctccaagggactttgcagtgtgggtgatggtgtggctgatcatcctctttctgcacctctgattctgcttgtgttgtccttattgtgtggggcaggagggtcaggacttcagctaggggtgtgctggctctgcagtgactcaggcctgggtgttttttggtgaatttaaaaagatgaccatttctgggggaaagtgacacttttactttctccacaccttcaccatccattttcttactggacttcgctgcgttcctgcaaggaggacagggcagagagtagcaaccctccttgccgaggcccagaaagatagcgtggtgtgcccagggcacccatggtgggtgatggacatctccttttgggtgccaaggcttcctcaaggtgggaggaactggagggcaggggacggtggccagtgtcccgctctagccctctagggcacctttttctcccctctgaagttgttaggctgatctggagtctgctccaggcctgggcttcaccctggcctcatgccctgcccagcacctgtgtggagggacctgttcgtattcattcctctttgggggccaagctcagggcacccgaaccagcagccttgggtggctgaacctagtgggacagaagggaggcagttgtatctggcagagtcacccaaggccacaggcctgagcaaagcaggagagcggggcaagctggggtcagggaccatggtgctggccccctgctgctctggccatgtgggaggcagctggaggggtcccaagtggcagctcctgccagactaccccggactcccgagcccatcgtcctgtactcttctccagtgggacgtctggccctcactgtggctagcttctgggcaagtccctctgctcaagatcactttatggggcagctggtgccccctggggctcccacactctgcacatacaatttagggacctggcagggtcttggtggcctgcagcttccctttctggaaccgactcgcctcccatcagagagccataactcttcttcaatacagtattgtttgaactttgaaatatatgcatttgtctatgtattttcttaaaaattaacactgtatctcaataagcatacaatggattgttcaatggtacagtttggaaccaatcccccgccacttccctccccaagtaaagccaggacagatgctggagtcagcatgggagctgtggaaaccttttgccctggagccaggtgcctgtggctgtgcctgggagtggcttcagcccaggcgtggtgtcagtttcctggcacccctgcccaggagcctgcatgaaggcagccgggtctctctctgagtggctggtgcaccggctcatttctgagtggcctcctgcgtatgaagaaaaagcggccacgtggcatgcctcccttccctcccttgctttcctctcaaagagccaagtcacgctgcactgcgctccgtggagcctttcccgatggagaagagaagggaggcctgagatgtcctttgctgggatgtggagaaacaccatctatatgaaaagccccttgcttgctctgctgattttctccctcccctggccctggagagaaaggctgtgccattcaaagacagtttggggacatgggggctgcaggcctgatcttatttttatgcaaattttgttctgggagcagtggtttatacaaactcctgtagcataattccagcttgtgtgtggctgtccttgagtagtgattctgaagtgatgactgtgatgctatgcctaaaaacatcatcagggtactttgtatctgtcactgtgtttgaacggccctcaatttctatctaataaaaccagtcaaatggttcacctagcaaagactctgtggctgtggctgtgtgtgtgtgttagtgtgtgtgtgtgtgcgcatatgtgtttttgtgtgtgtttatggggattgtgccacactgggctgacagcagcacagccc

SEQ ID NO: 408307 - DNA, 2035 bp, Homo sapiens
tcttttgaacttaacattttccccctgacattggagactctcctgctacctctctcctaagaaaaaagggcaggtggtggggggacaagccccttccaccttcccatctccaagggactttgcagtgtgggtgatggtgtggctgatcatcctctttctgcacctctgattctgcttgtgttgtccttattgtgtggggcaggagggtcaggacttcagctaggggtgtgctggctctgcagtgactcaggcctgggtgttttttggtgaatttaaaaagatgaccatttctgggggaaagtgacacttttactttctccacaccttcaccatccattttcttactggacttcgctgcgttcctgcaaggaggacagggcagagagtagcaaccctccttgccgaggcccagaaagatagcgtggtgtgcccagggcacccatggtgggtgatggacatctccttttgggtgccaaggcttcctcaaggtgggaggaactggagggcaggggacggtggccagtgtcccgctctagccctctagggcacctttttctcccctctgaagttgttaggctgatctggagtctgctccaggcctgggcttcaccctggcctcatgccctgcccagcacctgtgtggagggacctgttcgtattcattcctctttgggggccaagctcagggcacccgaaccagcagccttgggtggctgaacctagtgggacagaagggaggcagttgtatctggcagagtcacccaaggccacaggcctgagcaaagcaggagagcggggcaagctggggtcagggaccatggtgctggccccctgctgctctggccatgtgggaggcagctggaggggtcccaagtggcagctcctgccagactaccccggactcccgagcccatcgtcctgtactcttctccagtgggacgtctggccctcactgtggctagcttctgggcaagtccctctgctcaagatcactttatggggcagctggtgccccctggggctcccacactctgcacatacaatttagggacctggcagggtcttggtggcctgcagcttccctttctggaaccgactcgcctcccatcagagagccataactcttcttcaatacagtattgtttgaactttgaaatatatgcatttgtctatgtattttcttaaaaattaacactgtatctcaataagcatacaatggattgttcaatggtacagtttggaaccaatcccccgccacttccctccccaagtaaagccaggacagatgctggagtcagcatgggagctgtggaaaccttttgccctggagccaggtgcctgtggctgtgcctgggagtggcttcagcccaggcgtggtgtcagtttcctggcacccctgcccaggagcctgcatgaaggcagccgggtctctctctgagtggctggtgcaccggctcatttctgagtggcctcctgcgtatgaagaaaaagcggccacgtggcatgcctcccttccctcccttgctttcctctcaaagagccaagtcacgctgcactgcgctccgtggagcctttcccgatggagaagagaagggaggcctgagatgtcctttgctgggatgtggagaaacaccatctatatgaaaagccccttgcttgctctgctgattttctccctcccctggccctggagagaaaggctgtgccattcaaagacagtttggggacatgggggctgcaggcctgatcttatttttatgcaaattttgttctgggagcagtggtttatacaaactcctgtagcataattccagcttgtgtgtggctgtccttgagtagtgattctgaagtgtatctgtcactgtgtttgaacggccctcaatttctatctaataaaaccagtcaaatggttcacctagcaaagactctgtggctgtggctgtgtgtgtgtgttagtgtgtgtgtgtgtgcgcatatgtgtttttgtgtgtgtttatggggattgtgccacactgggctgacagcagcacagccc

SEQ ID NO: 408308 - DNA, 763 bp, Homo sapiens
attctcctgcctcagcctcccaagtagctgggattacaggcgcccaccactttgcccagctaatttttggtatttttagtagagacggggccaccattttggccaggctggttgtgaactcctgacctcgtgattcgcccacctcctcctcccaaagtgctgggattataggtgtgggccaccgtgcccggccaaactcactcttttgaacttaacattttccccctgacattggagactctcctgctacctctctcctaagaaaaaagggcaggtggtggggggacaagccccttccaccttcccatctccaagggactttgcagtgtgggtgatggtgtggctgatcatcctctttctgcacctctgattctgcttgtgttgtccttattgtgtggggcaggagggtcaggacttcagctaggggtgtgctggctctgcagtgactcaggcctgggtgttttttggtgaatttaaaaagatgaccatttctgggggaaagtgacacttttactttctccacaccttcaccatccattttcttactggacttcgctgcgttcctgcaaggaggacagggcagagagtagcaaccctccttgccgaggcccagaaagatagcgtggtgtgcccagggcacccatggtgggtgatggacatctccttttgggtgccaaggcttcctcaaggtgggaggaactggagggcaggggacggtggccagtgtcccgctctagccctctagggcacctttttctcccct

SEQ ID NO: 408309 - DNA, 1009 bp, Homo sapiens
gatctagcagatcctctcgacggtgttctggcaggtaaggaacgccggctcttcgcctctcagcgcggcttgtcctttgttccggacgcccgctcctcagccctgcggctcctggggtcgctgctgcatcccgcacgcctccaccggctgcagacccatggccgagcgcggggaactcgacttgaccggcgccaaacagaacacaggagtgtggctagtcaaggttcctaaatatttgtcacagcaatgggctaaagcctctggaagaggtgaagttgggaaactgcggattgccaagactcaaggaaggactgaggtgtcatttactttgaatgaggatcttgcaaatattcatgatattggtggaaaaccagcttcagtcagtgctcctagagaacatccatttgtcttgcaaagtgttggaggacagacattaacagtatttactgagagctcatcagataagctgtcattggaaggaatagtggtacaaagagctgaatgccgaccagctgccagtgaaaactacatgcgattaaaaagattgcaaatagaagagtcttccaaaccagtgaggctatcacaacagctggacaaagttgtaacaaccaattacaaacctgttgctaatcatcaatacaatatcgaatatgaaaggaaaaagaaagaagacggaaagcgagctcgagctgataaacaacatgttttagacatgctattttcagcctttgagaaacatcaatactataatcttaaggacttggtggacatcacaaagcaacctgtggtgtactgaaggaatcttacaagaaatggtgttccgattggtcacggtcccaaaacacttggagctgaggccgagtacgaaccatccgggaagaaaggtggttggaagatccagcgttcttgagagctaccggtgttgcaaggggttcggagggaccgtttaagggaagacattcctccgaataacggacgtatctgggggaaacattaccgtccacatccg

SEQ ID NO: 408310 - DNA, 1470 bp, Homo sapiens
gatctagcagatcctctcgacggtgttctggcaggtaaggaacgccggctcttcgcctctcagcgcggcttgtcctttgttccggacgcccgctcctcagccctgcggctcctggggtcgctgctgcatcccgcacgcctccaccggctgcagacccatggccgagcgcggggaactcgacttgaccggcgccaaacagaacacaggagtgtggctagtcaaggttcctaaatatttgtcacagcaatgggctaaagcctctggaagaggtgaagttgggaaactgcggattgccaagactcaaggaaggactgaggtgtcatttactttgaatgaggatcttgcaaatattcatgatattggtggaaaaccagcttcagtcagtgctcctagagaacatccatttgtcttgcaaagtgttggaggacagacattaacagtatttactgagagctcatcagataagctgtcattggaaggaatagtggtacaaagagctgaatgccgaccagctgccagtgaaaactacatgcgattaaaaagattgcaaatagaagagtcttccaaaccagtgaggctatcacaacagctggacaaagttgtaacaaccaattacaaacctgttgctaatcatcaatacaatatcgaatatgaaaggaaaaagaaagaagacggaaagcgagctcgagctgataaacaacatgttttagacatgctattttcagcctttgagaaacatcaatactataatcttaaggacttggtggacatcacaaagcaacctgtggtgtacctgaaggaaatcttaaaagaaattggtgttcagaatgtaaaagggatccacaaaaacacatgggagctgaagccagagtacagacactatcaaggagaagaaaagagtgactaagaagactcctagccagcatgctagtgaaacgactagcagcgatgctatgcaaaaggcgctgatactggaaggcttgaacaccgtatgttaataggggttaagtgacagtactttgatttctctcggtaaattttttaaacctgtaattcttgtaaagtttcttaactgtttttttgaggagaaagaacagatttatttatagacttaacttgtattaaaccagattattcacagtaggaataggggttggaggattaagagggtttttcttaaatattagcttttaatgtgtacaattaggaaatttttttaagtgaggactctctacccttgccgtatctaaggagctgaggtaatacagatccaaggagaattgtatagcaagaaaaaaacagtcaactacagaaactcttaaaaggaataaaaacccaaagttccttattttgaaattgtcaaagaacaaagcggtgtttttcttttaaacaggtgatcacgtttcgtgttcatactcaacgttaataaaaggagagagtttgtagtgaaatggcagtgttcatcattgg

SEQ ID NO: 408311 - DNA, 1318 bp, Homo sapiens
gcgcagtcccggctcctggcggcgtgttcctcttttcctcggttcccagtgttctggcaggtaaggaacgccggctcttcgcctctcagcgcggcttgtcctttgttccggacgcccgctcctcagccctgcggctcctggggtcgctgctgcatcccgcacgcctccaccggctgcagacccatggccgagcgcggggaactcgacttgaccggcgccaaacagaacacaggagtgtggctagtcaaggttcctaaatatttgtcacagcaatgggctaaagcctctggaagaggtgaagttgggaaactgcggattgccaagactcaaggaaggactgaggtgtcatttactttgaatgaggatcttgcaaatattcatgatattggtggaaaaccagcttcagtcagtgctcctagagaacatccatttgtcttgcaaagtgttggaggacagacattaacagtatttactgagagctcatcagataagctgtcattggaaggaatagtggtacaaagagctgaatgccgaccagctgccagtgaaaactacatgcgattaaaaagattgcaaatagaagagtcttccaaaccagtgaggctatcacaacagctggacaaagttgtaacaaccaattacaaacctgttgctaatcatcaatacaatatcgaatatgaaaggaaaaagaaagaagacggaaagcgagctcgagctgataaacaacatgttttagacatgctattttcagcctttgagaaacatcaatactataatcttaaggacttggtggacatcacaaagcaacctgtggtgtacctgaaggaaatcttaaaagaaattggtgttcagaatgtaaaagggatccacaaaaacacatgggagctgaagccagagtacagacactatcaaggagaagaaaagagtgactaagaagactcctagccagcatgctagtgaaacgactagcagcgatgctatgcaaaaggcgctgatactggaaggcttgaacaccgtatgttaataggggttaagtgacagtactttgatttctctcggtaaattttttaaacctgtaattcttgtaaagtttcttaactgtttttttgaggagaaagaacagatttatttatagacttaacttgtattaaaccagattattcacagtaggaataggggttggaggattaagagggtttttcttaaatattagcttttaatgtgtacaattaggaaatttttttaagtgaggactctctacccttgccgtatctaaggagctgaggtaatacagatccaaggagaattgtatagcaag

SEQ ID NO: 408312 - DNA, 1400 bp, Homo sapiens
cacacacacacggtctttgatttagtggtttagactagctgtgttttcagaagttacttctttgtcaaagacgatagcctttatactctttaatttgattttatgcccttttaagctaccttatttagaaggagcagagtgtataaaagctgttcctggcaaagggccacagcagcctaataaacaaatctgacaggagcccagtttgttactaagccaagaataaggcttctctctgttctgaccagtgagattcctgaaacttaactattttttcttgatttttgatattaattatatttgattgtcatattactgtgtttagtgtgtcaaaatacagtcttgaaaatgataagtattatctctgaatccttttttttttccattcaagataagctgtcattggaaggaatagtggtacaaagagctgaatgccgaccagctgccagtgaaaactacatgcgattaaaaagattgcaaatagaagagtcttccaaaccagtgaggctatcacaacagctggacaaagttgtaacaaccaattacaaacctgttgctaatcatcaatacaatatcgaatatgaaaggaaaaagaaagaagacggaaagcgagctcgagctgataaacaacatgttttagacatgctattttcagcctttgagaaacatcaatactataatcttaaggacttggtggacatcacaaagcaacctgtggtgtacctgaaggaaatcttaaaagaaattggtgttcagaatgtaaaagggatccacaaaaacacatgggagctgaagccagagtacagacactatcaaggagaagaaaagagtgactaagaagactcctagccagcatgctagtgaaacgactagcagcgatgctatgcaaaaggcgctgatactggaaggcttgaacaccgtatgttaataggggttaagtgacagtactttgatttctctcggtaaattttttaaacctgtaattcttgtaaagtttcttaactgtttttttgaggagaaagaacagatttatttatagacttaacttgtattaaaccagattattcacagtaggaataggggttggaggattaagagggtttttcttaaatattagcttttaatgtgtacaattaggaaatttttttaagtgaggactctctacccttgccgtatctaaggagctgaggtaatacagatccaaggagaattgtatagcaagaaaaaaacagtcaactacagaaactcttaaaaggaataaaaacccaaagttccttattttgaaattgtcaaagaacaaagcggtgtttttcttttaaacaggtgatcacgtttcgtgttcatactcaacgttaataaaaggagagagtttgtagtgaaatggcagtgttcatcattgg

SEQ ID NO: 408313 - DNA, 1240 bp, Homo sapiens
ttattcgtaggaaaagagaaaggagcagctggtactgtctctctcctccctcttattgaatgaccttcaaagtcccacaacttaaaccaacattgttagtaccatggttccgttacattataaaataaatacaagattcatataagatgtaaaatggtctcattcttttagtttggaatttttatctaatttctgattttttaatttaaaagcgaactttgatagcatgattgaattgaatttcaaagctccatatttctgcaggagaggctcctacttaccgtctgaactttttgcctccgaccttatcttgattgcaaatagaagagtcttccaaaccagtgaggctatcacaacagctggacaaagttgtaacaaccaattacaaacctgttgctaatcatcaatacaatatcgaatatgaaaggaaaaagaaagaagacggaaagcgagctcgagctgataaacaacatgttttagacatgctattttcagcctttgagaaacatcaatactataatcttaaggacttggtggacatcacaaagcaacctgtggtgtacctgaaggaaatcttaaaagaaattggtgttcagaatgtaaaagggatccacaaaaacacatgggagctgaagccagagtacagacactatcaaggagaagaaaagagtgactaagaagactcctagccagcatgctagtgaaacgactagcagcgatgctatgcaaaaggcgctgatactggaaggcttgaacaccgtatgttaataggggttaagtgacagtactttgatttctctcggtaaattttttaaacctgtaattcttgtaaagtttcttaactgtttttttgaggagaaagaacagatttatttatagacttaacttgtattaaaccagattattcacagtaggaataggggttggaggattaagagggtttttcttaaatattagcttttaatgtgtacaattaggaaatttttttaagtgaggactctctacccttgccgtatctaaggagctgaggtaatacagatccaaggagaattgtatagcaagaaaaaaacagtcaactacagaaactcttaaaaggaataaaaacccaaagttccttattttgaaattgtcaaagaacaaagcggtgtttttcttttaaacaggtgatcacgtttcgtgttcatactcaacgttaataaaaggagagagtttgtagtgaaatggcagtgttcatcattgg

SEQ ID NO: 408314 - DNA, 1496 bp, Homo sapiens
gcgcagtcccggctcctggcggcgtgttcctcttttcctcggttcccagtgttctggcaggtaaggaacgccggctcttcgcctctcagcgcggcttgtcctttgttccggacgcccgctcctcagccctgcggctcctggggtcgctgctgcatcccgcacgcctccaccggctgcagacccatggccgagcgcggggaactcgacttgaccggcgccaaacagaacacaggagtgtggctagtcaaggttcctaaatatttgtcacagcaatgggctaaagcctctggaagaggtgaagttgggaaactgcggattgccaagactcaaggaaggactgaggtgtcatttactttgaatgaggatcttgcaaatattcatgatattggtggaaaaccagcttcagtcagtgctcctagagaacatccatttgtcttgcaaagtgttggaggacagacattaacagtatttactgagagctcatcagataagctgtcattggaaggaatagtggtacaaagagctgaatgccgaccagctgccagtgaaaactacatgcgattaaaaagattgcaaatagaagagtcttccaaaccagtgaggctatcacaacagctggacaaagttgtaacaaccaattacaaacctgttgctaatcatcaatacaatatcgaatatgaaaggaaaaagaaagaagacggaaagcgagctcgagctgataaacaacatgttttagacatgctattttcagcctttgagaaacatcaatactataatcttaaggacttggtggacatcacaaagcaacctgtggtgtacctgaaggaaatcttaaaagaaattggtgttcagaatgtaaaagggatccacaaaaacacatgggagctgaagccagagtacagacactatcaaggagaagaaaagagtgactaagaagactcctagccagcatgctagtgaaacgactagcagcgatgctatgcaaaaggcgctgatactggaaggcttgaacaccgtatgttaataggggttaagtgacagtactttgatttctctcggtaaattttttaaacctgtaattcttgtaaagtttcttaactgtttttttgaggagaaagaacagatttatttatagacttaacttgtattaaaccagattattcacagtaggaataggggttggaggattaagagggtttttcttaaatattagcttttaatgtgtacaattaggaaatttttttaagtgaggactctctacccttgccgtatctaaggagctgaggtaatacagatccaaggagaattgtatagcaagaaaaaaacagtcaactacagaaactcttaaaaggaataaaaacccaaagttccttattttgaaattgtcaaagaacaaagcggtgtttttcttttaaacaggtgatcacgtttcgtgttcatactcaacgttaataaaaggagagagtttgtagtgaaatggcagtgttcatcattgg

SEQ ID NO: 408315 - DNA, 1092 bp, Homo sapiens
gcgcagtcccggctcctggcggcgtgttcctcttttcctcggttcccagtgttctggcaggtaaggaacgccggctcttcgcctctcagcgcggcttgtcctttgttccggacgcccgctcctcagccctgcggctcctggggtcgctgctgcatcccgcacgcctccaccggctgcagacccatggccgagcgcggggaactcgacttgaccggcgccaaacagaacacaggagtgtggctagtcaaggttcctaaatatttgtcacagcaatgggctaaagcctctggaagaggtgaagttgggaaactgcggattgccaagactcaaggaaggactgaggtgtcatttactttgaatgaggatcttgcaaatattcatgatattggtggaaaaccagcttcagtcagtgctcctagagaacatccatttgtcttgcaaagtgttggaggacagacattaacagtatttactgagagctcatcagataagctgtcattggaaggaatagtggtacaaagagctgaatgccgaccagctgccagtgaaaactacatgcgattaaaaagattgcaaatagaagagtcttccaaaccagtgaggctatcacaacagctggacaaagttgtaacaaccaattacaaacctgttgctaatcatcaatacaatatcgaatatgaaaggaaaaagaaagaagacggaaagcgagctcgagctgataaacaacatgttttagacatgctattttcagcctttgagaaacatcaatactataatcttaaggacttggtggacatcacaaagcaacctgtggtgtacctgaaggaaatcttaaaagaaattggtgttcagaatgtaaaagggatccacaaaaacacatgggagctgaagccagagtacagacactatcaaggagaagaaaagagtgactaagaagactcctagccagcatgctagtgaaacgactagcagcgatgctatgcaaaaggcgctgatactggaaggcttgaacaccgtgatcacgtttcgtgttcatactcaacgttaataaaaggagagagtttgtagtgaaatggcagtgttcatcattgg

SEQ ID NO: 408316 - DNA, 650 bp, Homo sapiens
gcgcagtcccggctcctggcggcgtgttcctcttttcctcggttcccagtgttctggcaggtaaggaacgccggctcttcgcctctcagcgcggcttgtcctttgttccggacgcccgctcctcagccctgcggctcctggggtcgctgctgcatcccgcacgcctccaccggctgcagacccatggccgagcgcggggaactcgacttgaccggcgccaaacagaacacaggagtgtggctagtcaaggttcctaaatatttgtcacagcaatgggctaaagcctctggaagaggtgaagttgggaaactgcggattgccaagactcaaggaaggactgaggtgtcatttactttgaatgaggatcttgcaaatattcatgatattggtggaaaaccagcttcagtcagtgctcctagagaacatccatttgtcttgcaaagtgttggaggacagacattaacagtatttactgagagctcatcagggggatccagaatgactgctggagttactactgtcatatctacctctcaggcatcaaaagggaagcaagacggggaagagtctttcttggtcacccaggctagggtacagtggcacgatcttggctcacagcaacctcttcctcccgggctcaagcagttgtc

SEQ ID NO: 408317 - DNA, 440 bp, Homo sapiens
  misc_feature (15)..(15): n is a, c, g, or t
  misc_feature (55)..(55): n is a, c, g, or t
gattccgaatttaantcggactcacctatagggaatttggcccctcgaggcccanaattcggcacagaactggagatacaatgaggagtgaaatatatagtccctctctgaaagcttgtgcatcatacaaaacagtgcagataatggtaaatgcttttgcacaaaaccccataagacttagaggcaagcagaaatgacgcaagtatgaaactcaagctggctgcccgctgtgctttgagtaatgaagtcccttgtctctgatccaggaagctcctgtcttctgccagcatctgtcagcaggctaatttgtcagcttgcaaatagggagacatctcaggcttgtcacagttctttacagttactagcctcatgtggctatttccaattaaaattaaattttaagtttaaaatgcagttcctcagatgcactcattaattaa

SEQ ID NO: 408318 - DNA, 389 bp, Homo sapiens
  misc_feature (222)..(222): n is a, c, g, or t
  misc_feature (383)..(383): n is a, c, g, or t
tcagtggccaagtttccagtgaccatccgccatcctgtcatacccaagctatacgaccctggaccagagaggaagctcagaaacctggttaccattgctaccaagactttcctccgcccccacaagctcatgatcatgctccggagtattcgagagtattacccagacttgaccgtaatagtggctgatgacagccagaagcccctggaaattaaagacaancacgtggagtattacactatgcctttgggaagggttggtttgctggtaggaacctggccatatctcaggtcaccaccaaatacgttctctgggtggacgatgattttctcttcaacgaggagaccaagattgaggtgctggtggatgtcctggagaaaacngaactg

SEQ ID NO: 408319 - DNA, 216 bp, Homo sapiens
aacaaaaccaactatagctatgactcagtttataacacgtttacccttaataagtttacctaattagaaatgtatatgttaataaaaatttttacactttaaagaggatttttaaagaatgaaatcctgactcatttgttgtctcaagtgactacagataccccttgaattaagatggggttatgtcctgagaaactcatcctaagttgaaaatac

SEQ ID NO: 408320 - DNA, 348 bp, Homo sapiens
ctctacaactgtaaataattagaaaaggtttttttttaatttttactttagaaatttttgttaaagaactctctctctcttaatgtccaaagtcttagacagttggacatcttttccttctggaaagatgtgaaactttgtagaatggagaagaaatgtaaagagtacttaacactaaaagaaaaggcggtgaaaagccaaaccctgttgtgttagtctgttcttatgttgttttaaagaaatagctgaggctgggtaatttatacagaaaagaggtttaattggctcatggttctgcaggctgtacaagaggcatggtatcagcatctgctcggcttctgggaaggc

SEQ ID NO: 408321 - DNA, 705 bp, Homo sapiens
acccacgacgacagaaggcgccgatggccgcgcctgctgagccctgcgcggggcagggggtctggaaccagacagagcctgaacctgccgccaccagcctgctgagcctgtgcttcctgagaacagcaggggtctgggtgccccccatgtacctctgggtccttggtcccatctacctcctcttcatccaccaccatggccggggctacctccagatgtccccactcttcaaagccaagatggtagctgccatccctgggagcctggaaccaggcaatggtggggggaggcaggggacaggctggaacctggtgaagtcttaaagtagactcctcctatcggggtgtagaagggaatctgttaatcaaacagagcaatattagaaaggctacagaggtcaactcagtggaacacggttctcccaaacagattttgtaattccgaaaatccacgcatgcgcaaacatacgcatacactcccatgttcctggacagtttatagctaccataacctggcattttccaaaacataccatgtagactcttggatacacaaggtaattttagggccacattaggatgaaccttttaaaaagttatgcatttatttttatgtttccccactagctgtattataggacaatttttatatgtgatatgtatttaccttagtgtgttaaataaacactggcattccaagtgtgag

SEQ ID NO: 408322 - DNA, 678 bp, Homo sapiens
acccacgacgacagaaggcgccgatggccgcgcctgctgagccctgcgcggggcagggggtctggaaccagacagagcctgaacctgccgccaccagcctgctgagcctgtgcttcctgagaacagcaggggtctgggtgccccccatgtacctctgggtccttggtcccatctacctcctcttcatccaccaccatggccggggctacctccagatgtccccactcttcaaagccaagatggtagctgccatccctgggagcctggaaccaggctggaacctggtgaagtcttaaagtagactcctcctatcggggtgtagaagggaatctgttaatcaaacagagcaatattagaaaggctacagaggtcaactcagtggaacacggttctcccaaacagattttgtaattccgaaaatccacgcatgcgcaaacatacgcatacactcccatgttcctggacagtttatagctaccataacctggcattttccaaaacataccatgtagactcttggatacacaaggtaattttagggccacattaggatgaaccttttaaaaagttatgcatttatttttatgtttccccactagctgtattataggacaatttttatatgtgatatgtatttaccttagtgtgttaaataaacactggcattccaagtgtgag

SEQ ID NO: 408323 - DNA, 184 bp, Homo sapiens
aacgtcaggctcccagttgtccaaactcccagactctttacttcaaaatacattatgtgatttttcattctgtcatattactggctgtatgtctgataaatgttgccttttcccctgtgtccactggccacaatccacaatatatttgaactaattgctatattctgcccaggaactggtgatt

SEQ ID NO: 408324 - DNA, 297 bp, Homo sapiens
gcgcccggccataactcagctctttacatcttttgttcatgagtagctgctgcattcactaagattcattcattcaaatggcagaatgcattcctcatgcgccacgtaagagagattatcaaaaacacaggcacaaaggagagagccttgaaatctttctcctggcttaaagttgatggattatctgcctggaccatatgcattctccaggaagttgttaaacaggttagttttattctctgagctatgagtcttatgttcttacatttttcctagcaccaaggaaataatctctga

SEQ ID NO: 408325 - DNA, 421 bp, Homo sapiens
taaaacacccaccagtgctcaaaggaaacaggggcggccatgggatagtcacagaaagagctgagaggagatctcgatgacatgcattgcagttgtgattgcagttaccaaaacggctctttaataaggaggcttaatgtataaatttgggagcaggggatctgcttacactcttgcattccacttctcccctggaaagccctctagagcttcagggaccacagaacaaaggccactgaccttgtgcagcctccacctgctagctttaatacagtgaaattgagaccccacatctctaatctgggactgggctgaaacatgcactgcatgagtctaagctgttgactcttaaagagccagagtgaactttcccccagtgggcagtagattccgctgcatctgcttatggatgtttactctt

SEQ ID NO: 408326 - DNA, 421 bp, Homo sapiens
tgtgtttggagagaagacctggcagagtaggtaaagcaatgggaagatgcagttagaaggatgagaaaagcactgaaaagaaaactaaggaaataccaaataatctcactctagagttttgcctgggatttgctatgtgccatgtttgattcttgatcttaaaaagataaaaataagtaatttcttgagcccaggaaatttgagaccagcctgggcaatgtggcaagaccccttttctacacaaaaacacaagaattagccaggcatggtggcacatacctgtagccgctgctactcggaggctgaggtgagaggatcgcctgagtctgggaagttgaggttacatttaggtgtaattgcattccagcctgggagacagagtgagatcctgtctcaagaaaaaaagaaaaagaaaggaaaa

SEQ ID NO: 408327 - DNA, 432 bp, Homo sapiens
ctgctacttggtggagacctttccattagggaaatgtggaacaactgagaagctgggttaagtttttaagtcatttatttgtcgactctggagcctgagtttagtggtcttgtccattttggaatgtgtcttgacagtagttcttggcagttgttctcagtggtggctgtgcatcagaatctcctcaggaacttttttttttccctcaagacagtcttgctctgtcacccaggctggagttcagtggcgcgatctcagctcactttaacctctgccttcccggtttaagcaattcttctgcctcagcctcctgagtagctggattgcaggtgtccaccaccacaccggcctaatttttgtatttttagtagagatgggtttcgccatgttggccaggctggtctcaaactcctgacctcatgaggaacttaa

SEQ ID NO: 408328 - DNA, 179 bp, Homo sapiens
ggtagcaggaggtagggtgaccacataatttgtaatccaaatggggctaagtggtcactgttaaaattatgctgggacaacagatataaactaggattatcccaggcgtgctgggttagtaaggatttagtcattactctgagtgacttggctttgggcagagctgcaacatgacctga

SEQ ID NO: 408329 - DNA, 428 bp, Homo sapiens
gtgaatgctattatgacaaaaggagcatgtagagaaaagaggaaaactacaccaaagtggtaacattttgggtgcattcagatgagggataggagttcatgagttagagaatctgagaaaaggcattataatgttaggagcattcttactttgattattcagaacttggttatactgtgcattctataattaaacaagcaccgtggttaattataccgtaagtgttggcattcgggccttatgtaggagatgtatctgattagattggtctgttagataatagcggtaggagtgtggataatggacaagaaatcaatcaagtatgtattttaacacatactacatgcatataatcagggggaaataaatgtaaaataaaatgtaaaatatatttaagttataatatctgccttcataaatcttaaggc

SEQ ID NO: 408330 - DNA, 372 bp, Homo sapiens
aaccagtaagctgaaagtgattggaaattcagagggacctcttttctccatattggatctctgttctttgttggacatctgcttaatacttctatatttgctgatcagcttacataaaagaaggttgatgtaccagcacttccaaggttattaattgtgtcacaagaaatagtctagactgagactgtggtagcttcattccaattctctgttatggaggagtgcactctgattggctcagtttgctgcaggtgttcaatcaacagcagttggatggggagtcatgttgtattcacctagctgcctgggagttctgcttaggtgggatgatttctagataaagtgagcaattctcagcccttgggctgaaag

SEQ ID NO: 408331 - DNA, 883 bp, Homo sapiens
agggtcaagcggcgctaagagaaggcgggacagaggaatgggaaatgacgtgaggagtgcggaggggcgcgaggtttcaagatggcggtagctgaggggttgaccgagagacccagttgaaggcctttacgaagtgaaagaggccgggagtcgccccctacccgcttctcgtagtcctgggagcacagcagaagtgtttttctttttttaatgaacaagtaaaccatacaaattgtcaacatgggacggagatctacatcatccaccaagagtggaaaatttatgaaccccacagaccaagcccgaaaggaagcccggaagagagaattaaagaagaacaaaaaacagcgcatgatggttcgagctgcagttttaaagatgaaggatccaaaacagataatccgagacatggagaaattggatgaaatggagtttaacccagtgcaacagccacaattaaatgagaaagtactgaaagacaagcgtaaaaagctgcgtgaaacctttgaacgtattctacgactctatgaaaaagagaatccagatatttacaaagaattgagaaagctagaagtagaatatgaacagaagagggctcaacttagccaatattttgatgctgtcattcagtactttctcatttaattgtggctgttgcgttacgctggtggcgtcggagccgagccggactggtcaggatgatcacggacgtgcagtcgccatcttcgccaacatgctgggcgtgtcgctcttctatgcttgtcgttctctatcactacagtgggccgtcaagaatcccaagaagccaggaatgaaaagtgggcgccttttccgccccaaggtttcccccgacataatcttgaggcacgaaggaggggcatcc

SEQ ID NO: 408332 - DNA, 3197 bp, Homo sapiens
agggtcaagcggcgctaagagaaggcgggacagaggaatgggaaatgacgtgaggagtgcggaggggcgcgaggtttcaagatggcggtagctgaggggttgaccgagagacccagttgaaggcctttacgaagtgaaagaggccgggagtcgccccctacccgcttctcgtagtcctgggagcacagcagaagtgtttttctttttttaatgaacaagtaaaccatacaaattgtcaacatgggacggagatctacatcatccaccaagagtggaaaatttatgaaccccacagaccaagcccgaaaggaagcccggaagagagaattaaagaagaacaaaaaacagcgcatgatggttcgagctgcagttttaaagatgaaggatccaaaacagataatccgagacatggagaaattggatgaaatggagtttaacccagtgcaacagccacaattaaatgagaaagtactgaaagacaagcgtaaaaagctgcgtgaaacctttgaacgtattctacgactctatgaaaaagagaatccagatatttacaaagaattgagaaagctagaagtagaatatgaacagaagagggctcaacttagccaatattttgatgctgtcaagaatgctcagcatgtggaagtggagagtattcctttgccagatatgccacatgctccttccaacattttgatccaggacattccacttcctggtgcccagccaccctctatcctaaagaaaacctcagcctatggacctccaactcgggcagtttctatccttcctcttcttggacatggtgttccacgtttgccccctggcagaaaacctcctggccctccccctggtccacctcctcctcaagtcgtgcagatgtatggccgtaaagtgggttttgccctagatcttccccctcgtaggcgagatgaagacatgttatatagtcctgaacttgcccagcgaggtcatgatgatgatgtttctagcaccagtgaagatgatggctatcctgaggacatggatcaagataagcatgatgacagtactgatgacagtgacaccgacaaatcagatggagaaagtgacggggatgaatttgtgcaccgtgataatggtgagagagacaacaatgaagaaaagaagtcaggtctgagtgtacggtttgcagatatgcctggaaaatcaaggaagaaaaagaagaacatgaaggaactgactcctcttcaagccatgatgcttcgtatggcaggtcaagaaatccctgaggagggacgggaagtagaggaattttcagaggacgatgatgaagatgattctgatgactctgaagcagaaaagcaatcacaaaagcagcataaagaggaatcccattctgatggcacatccactgcttcttcacagcagcaggctccgccgcagtctgttcctccttctcagatacaagcacctcccatgccaggaccaccacctcttggaccaccacctgctccaccattacggcctcctgggccacctacaggccttcctcctggtccacctccaggagctcctccattcctgagaccacctggaatgccaggactccgagggcccttaccccgacttttacctccaggaccaccaccaggccgaccccctggccctcccccaggtccacctccaggtctgcctcctggtccccctcctcgtggacccccaccaaggctacctccccctgcacctccaggtattcctccacctcgtcctggcatgatgcgcccacctttggtgcctccccttggacctgccccccctgggctgttcccaccagctcccttgccaaaccctggggttttaagtgccccacccaacttgattcagcgacccaaggcggatgatacaagtgcagccaccattgagaagaaagccacagcaaccatcagtgccaagccacagatcactaatcccaaggcagagattactcgatttgtgcccactgcactgagagtacgtcgggagaataaaggggctactgctgctccccaaagaaagtcagaggatgattctgctgtgcctcttgccaaagcagcacccaaatctggtccttctgttcctgtctcagtacaaactaaggatgatgtctatgaggctttcatgaaagagatggaagggctactgtgacagcttttgatgccagaaaaggcttctgttcacaacagtggcccatggagaaagaggctcttattaaacttagatgaaagagctgcttccattgtcagggtattttctaatttcagttcaaggaatatcctaaaatttagccttgttcagaatttactgcacataaaaaagggtatttcatccagaatagatcagttattgaagcagtgctgctaacatccattccctttcataccaccattttcaccctgtttcttcccctcctccagttctttggaaatttgtgatcgggggatcttagttgcttatttgttttgactcttgtgtgctgtgggcactggagtagagatttctggagaaaaaaaaacagtttatttcatcttgccttttgtgtttgagttatttttaatattttcctgtaaatattttgtaatattttacttgtaatgaaatggatcacaatgtcatttcctaatacaaggcaggatatgtgggaagaatatgtacaattatttgattaaaattatttcccactgacctaaactttcagtgatttgtgggaaaaataaataaatgttctacaccaagatactctgtgttactgataatatgtaaacataatacctattttatggacagaaaaagttaaatatttaaaacttgggtttttaaggaactgcctttctggtacagaatgagaatcttactgaaaacatggtaaaaactacattttaaattttaagggataaaaaggagtaattatttcccttttttaagattgtcatactggctttagagaaactgagaggtgttaagaatagtatggtttggcttttattatttaaaagatgtcttaccttcagtggttacttattccagagcttcttgaactgatacgagttgaatggcaaaagtcattttaaaccatttttaagctataaaagaatcagaagaggttagctttttttcctttctgaattggtgggtttggtgtgcttttatattaaaatatgaatgaataagagtgctta

SEQ ID NO: 408333 - DNA, 2638 bp, Homo sapiens
agggtcaagcggcgctaagagaaggcgggacagaggaatgggaaatgacgtgaggagtgcggaggggcgcgaggtttcaagatggcggtagctgaggggttgaccgagagacccagttgaaggcctttacgaagtgaaagaggccgggagtcgccccctacccgcttctcgtagtcctgggagcacagcagaagtgtttttctttttttaatgaacaagtaaaccatacaaattgtcaacatgggacggagatctacatcatccaccaagagtggaaaatttatgaaccccacagaccaagcccgaaaggaagcccggaagagagaattaaagaagaacaaaaaacagcgcatgatggttcgagctgcagttttaaagatgaaggatccaaaacagataatccgagacatggagaaattggatgaaatggagtttaacccagtgcaacagccacaattaaatgagaaagtactgaaagacaagcgtaaaaagctgcgtgaaacctttgaacgtattctacgactctatgaaaaagagaatccagatatttacaaagaattgagaaagctagaagtagaatatgaacagaagagggctcaacttagccaatattttgatgctgtcaagaatgctcagcatgtggaagtggagagtattcctttgccagatatgccacatgctccttccaacattttgatccaggacattccacttcctggtgcccagccaccctctatcctaaagaaaacctcagcctatggacctccaactcgggcagtttctatccttcctcttcttggacatggtgttccacgtttgccccctggcagaaaacctcctggccctccccctggtccacctcctcctcaagtcgtgcagatgtatggccgtaaagtgggttttgccctagatcttccccctcgtaggcgagatgaagacatgttatatagtcctgaacttgcccagcgaggtcatgatgatgatgtttctagcaccagtgaagatgatggctatcctgaggacatggatcaagataagcatgatgacagtactgatgacagtgacaccgacaaatcagatggagaaagtgacggggatgaatttgtgcaccgtgataatggtgagagagacaacaatgaagaaaagaagtcaggtctgagtgtacggtttgcagatatgcctggaaaatcaaggaagaaaaagaagaacatgaaggaactgactcctcttcaagccatgatgcttcgtatggcaggtcaagaaatccctgaggagggacgggaagtagaggaattttcagaggacgatgatgaagatgattctgatgactctgaagcagaaaagcaatcacaaaagcagcataaagaggaatcccattctgatggcacatccactgcttcttcacagcagcaggctccgccgcagtctgttcgagctcctccattcctgagaccacctggaatgccaggactccgagggcccttaccccgacttttacctccaggaccaccaccaggccgaccccctggccctcccccaggtccacctccaggtctgcctcctggtccccctcctcgtggacccccaccaaggctacctccccctgcacctccaggtattcctccacctcgtcctggcatgatgcgcccacctttggtgcctccccttggacctgccccccctgggctgttcccaccagctcccttgccaaaccctggggttttaagtgccccacccaacttgattcagcgacccaaggcggatgatacaagtgcagccaccattgagaagaaagccacagcaaccatcagtgccaagccacagatcactaatcccaaggcagagattactcgatttgtgcccactgcactgagagtacgtcgggagaataaaggggctactgctgctccccaaagaaagtcagaggatgattctgctgtgcctcttgccaaagcagcacccaaatctggtccttctgttcctgtctcagtacaaactaaggatgatgtctatgaggctttcatgaaagagatggaagggctactgtgacagcttttgatgccagaaaaggcttctgttcacaacagtggcccatggagaaagaggctcttattaaacttagatgaaagagctgcttccattgtcagggtattttctaatttcagttcaaggaatatcctaaaatttagccttgttcagaatttactgcacataaaaaagggtatttcatccagaatagatcagttattgaagcagtgctgctaacatccattccctttcataccaccattttcaccctgtttcttcccctcctccagttctttggaaatttgtgatcgggggatcttagttgcttatttgttttgactcttgtgtgctgtgggcactggagtagagatttctggagaaaaaaaaacagtttatttcatcttgccttttgtgtttgagttatttttaatattttcctgtaaatattttgtaatattttacttgtaatgaaatggatcacaatgtcatttcctaatacaaggcaggatatgtgggaagaatatgtacaattatttgattaaaattatttcccactgacctaaactttcagtgatttgtgggaaaaataaataaatgttctacaccaaga

SEQ ID NO: 408334 - DNA, 2025 bp, Homo sapiens
agatatagcttactcgcctgacttgggtctcacctccaactcgggcagtttctatccttcctcttcttggacatggtgttccacgtttgccccctggcagaaaacctcctggccctccccctggtccacctcctcctcaagtcgtgcagatgtatggccgtaaagtgggttttgccctagatcttccccctcgtaggcgagatgaagacatgttatatagtcctgaacttgcccagcgaggtcatgatgatgatgtttctagcaccagtgaagatgatggctatcctgaggacatggatcaagataagcatgatgacagtactgatgacagtgacaccgacaaatcagatggagaaagtgacggggatgaatttgtgcaccgtgataatggtgagagagacaacaatgaagaaaagaagtcaggtctgagtgtacggtttgcagatatgcctggaaaatcaaggaagaaaaagaagaacatgaaggaactgactcctcttcaagccatgatgcttcgtatggcaggtcaagaaatccctgaggagggacgggaagtagaggaattttcagaggacgatgatgaagatgattctgatgactctgaagcagaaaagcaatcacaaaagcagcataaagaggaatcccattctgatggcacatccactgcttcttcacagcagcaggctccgccgcagtctgttcctccttctcagatacaagcacctcccatgccaggaccaccacctcttggaccaccacctgctccaccattacggcctcctgggccacctacaggccttcctcctggtccacctccaggagctcctccattcctgagaccacctggaatgccaggactccgagggcccttaccccgacttttacctccaggaccaccaccaggccgaccccctggccctcccccaggtccacctccaggtctgcctcctggtccccctcctcgtggacccccaccaaggctacctccccctgcacctccaggtattcctccacctcgtcctggcatgatgcgcccacctttggtgcctccccttggacctgccccccctgggctgttcccaccagctcccttgccaaaccctggggttttaagtgccccacccaacttgattcagcgacccaaggcggatgatacaagtgcagccaccattgagaagaaagccacagcaaccatcagtgccaagccacagatcactaatcccaaggcagagattactcgatttgtgcccactgcactgagagtacgtcgggagaataaaggggctactgctgctccccaaagaaagtcagaggatgattctgctgtgcctcttgccaaagcagcacccaaatctggtccttctgttcctgtctcagtacaaactaaggatgatgtctatgaggctttcatgaaagagatggaagggctactgtgacagcttttgatgccagaaaaggcttctgttcacaacagtggcccatggagaaagaggctcttattaaacttagatgaaagagctgcttccattgtcagggtattttctaatttcagttcaaggaatatcctaaaatttagccttgttcagaatttactgcacataaaaaagggtatttcatccagaatagatcagttattgaagcagtgctgctaacatccattccctttcataccaccattttcaccctgtttcttcccctcctccagttctttggaaatttgtgatcgggggatcttagttgcttatttgttttgactcttgtgtgctgtgggcactggagtagagatttctggagaaaaaaaaacagtttatttcatcttgccttttgtgtttgagttatttttaatattttcctgtaaatattttgtaatattttacttgtaatgaaatggatcacaatgtcatttcctaatacaaggcaggatatgtgggaagaatatgtacaattatttgattaaaattatttcccactgacctaaactttcagtgatttgtgggaaaaataaataaatgttctacaccaaga

SEQ ID NO: 408335 - DNA, 873 bp, Homo sapiens
  misc_feature (850)..(850): n is a, c, g, or t
agggtcaagcggcgctaagagaaggcgggacagaggaatgggaaatgacgtgaggagtgcggaggggcgcgaggtttcaagatggcggtagctgaggggttgaccgagagacccagttgaaggcctttacgaagtgaaagaggccgggagtcgccccctacccgcttctcgtagtcctgggagcacagcagaagtgtttttctttttttaatgaacaagtaaaccatacaaattgtcaacatgggacggagatctacatcatccaccaagagtggaaaatttatgaaccccacagaccaagcccgaaaggaagcccggaagagagaattaaagaagaacaaaaaacagcgcatgatggttcgagctgcagttttaaagatgaaggatccaaaacagataatccgagacatggagaaattggatgaaatggagtttaacccagtgcaacagccacaattaaatgagaaagtactgaaagacaagcgtaaaaagctgcgtgaaacctttgaacgtattctacgactctatgaaaaagagaatccagatatttacaaagaattgagaaagctagaagtagaatatgaacagaagagggctcaacttagccaatattttgatgctgtcaagaatgctcagcatgtggaagtggagagtattcctttgccagatatgccacatgctccttccaacattttgatccaggacattccacttcctggtgcccagccaccctctatcctaaagaaaacctcagcctatggacctccaactcgggcagtttctatccttcctcttcttggacatggtgttccacgtttgccccctggcagaaactcccgcctatccgctntccaatggggatcctctgagagt

SEQ ID NO: 408336 - DNA, 856 bp, Homo sapiens
caagtagctgggattacaggcgtgcaccaccacgcccagctaattttgtatttttagtagagacagggtttcatcatgttggtcatcaggctggtctcgagctcctgacctcaaatgatccacccgcctcagcctcccaaagtgctgggattacaagtgtgagccaccatgctcggcctccgtatgcatttgatgaccagggttaaaattttatttcctgcccattgacctttttgtgcaggggaaatggtatggaatataatgcatggggatcagtctcctgaccttgtccttactaatacctgcactatgcagctggaatagaaccttgggatgtgagatttgagatagtaatttgaaaccagttgatgtccctttatattttaaagtaggatgttatttagagaagaagagaacataatactgtaagtacaggaatataggctgaaggtaaatactgttttataataaaatattcctgagtttcaaatagcaaccaatatgaattcagcttattttctgtaagttgttatccatttatttaaaaattggcaaccaatatttaaatgtccttaatagtagttaaattttattagttcttacagtattcatcttgcctattttattcatttaggtattcctccacctcgtcctggcatgatgcgcccacctttggtgcctccccttggacctgccccccctgggctgttcccaccagctcccttgccaaaccctggggttttaagtgccccacccaacttgattcagcgacccaaggcggatgatacaagtgcagccaccattgagaagaaagccacagcaaccatcagtgccaagccacagatcactaatccca

SEQ ID NO: 408337 - DNA, 581 bp, Homo sapiens
agagtatgtctggtgtctagatctcttaaaaattttttagcatatatggaggtttttatcatgtaacctattgatacctaattgaagtggcctcttatatttaattccataatctactttttctcttagagtttaacccagtgcaacagccacaattaaatgagaaagtactgaaagacaagcgtaaaaagctgcgtgaaacctttgaacgtattctacgactctatgaaaaagagaatccagatatttacaaagaattgagaaagctagaagtagaatatgaacagaagagggctcaacttagccaatattttgatgctgtcaaggtaatcaaggttttttttttgagagataaactaaaatattatacagattgagtatcccttatgcaaagtgcttgggaccagaagtgttttggatttagggttgttgggttttttttatattttgttttgtttttgtgtatatttgcatatattttggggatggaaccctagtctaagcatgaaatttatgtttcatatacacatagcctgaagataattttataaattttgtgcatgaaacaaaactacgaccca

SEQ ID NO: 408338 - DNA, 2755 bp, Homo sapiens
agggtcaagcggcgctaagagaaggcgggacagaggaatgggaaatgacgtgaggagtgcggaggggcgcgaggtttcaagatggcggtagctgaggggttgaccgagagacccagttgaaggcctttacgaagtgaaagaggccgggagtcgccccctacccgcttctcgtagtcctgggagcacagcagaagtgtttttctttttttaatgaacaagtaaaccatacaaattgtcaacatgggacggagatctacatcatccaccaagagtggaaaatttatgaaccccacagaccaagcccgaaaggaagcccggaagagagaattaaagaagaacaaaaaacagcgcatgatggttcgagctgcagttttaaagatgaaggatccaaaacagataatccgagacatggagaaattggatgaaatggagtttaacccagtgcaacagccacaattaaatgagaaagtactgaaagacaagcgtaaaaagctgcgtgaaacctttgaacgtattctacgactctatgaaaaagagaatccagatatttacaaagaattgagaaagctagaagtagaatatgaacagaagagggctcaacttagccaatattttgatgctgtcaagaatgctcagcatgtggaagtggagagtattcctttgccagatatgccacatgctccttccaacattttgatccaggacattccacttcctggtgcccagccaccctctatcctaaagaaaacctcagcctatggacctccaactcgggcagtttctatccttcctcttcttggacatggtgttccacgtttgccccctggcagaaaacctcctggccctccccctggtccacctcctcctcaagtcgtgcagatgtatggccgtaaagtgggttttgccctagatcttccccctcgtaggcgagatgaagacatgttatatagtcctgaacttgcccagcgaggtcatgatgatgatgtttctagcaccagtgaagatgatggctatcctgaggacatggatcaagataagcatgatgacagtactgatgacagtgacaccgacaaatcagatggagaaagtgacggggatgaatttgtgcaccgtgataatggtgagagagacaacaatgaagaaaagaagtcaggtctgagtgtacggtttgcagatatgcctggaaaatcaaggaagaaaaagaagaacatgaaggaactgactcctcttcaagccatgatgcttcgtatggcaggtcaagaaatccctgaggagggacgggaagtagaggaattttcagaggacgatgatgaagatgattctgatgactctgaagcagaaaagcaatcacaaaagcagcataaagaggaatcccattctgatggcacatccactgcttcttcacagcagcaggctccgccgcagtctgttcctccttctcagatacaagcacctcccatgccaggaccaccacctcttggaccaccacctgctccaccattacggcctcctgggccacctacaggccttcctcctggtccacctccaggagctcctccattcctgagaccacctggaatgccaggactccgagggcccttaccccgacttttacctccaggaccaccaccaggccgaccccctggccctcccccaggtccacctccaggtctgcctcctggtccccctcctcgtggacccccaccaaggctacctccccctgcacctccaggtattcctccacctcgtcctggcatgatgcgcccacctttggtgcctccccttggacctgccccccctgggctgttcccaccagctcccttgccaaaccctggggttttaagtgccccacccaacttgattcagcgacccaaggcggatgatacaagtgcagccaccattgagaagaaagccacagcaaccatcagtgccaagccacagatcactaatcccaaggcagagattactcgatttgtgcccactgcactgagagtacgtcgggagaataaaggggctactgctgctccccaaagaaagtcagaggatgattctgctgtgcctcttgccaaagcagcacccaaatctggtccttctgttcctgtctcagtacaaactaaggatgatgtctatgaggctttcatgaaagagatggaagggctactgtgacagcttttgatgccagaaaaggcttctgttcacaacagtggcccatggagaaagaggctcttattaaacttagatgaaagagctgcttccattgtcagggtattttctaatttcagttcaaggaatatcctaaaatttagccttgttcagaatttactgcacataaaaaagggtatttcatccagaatagatcagttattgaagcagtgctgctaacatccattccctttcataccaccattttcaccctgtttcttcccctcctccagttctttggaaatttgtgatcgggggatcttagttgcttatttgttttgactcttgtgtgctgtgggcactggagtagagatttctggagaaaaaaaaacagtttatttcatcttgccttttgtgtttgagttatttttaatattttcctgtaaatattttgtaatattttacttgtaatgaaatggatcacaatgtcatttcctaatacaaggcaggatatgtgggaagaatatgtacaattatttgattaaaattatttcccactgacctaaactttcagtgatttgtgggaaaaataaataaatgttctacaccaaga

SEQ ID NO: 408339 - DNA, 2784 bp, Homo sapiens
agggtcaagcggcgctaagagaaggcgggacagaggaatgggaaatgacgtgaggagtgcggaggggcgcgaggtttcaagatggcggtagctgaggggttgaccgagagacccagttgaaggcctttacgaagtgaaagaggccgggagtcgccccctacccgcttctcgtagtcctgggagcacagcagaagtgtttttctttttttaatgaacaagtaaaccatacaaattgtcaacatgggacggagatctacatcatccaccaagagtggaaaatttatgaaccccacagaccaagcccgaaaggaagcccggaagagagaattaaagaagaacaaaaaacagcgcatgatggttcgagctgcagttttaaagatgaaggatccaaaacagataatccgagacatggagaaattggatgaaatggagtttaacccagtgcaacagccacaattaaatgagaaagtactgaaagacaagcgtaaaaagctgcgtgaaacctttgaacgtattctacgactctatgaaaaagagaatccagatatttacaaagaattgagaaagctagaagtagaatatgaacagaagagggctcaacttagccaatattttgatgctgtcaagaatgctcagcatgtggaagtggagagtattcctttgccagatatgccacatgctccttccaacattttgatccaggacattccacttcctggtgcccagccaccctctatcctaaagaaaacctcagcctatggacctccaactcgggcagtttctatccttcctcttcttggacatggtgttccacgtttgccccctggcagaaaacctcctggccctccccctggtccacctcctcctcaagtcgtgcagatgtatggccgtaaagtgggttttgccctagatcttccccctcgtaggcgagatgaagacatgttatatagtcctgaacttgcccagcgaggtcatgatgatgatgtttctagcaccagtgaagatgatggctatcctgaggacatggatcaagataagcatgatgacagtactgatgacagtgacaccgacaaatcagatggagaaagtgacggggatgaatttgtgcaccgtgataatggtgagagagacaacaatgaagaaaagaagtcaggtctgagtgtacggtttgcagatatgcctggaaaatcaaggaagaaaaagaagaacatgaaggaactgactcctcttcaagccatgatgcttcgtatggcaggtcaagaaatccctgaggagggacgggaagtagaggaattttcagaggacgatgatgaagatgattctgatgactctgaagcagaaaagcaatcacaaaagcagcataaagaggaatcccattctgatggcacatccactgcttcttcacagcagcaggctccgccgcagtctgttcctccttctcagatacaagcacctcccatgccaggaccaccacctcttggaccaccacctgctccaccattacggcctcctgggccacctacaggccttcctcctggtccacctccaggagctcctccattcctgagaccacctggaatgccaggactccgagggcccttaccccgacttttacctccaggaccaccaccaggccgaccccctggccctcccccaggtccacctccaggtctgcctcctggtccccctcctcgtggacccccaccaaggctacctccccctgcacctccaggtattcctccacctcgtcctggcatgatgcgcccacctttggtgcctccccttggacctgccccccctgggctgttcccaccagctcccttgccaaaccctggggttttaagtgccccacccaacttgattcagcgacccaaggcggatgatacaagtgcagccaccattgagaagaaagccacagcaaccatcagtgccaagccacagatcactaatcccaaggcagagattactcgatttgtgcccactgcactgagagtacgtcgggagaataaaggggctactgctgctccccaaagaaagtcagaggatgattctgctgtgcctcttgccaaagcagcacccaaatctggtccttctgttcctgtctcagtacaaactaaggatgatgtctatgaggctttcatgaaagagatggaagggctactgtgacagcttttgatgccagaaaaggcttctgttcacaacagtggcccatggagaaagaggctcttattaaacttagatgaaagagctgcttccattgtcagggtattttctaatttcagttcaaggaatatcctaaaatttagccttgttcagaatttactgcacataaaaaagggtatttcatccagaatagatcagttattgaagcagtgctgctaacatccattccctttcataccaccattttcaccctgtttcttcccctcctccagttctttggaaatttgtgatcgggggatcttagttgcttatttgttttgactcttgtgtgctgtgggcactggagtagagatttctggagaaaaaaaaacagtttatttcatcttgccttttgtgtttgagttatttttaatattttcctgtaaatattttgtaatattttacttgtaatgaaatggatcacaatgtcatttcctaatacaaggcaggatatgtgggaagaatatgtacaattatttgattaaaattatttcccactgacctaaactttcagtgatttgtgggaaaaataaataaatgttctacaccaagaaaaaaaaaaaacaacaaaaaaaaaagggg

SEQ ID NO: 408340 - DNA, 2747 bp, Homo sapiens
  misc_feature (2598)..(2598): n is a, c, g, or t
  misc_feature (2602)..(2602): n is a, c, g, or t
agggtcaagcggcgctaagagaaggcgggacagaggaatgggaaatgacgtgaggagtgcggaggggcgcgaggtttcaagatggcggtagctgaggggttgaccgagagacccagttgaaggcctttacgaagtgaaagaggccgggagtcgccccctacccgcttctcgtagtcctgggagcacagcagaagtgtttttctttttttaatgaacaagtaaaccatacaaattgtcaacatgggacggagatctacatcatccaccaagagtggaaaatttatgaaccccacagaccaagcccgaaaggaagcccggaagagagaattaaagaagaacaaaaaacagcgcatgatggttcgagctgcagttttaaagatgaaggatccaaaacagataatccgagacatggagaaattggatgaaatggagtttaacccagtgcaacagccacaattaaatgagaaagtactgaaagacaagcgtaaaaagctgcgtgaaacctttgaacgtattctacgactctatgaaaaagagaatccagatatttacaaagaattgagaaagctagaagtagaatatgaacagaagagggctcaacttagccaatattttgatgctgtcaagaatgctcagcatgtggaagtggagagtattcctttgccagatatgccacatgctccttccaacattttgatccaggacattccacttcctggtgcccagccaccctctatcctaaagaaaacctcagcctatggacctccaactcgggcagtttctatccttcctcttcttggacatggtgttccacgtttgccccctggcagaaaacctcctggccctccccctggtccacctcctcctcaagtcgtgcagatgtatggccgtaaagtgggttttgccctagatcttccccctcgtaggcgagatgaagacatgttatatagtcctgaacttgcccagcgaggtcatgatgatgatgtttctagcaccagtgaagatgatggctatcctgaggacatggatcaagataagcatgatgacagtactgatgacagtgacaccgacaaatcagatggagaaagtgacggggatgaatttgtgcaccgtgataatggtgagagagacaacaatgaagaaaagaagtcaggtctgagtgtacggtttgcagatatgcctggaaaatcaaggaagaaaaagaagaacatgaaggaactgactcctcttcaagccatgatgcttcgtatggcaggtcaagaaatccctgaggagggacgggaagtagaggaattttcagaggacgatgatgaagatgattctgatgactctgaagcagaaaagcaatcacaaaagcagcataaagaggaatcccattctgatggcacatccactgcttcttcacagcagcaggctccgccgcagtctgttcctccttctcagatacaagcacctcccatgccaggaccaccacctcttggaccaccacctgctccaccattacggcctcctgggccacctacaggccttcctcctggtccacctccaggagctcctccattcctgagaccacctggaatgccaggactccgagggcccttaccccgacttttacctccaggaccaccaccaggccgaccccctggccctcccccaggtccacctccaggtctgcctcctggtccccctcctcgtggacccccaccaaggctacctccccctgcacctccaggtattcctccacctcgtcctggcatgatgcgcccacctttggtgcctccccttggacctgccccccctgggctgttcccaccagctcccttgccaaaccctggggttttaagtgccccacccaacttgattcagcgacccaaggcggatgatacaagtgcagccaccattgagaagaaagccacagcaaccatcagtgccaagccacagatcactaatcccaaggcagagattactcgatttgtgcccactgcactgagagtacgtcgggagaataaaggggctactgctgctccccaaagaaagtcagaggatgattctgctgtgcctcttgccaaagcagcacccaaatctggtccttctgttcctgtctcagtacaaactaaggatgatgtctatgaggctttcatgaaagagatggaagggctactgtgacagcttttgatgccagaaaaggcttctgttcacaacagtggcccatggagaaagaggctcttattaaacttagatgaaagagctgcttccattgtcagggtattttctaatttcagttcaaggaatatcctaaaatttagccttgttcagaatttactgcacataaaaaagggtatttcatccagaatagatcagttattgaagcagtgctgctaacatccattccctttcataccaccattttcaccctgtttcttcccctcctccagttctttggaaatttgtgatcgggggatcttagttgcttatttgttttgactcttgtgtgctgtgggcactggagtagagatttctggagaaaaaaaaacagtttatttcatcttgccttttgtgtttgagttatttttaatattttcctgtaaatatttgganattncctggttgaactgggtccagtcttcctattaaagcggaagtgggagaatttcactctgtaattttccggcgacatcggtggggaaaaaatgttgcccaaaaaaggggggctaaatccagggaacagacctttaaggaaggttaag

SEQ ID NO: 408341 - DNA, 2697 bp, Homo sapiens
agggtcaagcggcgctaagagaaggcgggacagaggaatgggaaatgacgtgaggagtgcggaggggcgcgaggtttcaagatggcggtagctgaggggttgaccgagagacccagttgaaggcctttacgaagtgaaagaggccgggagtcgccccctacccgcttctcgtagtcctgggagcacagcagaagtgtttttctttttttaatgaacaagtaaaccatacaaattgtcaacatgggacggagatctacatcatccaccaagagtggaaaatttatgaaccccacagaccaagcccgaaaggaagcccggaagagagaattaaagaagaacaaaaaacagcgcatgatggttcgagctgcagttttaaagatgaaggatccaaaacagataatccgagacatggagaaattggatgaaatggagtttaacccagtgcaacagccacaattaaatgagaaagtactgaaagacaagcgtaaaaagctgcgtgaaacctttgaacgtattctacgactctatgaaaaagagaatccagatatttacaaagaattgagaaagctagaagtagaatatgaacagaagagggctcaacttagccaatattttgatgctgtcaagaatgctcagcatgtggaagtggagagtattcctttgccagatatgccacatgctccttccaacattttgatccaggacattccacttcctggtgcccagccaccctctatcctaaagaaaacctcagcctatggacctccaactcgggcagtttctatccttcctcttcttggacatggtgttccacgtttgccccctggcagaaaacctcctggccctccccctggtccacctcctcctcaagtcgtgcagatgtatggccgtaaagtgggttttgccctagatcttccccctcgtaggcgagatgaagacatgttatatagtcctgaacttgcccagcgaggtcatgatgatgatgtttctagcaccagtgaagatgatggctatcctgaggacatggatcaagataagcatgatgacagtactgatgacagtgacaccgacaaatcagatggagaaagtgacggggatgaatttgtgcaccgtgataatggtgagagagacaacaatgaagaaaagaagtcaggtctgagtgtacggtttgcagatatgcctggaaaatcaaggaagaaaaagaagaacatgaaggaactgactcctcttcaagccatgatgcttcgtatggcaggtcaagaaatccctgaggagggacgggaagtagaggaattttcagaggacgatgatgaagatgattctgatgactctgaagcagaaaagcaatcacaaaagcagcataaagaggaatcccattctgatggcacatccactgcttcttcacagcagcaggctccgccgcagtctgttcctccttctcagatacaagcacctcccatgccaggaccaccacctcttggaccaccacctgctccaccattacggcctcctgggccacctacaggccttcctcctggtccacctccaggagctcctccattcctgagaccacctggaatgccaggactccgagggcccttaccccgacttttacctccaggaccaccaccaggccgaccccctggccctcccccaggtccacctccaggtctgcctcctggtccccctcctcgtggacccccaccaaggctacctccccctgcacctccaggtattcctccacctcgtcctggcatgatgcgcccacctttggtgcctccccttggacctgccccccctgggctgttcccaccagctcccttgccaaaccctggggttttaagtgccccacccaacttgattcagcgacccaaggcggatgatacaagtgcagccaccattgagaagaaagccacagcaaccatcagtgccaagccacagatcactaatcccaaggcagagattactcgatttgtgcccactgcactgagagtacgtcgggagaataaaggggctactgctgctccccaaagaaagtcagaggatgattctgctgtgcctcttgccaaagcagcacccaaatctggtccttctgttcctgtctcagtacaaactaaggatgatgtctatgaggctttcatgaaagagatggaagggctactgtgacagcttttgatgccagaaaaggcttctgttcacaacagtggcccatggagaaagaggctcttattaaacttagatgaaagagctgcttccattgtcagggtattttctaatttcagttcaaggaatatctagatcagttattgaagcagtgctgctaacatccattccctttcataccaccattttcaccctgtttcttcccctcctccagttctttggaaatttgtgatcgggggatcttagttgcttatttgttttgactcttgtgtgctgtgggcactggagtagagatttctggagaaaaaaaaacagtttatttcatcttgccttttgtgtttgagttatttttaatattttcctgtaaatattttgtaatattttacttgtaatgaaatggatcacaatgtcatttcctaatacaaggcaggatatgtgggaagaatatgtacaattatttgattaaaattatttcccactgacctaaactttcagtgatttgtgggaaaaataaataaatgttctacaccaaga

SEQ ID NO: 408342 - DNA, 1756 bp, Homo sapiens
agggtcaagcggcgctaagagaaggcgggacagaggaatgggaaatgacgtgaggagtgcggaggggcgcgaggtttcaagatggcggtagctgaggggttgaccgagagacccagttgaaggcctttacgaagtgaaagaggccgggagtcgccccctacccgcttctcgtagtcctgggagcacagcagaagtgtttttctttttttaatgaacaagtaaaccatacaaattgtcaacatgggacggagatctacatcatccaccaagagtggaaaatttatgaaccccacagaccaagcccgaaaggaagcccggaagagagaattaaagaagaacaaaaaacagcgcatgatggttcgagctgcagttttaaagatgaaggatccaaaacagataatccgagacatggagaaattggatgaaatggagtttaacccagtgcaacagccacaattaaatgagaaagtactgaaagacaagcgtaaaaagctgcgtgaaacctttgaacgtattctacgactctatgaaaaagagaatccagatatttacaaagaattgagaaagctagaagtagaatatgaacagaagagggctcaacttagccaatattttgatgctgtcaagaatgctcagcatgtggaagtggagagtattcctttgccagatatgccacatgctccttccaacattttgatccaggacattccacttcctggtgcccagccaccctctatcctaaagaaaacctcagcctatggacctccaactcgggcagtttctatccttcctcttcttggacatggtgttccacgtttgccccctggcagaaaacctcctggccctccccctggtccacctcctcctcaagtcgtgcagatgtatggccgtaaagtgggttttgccctagatcttccccctcgtaggcgagatgaagacatgttatatagtcctgaacttgcccagcgaggtcatgatgatgatgtttctagcaccagtgaagatgatggctatcctgaggacatggatcaagataagcatgatgacagtactgatgacagtgacaccgacaaatcagatggagaaagtgacggggatgaatttgtgcaccgtgataatggtgagagagacaacaatgaagaaaagaagtcaggtatgtgcagatgaaggattcatggtattgatcaataaagagaaaacaagctgaaggtcctaatttattaatgaatctgtgagagtactctgaaatctttggaagtcgggatcatagctgtgttcatcttatatattaaaattttgaaagtttttgacacagtaagtactcagtggatgtttatgaggaaaagcattaaactgtatgtaataaaaatgtctatgtaataaagttcactttggggtaaaaggtataactattcaacagcataaacgtattatgggtatgttacaggaaagaaaggagagtagccatattaagaaaaacattgatgttgtattttataaatctgtttaaatatctacctttgaagcccttttatggtatcttacatgaaccaggatcataattataacccaggtacactcatgagtggaatcatgaaacatattatatctataatgtgtgtgtttgattattaaaaaattcaaataggacatttgtcaagaaaattttaagcatcataatgggtactgacagtggaaaatgcacaccaattctgtcaaacctcagcaattttggagcttcttttgggattgttta

SEQ ID NO: 408343 - DNA, 591 bp, Homo sapiens
aggttaatcctcattagtatcctcaatatactaacagaatagaggttctaagacatgaagtgatcttttcaaggtcacacatcaagtggttagaccacaaccaaaacccagatcaactgactgcaaacttggtgttcttgaagtaagactgatccgaaatattcagcagtcttgccagcttaccagtggactgaggacctgagaatcaactgagtctttgtcctgggatagttgagggagcagggagagaaagactggagtagatttgcttttagaagcatctctgctttaagaactaggccagggatggtggctcacgtccataatcccaggactttgggaggccaaggaaggaggattgcttgagctcaggagtttgagaccagcctgggcaatatagcgagacttcatttctacaaaaaaaaaaatcagctgggcatggtgacacaagcctatagtcttaactactcggaggccaagacagggggatggcttgagcccaggaggttgaggtcacagtgagctgtgattgcaccacttgtaactccagcctgggcaacagagtgagaccctatctctttagaaaaaaaa

SEQ ID NO: 408344 - DNA, 896 bp, Homo sapiens
atgacccggctgacagtcctggccctgctggctggtctgctggcgtcctcgagggccggctccagcccccttttggacatcgttggcggccggaaggcgaggccccgccagttcccgttcctggcctccattcagaatcaaggcaggcacttctgcgggggtgccctgatccatgcccgcttcgtgatgaccgcggccagctgcttccaaagccagaaccccggggttagcaccgtggtgctgggtgcctatgacctgaggcggcgggagaggcagtcccgccagacgttttccatcagcagcatgagcgagaatggctacgacccccagcagaacctgaacgacctgatgctgcttcagctggaccgtgaggccaacctcaccagcagcgtgacgatactgccactgcctctgcagaacgccacggtggaagccggcaccagatgccaggtggccggctgggggagccagcgcagtggggggcgtctctcccgttttcccaggttcgtcaacgtgactgtgacccccgaggaccagtgtcgccccaacaacgtgtgcaccggtgtgctcacccgccgcggtggcatctgcaatggggacgggggcacccccctcgtctgcgagggcctggcccacggcgtggcctccttttccctggggccctgtggccgaggccctgacttcttcacccgagtggcgctcttccgagactggatcgatggtgttctcaacaacccgggaccggggccagcctaggggggcctgtgacctcccatggagcccagccccgccctccacacctccggcgctccgcacccacctcccacggccccgcccctgcccccgctccggccagaggggccctggctgtaataaagaagccgatctctcctctg

SEQ ID NO: 408345 - DNA, 1177 bp, Homo sapiens
atgacccggctgacagtcctggccctgctggctggtctgctggcgtcctcgagggccggctccagcccccttttggacatcgttggcggccggaaggcgaggccccgccagttcccgttcctggcctccattcagaatcaaggcaggcacttctgcgggggtgccctgatccatgcccgcttcgtgatgaccgcggccagctgcttccaaagccagaaccccggggttagcaccgtggtgctgggtgcctatgacctgaggcggcgggagaggcagtcccgccagacgttttccatcagcagcatgagcgagaatggctacgacccccagcagaacctgaacgacctgatgctgcttcagctggaccgtgaggccaacctcaccagcagcgtgacgatactgccactgcctctgcagaacgccacggtggaagccggcaccagatgccaggtggccggctgggggagccagcgcagtggggggcgtctctcccgttttcccaggttcgtcaacgtgactgtgacccccgaggaccagtgtcgccccaacaacgtgtgcaccggtgtgctcacccgccgcggtggcatctgcaatgtgagtgctccctgtggcgggaggaggggtcctgagaggtactgagctctccgtggcaggagaaagcaagtgcagcctggaggtgccaggaagctccagaaagcaactgatcccaaagtccactagcagttaaccagggcagagaaagagaagagccatgcaaaggccctggggctggatcaggacttgtaggttccaggggcagcaagaggcctctgcagttctggggtggcgtgggagccaggccctgggacgccctgacacagctgctgcctgcccagggggacgggggcacccccctcgtctgcgagggcctggcccacggcgtggcctccttttccctggggccctgtggccgaggccctgacttcttcacccgagtggcgctcttccgagactggatcgatggtgttctcaacaacccgggaccggggccagcctaggggggcctgtgacctcccatggagcccagccccgccctccacacctccggcgctccgcacccacctcccacggccccgcccctgcccccgctccggccagaggggccctggctgtaataaagaagccgatctctcctctg

SEQ ID NO: 408346 - DNA, 817 bp, Homo sapiens
ggcagaggggaaatggggcctggcccacgggagagctgaggcccacgtttggccaggacagggtggatggaggctggggcctccgcagggaagatggacaggctccagcccccttttggacatcgttggcggccggaaggcgaggccccgccagttcccgttcctggcctccattcagaatcaaggcaggcacttctgcgggggtgccctgatccatgcccgcttcgtgatgaccgcggccagctgcttccaaagccagaaccccggggttagcaccgtggtgctgggtgcctatgacctgaggcggcgggagaggcagtcccgccagacgttttccatcagcagcatgagcgagaatggctacgacccccagcagaacctgaacgacctgatgctgcttcagctggaccgtgaggccaacctcaccagcagcgtgacgatactgccactgcctctgcagaacgccacggtggaagccggcaccagatgccaggtggccggctgggggagccagcgcagtggggggcgtctctcccgttttcccaggttcgtcaacgtgactgtgacccccgaggaccagtgtcgccccaacaacgtgtgcaccggtgtgctcacccgccgcggtggcatctgcaatgtgagtgctccctgtggcgggaggaggggtcctgagaggtactgagctctccgtggcaggagaaagcaagtgcaggctgagggcggcacagcaggggggccccaggattgagcattttcacggtaggagaaacagtatctttttttttttttttgagacagagtctcgctctgtcgccca

SEQ ID NO: 408347 - DNA, 623 bp, Homo sapiens
aggttacacagccagttaggggcagagatgaggattgacacccagtgacttccagtttctttctcatttcactgtactcaactaaattacatgaacaaaggcacaggcaggattaagctaccattttatattagatggtataaaaacaatcaactagcctggggtcaattgaattaagtctgtcagtctgtttctacaaaagttgcagaaggatgggcttcagtttgtctcttcaaagtgaactaatattttgatttttctggttgaaatatgctacaactcaccgaagtagctttctcagttgaaggtaagctccttaaaaaatgttcctattcttgggccgggtgtggtggcccccgcctgtaatcccagcactttgggaggccattgagggcagatagcttgagtccaggattttgagaacagcctgagcaacaatggcaaaaccccgtctctacaaaaaatggaaaaaaactagccaggcatggtgatgcacatctgtgttcccagctactcgggaggctgaggtgggaggatcttttgagtccgggaggcagaggttgcagtgagctgagatcatgccactgcactctggcccgtgtgacaaagtgagaccttgtctc

SEQ ID NO: 408348 - DNA, 372 bp, Homo sapiens
aatatacttaaaactgaaaatcaaaggatcaataaaaacaataggatatttttaagtacatgaaacagattatgcaaacacacatgaaaaatgcacacttctttttttcgggtgtggaacattaacataattagacatgaattttccttcatccaattgacagttgttcacgggattggaagaatgtggagatacagataccctcatctactctgggaaagggagtaagatatccttaagacaaatttagtaaaaactgcaagaaattaatggagcaattttacttctacatatctatttatcctacatatctatttacatgtgttgatagcagtaatgctgattacagtattgtttgaaagaaaatctcac

SEQ ID NO: 408349 - DNA, 486 bp, Homo sapiens
tgaattttaattatgaggctgaggttatgtttatctctttgataatgaaaaatcattatttccgggcagtagttcatatttcagctttcaaggctagaattacaatgcagtatgattcacctaatctatgaagtaaagataacagagagaaaacaggctcctgttgtcctggcagtatctgagagagtaacttctcagttataggagcgtctggttcctagataagacattctcttcgtgagcacttacactatgtgagacattgttctaggcacttttcatatattcttatctaacattcattgcatctcctataaagtacatggcatcattctgttctttcagaggttaaatgacttaagttcacatagctataagtagacgctgaatttgaaagcaaatttatctaatttaaaaaccaatgctatttatcactttgctgttactgtttttaaagccagaatttccaaagctttttagctgcag

SEQ ID NO: 408350 - DNA, 764 bp, Homo sapiens
cggcttagcccagagcctggcctcctctgtaagagtggaaaacctgggttccttctgccctcatcttattagtagctgtgatgggcacacactcagccaagcactgagatgttgtgaacacaaagatgtttgaggagctcaagagccgtctggacaccctggcccaggaggtggccctgctgaaggagcagcaggccctgcagacggtctgcctgaaggggaccaaggtgcacatgaaatgctttctggccttcacccagacgaagaccttccacgaggccagcgaggactgcatctcgcgcgggggcaccctgagcacccctcagactggctcggagaacgacgccctgtatgagtacctgcgccagagcgtgggcaacgaggccgagatctggctgggcctcaacgacatggcggccgagggcacctgggtggacatgaccggcgcccgcatcgcctacaagaactgggagactgagatcaccgcgcaacccgatggcggcaagaccgagaactgcgcggtcctgtcaggcgcggccaacggcaagtggttcgacaagcgctgccgcgatcagctgccctacatctgccagttcgggatcgtgtagccggcggggcgggggccgtggggggcctggaggagggcaggagccgcgggaggccgggaggagggtggggaccttgcagcccccatcctctccgtgcgcttggagcctctttttgcaaataaagttggtgcagcttcgcggagaaaaaaacacaag

SEQ ID NO: 408351 - DNA, 286 bp, Homo sapiens
ctcccttcctcagttttttcctcctttacaacctcctccaagccgaagctcaagaagcgcttttccctgcgttcagtgggtcgctctgtccgaggctcagtccgtggcatcctgcagtggcgggggaccgttgaccctccctcctccgctgggcccctggaggagggcaggagccgcgggaggccgggaggagggtggggaccttgcagcccccatcctctccgtgcgcttggagcctctttttgcaaataaagttggtgcagcttcgcggagaaaaaaacacaag

SEQ ID NO: 408352 - DNA, 782 bp, Homo sapiens
gcatggcgtccgtgacgctgagcgaggcggagaaggtgtacatcgtgcatggcgtccagttcagccagtgctacccctgaatttgaaggtagaggaggtgatgaccttggcaccgagatcgctaacaccctctatcggatatttaacaataaaagcagtgtcgacttaaagaccctctgcattagtcctcgggagcactgctgggttctctatgtggatgtgctgtctgcctgaaggggaccaaggtgcacatgaaatgctttctggccttcacccagacgaagaccttccacgaggccagcgaggactgcatctcgcgcgggggcaccctgagcacccctcagactggctcggagaacgacgccctgtatgagtacctgcgccagagcgtgggcaacgaggccgagatctggctgggcctcaacgacatggcggccgagggcacctgggtggacatgaccggcgcccgcatcgcctacaagaactgggagactgagatcaccgcgcaacccgatggcggcaagaccgagaactgcgcggtcctgtcaggcgcggccaacggcaagtggttcgacaagcgctgccgcgatcagctgccctacatctgccagttcgggatcgtgtagccggcggggcgggggccgtggggggcctggaggagggcaggagccgcgggaggccgggaggagggtggggaccttgcagcccccatcctctccgtgcgcttggagcctctttttgcaaataaagttggtgcagcttcgcggagaaaaaaacacaag

SEQ ID NO: 408353 - DNA, 840 bp, Homo sapiens
atccttctgcaggcttgtgtgtttgttttatttttttggcacgcctgcagccaagttggggagggtttcctggacagaggtcctttggctgctgccttaagacgtgcagcctgggccgtggctgctcactgcgttcggacccagacccgctgcaggcagcagcagcccccgcccgcgcagcagcatggagctctggggggcctacctcctcctctgcctcttctccctcctgacccaggtcaccaccgagccaccaacccagaagcccaagaagattgtaaatgccaagaaagatgttgtgaacacaaagatgtttgaggagctcaagagccgtctggacaccctggcccaggaggtggccctgctgaaggagcagcaggccctgcagacggtctgcctgaaggggaccaaggtgcacatgaaatgctttctggccttcacccagacgaagaccttccacgaggccagcgaggactgcatctcgcgcgggggcaccctgagcacccctcagactggctcggagaacgacgccctgtatgagtacctgcgccagagcgtgggcaacgaggccgagatctggctgggcctcaacgacatggcggccgagggcacctgggtggacatgaccggcgcccgcatcgcctacaagaactgggagactgagatcaccgcgcaacccgatggcggcaagaccgagaactgcgcggtcctgtcaggcgcggccaacggcaagtggttcgacaagcgctgccgcgatcagctgccctacaattgtcttttcggggattcgtgtttaaccgggtatttattatatctttcttcaatttttttattatttta

SEQ ID NO: 408354 - DNA, 949 bp, Homo sapiens
atccttctgcaggcttgtgtgtttgttttatttttttggcacgcctgcagccaagttggggagggtttcctggacagaggtcctttggctgctgccttaagacgtgcagcctgggccgtggctgctcactgcgttcggacccagacccgctgcaggcagcagcagcccccgcccgcgcagcagcatggagctctggggggcctacctcctcctctgcctcttctccctcctgacccaggtcaccaccgagccaccaacccagaagcccaagaagattgtaaatgccaagaaagatgttgtgaacacaaagatgtttgaggagctcaagagccgtctggacaccctggcccaggaggtggccctgctgaaggagcagcaggccctgcagacggtctgcctgaaggggaccaaggtgcacatgaaatgctttctggccttcacccagacgaagaccttccacgaggccagcgaggactgcatctcgcgcgggggcaccctgagcacccctcagactggctcggagaacgacgccctgtatgagtacctgcgccagagcgtgggcaacgaggccgagatctggctgggcctcaacgacatggcggccgagggcacctgggtggacatgaccggcgcccgcatcgcctacaagaactgggagactgagatcaccgcgcaacccgatggcggcaagaccgagaactgcgcggtcctgtcaggcgcggccaacggcaagtggttcgacaagcgctgccgcgatcagctgccctacatctgccagttcgggatcgtgtagccggcggggcgggggccgtggggggcctggaggagggcaggagccgcgggaggccgggaggagggtggggaccttgcagcccccatcctctccgtgcgcttggagcctctttttgcaaataaagttggtgcagcttcgcggagaaaaaaacacaag

SEQ ID NO: 408355 - DNA, 850 bp, Homo sapiens
atccttctgcaggcttgtgtgtttgttttatttttttggcacgcctgcagccaagttggggagggtttcctggacagaggtcctttggctgctgccttaagacgtgcagcctgggccgtggctgctcactgcgttcggacccagacccgctgcaggcagcagcagcccccgcccgcgcagcagcatggagctctggggggcctacctcctcctctgcctcttctccctcctgacccaggtcaccaccgagccaccaacccagaagcccaagaagattgtaaatgccaagaaagtctgcctgaaggggaccaaggtgcacatgaaatgctttctggccttcacccagacgaagaccttccacgaggccagcgaggactgcatctcgcgcgggggcaccctgagcacccctcagactggctcggagaacgacgccctgtatgagtacctgcgccagagcgtgggcaacgaggccgagatctggctgggcctcaacgacatggcggccgagggcacctgggtggacatgaccggcgcccgcatcgcctacaagaactgggagactgagatcaccgcgcaacccgatggcggcaagaccgagaactgcgcggtcctgtcaggcgcggccaacggcaagtggttcgacaagcgctgccgcgatcagctgccctacatctgccagttcgggatcgtgtagccggcggggcgggggccgtggggggcctggaggagggcaggagccgcgggaggccgggaggagggtggggaccttgcagcccccatcctctccgtgcgcttggagcctctttttgcaaataaagttggtgcagcttcgcggagaaaaaaacacaag

SEQ ID NO: 408356 - DNA, 747 bp, Homo sapiens
agcagggtgggagatgcctgaaattgtaggctctcagcaaatatttgttgctttctcctcccccctccccatcccctccagtttgttgaaagtgatgcagatgaagagcttctgtttaatattccgtaagtatctccttggtgcctacctcaggctaaataggctgtacccagttgcctcagatggattcattcactggtgtcaagagcacacatttgcttctagaaatgggataaattactttggtgggtttgaggaggaaagcatcatagctttcttggtgcagactggaaacagatgtatttgtagaacaataactgagaaattgaggtagatttcttagaattgtagaatgctagaggtagacaggatcttagaaattatctagtacaagttgacagatgagtaaactgaagcccatacaggggaagggtcttgcccagggtcacacaactaaacaggtattcaaactcaggtttgacaaccttctcttttgcattctggcagatttacgggcaatgtcaagctcaaaggcatcattataatgggagaggatgatgactcacacccctctgagatgagactgtacaagaatattccacagatgtcctttgatgatacagaaagggagccagatcagacctttagtctgaaccgggatcttacaggagaattagagtatgctacaaaaatttctcggtgttctgtctatcatctctcttcatatttcacttcggagcagatcgc

SEQ ID NO: 408357 - DNA, 1576 bp, Homo sapiens
agcggcgctttttacgacgcggcaggcgcggcgcgcttagttgccggagctgaacggcgcggagctggtctgaggcgagccgagccgagcgagcgcggcggtggggccgagaggacgcgcaggtggcggcgttgccatgtcgcacggtcacagccacggcgggggtggctgccgctgcgccgccgaacgggaggagccgcccgagcagcgcggcctggcctacggcctgtacctgcgcatcgacctggagcggctgcaatgccttaacgagagccgcgagggcagcggccgcggcgtcttcaagccgtgggaggagcggaccgaccgctccaagtttgttgaaagtgatgcagatgaagagcttctgtttaatattccatttacgggcaatgtcaagctcaaaggcatcattataatgggagaggatgatgactcacacccctctgagatgagactgtacaagaatattccacagatgtcctttgatgatacagaaagggagccagatcagacctttagtctgaaccgggatcttacaggagaattagagtatgctacaaaaatttctcgtttttcaaatgtctatcatctctcaattcatatttcaaaaaacttcggagcagatacgacaaaggtcttttatattggcctgagaggagagtggactgagcttcgccgacacgaggtgaccatctgcaattacgaagcatctgccaacccagcagaccatagggtccatcaggttaccccacagacacactatgtacgactacctgttgggaaggacaaagggatgaggctccagagagagttggctgccacagcctctgccaagctttgtctttggggcttgctgcagaaacctggcctacggaagatacgacaccactgggagggttgtgtaggtgccaggggaccatcgtggttctctagggcgctgtggaaattgggtcttgggctgggtggcatctggcagtcatggataacacttgcttttccagttaatgtggccatgtgattccaagtgtcatgttgctttgtggcaagattgttgtgtgacttgtttttttgtttttgtttttgtttttttaaaggaaactatttgtgggctataggaaactttctgatgcctccggattgtgttagtagtagccatcaggagggtctccaactaaaacacttgttcctgcttgctcctttcccctctcattgttcagcattcttgtcaagttgcccagcttggagttgtctgtcacgcacatgtgtcctgtggttatagctagaaggacaggagtctcctgctgatgcgtgatagcttaagcttggggagaaggtcttttccactgcctagctaagcagtctggggagagcatggggatcatttctatgtgtgtgggtaatctggtcagtaagattgagacttagttaagattccccttggaaattccttaatgtttattagcttctaactagtgttgtaagtccgatgccagaatttggagatttgagttcttcttttcatggcttttattcactgtgactaataagcttcctaataaatccttgccagacttaa

SEQ ID NO: 408358 - DNA, 1584 bp, Homo sapiens
agcggcgctttttacgacgcggcaggcgcggcgcgcttagttgccggagctgaacggcgcggagctggtctgaggcgagccgagccgagcgagcgcggcggtggggccgagaggacgcgcaggtggcggcgttgccatgtcgcacggtcacagccacggcgggggtggctgccgctgcgccgccgaacgggaggagccgcccgagcagcgcggcctggcctacggcctgtacctgcgcatcgacctggagcggctgcaatgccttaacgagagccgcgagggcagcggccgcggcgtcttcaagccgtgggaggagcggaccgaccgctccaagatttacgggcaatgtcaagctcaaaggcatcattataatgggagaggatgatgactcacacccctctgagatgagactgtacaagaatattccacagatgtcctttgatgatacagaaagggagccagatcagacctttagtctgaaccgggatcttacaggagaattagagtatgctacaaaaatttctcgtttttcaaatgtctatcatctctcaattcatatttcaaaaaacttcggagcagatacgacaaaggtcttttatattggcctgagaggagagtggactgagcttcgccgacacgaggtgaccatctgcaattacgaagcatctgccaacccagcagaccatagggtccatcaggttaccccacagacacactttatttcctaagggctggccaaggctcccatagaggcgctgtgtcagtgaagatgtacgactacctgttgggaaggacaaagggatgaggctccagagagagttggctgccacagcctctgccaagctttgtctttggggcttgctgcagaaacctggcctacggaagatacgacaccactgggagggttgtgtaggtgccaggggaccatcgtggttctctagggcgctgtggaaattgggtcttgggctgggtggcatctggcagtcatggataacacttgcttttccagttaatgtggccatgtgattccaagtgtcatgttgctttgtggcaagattgttgtgtgacttgtttttttgtttttgtttttgtttttttaaaggaaactatttgtgggctataggaaactttctgatgcctccggattgtgttagtagtagccatcaggagggtctccaactaaaacacttgttcctgcttgctcctttcccctctcattgttcagcattcttgtcaagttgcccagcttggagttgtctgtcacgcacatgtgtcctgtggttatagctagaaggacaggagtctcctgctgatgcgtgatagcttaagcttggggagaaggtcttttccactgcctagctaagcagtctggggagagcatggggatcatttctatgtgtgtgggtaatctggtcagtaagattgagacttagttaagattccccttggaaattccttaatgtttattagcttctaactagtgttgtaagtccgatgccagaatttggagatttgagttcttcttttcatggcttttattcactgtgactaataagcttcctaataaatccttgccagacttaa

SEQ ID NO: 408359 - DNA, 1568 bp, Homo sapiens
agcggcgctttttacgacgcggcaggcgcggcgcgcttagttgccggagctgaacggcgcggagctggtctgaggcgagccgagccgagcgagcgcggcggtggggccgagaggacgcgcaggtggcggcgttgccatgtcgcacggtcacagccacggcgggggtggctgccgctgcgccgccgaacgggaggagccgcccgagcagcgcggcctggcctacggcctgtacctgcgcatcgacctggagcggctgcaatgccttaacgagagccgcgagggcagcggccgcggcgtcttcaagccgtgggaggagcggaccgaccgctccaagtttgttgaaagtgatgcagatgaagagcttctgtttaatattccatttacgggcaatgtcaagctcaaaggcatcattataatgggagaggatgatgaagaaagggagccagatcagacctttagtctgaaccgggatcttacaggagaattagagtatgctacaaaaatttctcgtttttcaaatgtctatcatctctcaattcatatttcaaaaaacttcggagcagatacgacaaaggtcttttatattggcctgagaggagagtggactgagcttcgccgacacgaggtgaccatctgcaattacgaagcatctgccaacccagcagaccatagggtccatcaggttaccccacagacacactttatttcctaagggctggccaaggctcccatagaggcgctgtgtcagtgaagatgtacgactacctgttgggaaggacaaagggatgaggctccagagagagttggctgccacagcctctgccaagctttgtctttggggcttgctgcagaaacctggcctacggaagatacgacaccactgggagggttgtgtaggtgccaggggaccatcgtggttctctagggcgctgtggaaattgggtcttgggctgggtggcatctggcagtcatggataacacttgcttttccagttaatgtggccatgtgattccaagtgtcatgttgctttgtggcaagattgttgtgtgacttgtttttttgtttttgtttttgtttttttaaaggaaactatttgtgggctataggaaactttctgatgcctccggattgtgttagtagtagccatcaggagggtctccaactaaaacacttgttcctgcttgctcctttcccctctcattgttcagcattcttgtcaagttgcccagcttggagttgtctgtcacgcacatgtgtcctgtggttatagctagaaggacaggagtctcctgctgatgcgtgatagcttaagcttggggagaaggtcttttccactgcctagctaagcagtctggggagagcatggggatcatttctatgtgtgtgggtaatctggtcagtaagattgagacttagttaagattccccttggaaattccttaatgtttattagcttctaactagtgttgtaagtccgatgccagaatttggagatttgagttcttcttttcatggcttttattcactgtgactaataagcttcctaataaatccttgccagacttaa

SEQ ID NO: 408360 - DNA, 1292 bp, Homo sapiens
tggattaaagatatttgtaggctagacgcggtggctcatgcctgtaattccagcactttcggagaccgacgtaggcggatcacctgaggttgggagttagagaccagcattgccaacatggtacaagaatattccacagatgtcctttgatgatacagaaagggagccagatcagacctttagtctgaaccgggatcttacaggagaattagagtatgctacaaaaatttctcgtttttcaaatgtctatcatctctcaattcatatttcaaaaaacttcggagcagatacgacaaaggtcttttatattggcctgagaggagagtggactgagcttcgccgacacgaggtgaccatctgcaattacgaagcatctgccaacccagcagaccatagggtccatcaggttaccccacagacacactttatttcctaagggctggccaaggctcccatagaggcgctgtgtcagtgaagatgtacgactacctgttgggaaggacaaagggatgaggctccagagagagttggctgccacagcctctgccaagctttgtctttggggcttgctgcagaaacctggcctacggaagatacgacaccactgggagggttgtgtaggtgccaggggaccatcgtggttctctagggcgctgtggaaattgggtcttgggctgggtggcatctggcagtcatggataacacttgcttttccagttaatgtggccatgtgattccaagtgtcatgttgctttgtggcaagattgttgtgtgacttgtttttttgtttttgtttttgtttttttaaaggaaactatttgtgggctataggaaactttctgatgcctccggattgtgttagtagtagccatcaggagggtctccaactaaaacacttgttcctgcttgctcctttcccctctcattgttcagcattcttgtcaagttgcccagcttggagttgtctgtcacgcacatgtgtcctgtggttatagctagaaggacaggagtctcctgctgatgcgtgatagcttaagcttggggagaaggtcttttccactgcctagctaagcagtctggggagagcatggggatcatttctatgtgtgtgggtaatctggtcagtaagattgagacttagttaagattccccttggaaattccttaatgtttattagcttctaactagtgttgtaagtccgatgccagaatttggagatttgagttcttcttttcatggcttttattcactgtgactaataagcttcctaataaatccttgccagacttaa

SEQ ID NO: 408361 - DNA, 1316 bp, Homo sapiens
tctaattctgatacagagtgtcttactctgtggcgcagactagattgcggtgagtacaatattgactgactgcgacgagcacctactaggtataagcgagtgtgttgactaagcctcccaagtagctgggactacaggcgcctgccaccacgcccggctaattttttgtatttttagtagagacggggtttcaccgtgttagccaggatggtctccatctcctgacctcatgatctgcccgcctcggcctcccaaagtgctgggattacagtatcatctctcaattcatatttcaaaaaacttcggagcagatacgacaaaggtcttttatattggcctgagaggagagtggactgagcttcgccgacacgaggtgaccatctgcaattacgaagcatctgccaacccagcagaccatagggtccatcaggttaccccacagacacactttatttcctaagggctggccaaggctcccatagaggcgctgtgtcagtgaagatgtacgactacctgttgggaaggacaaagggatgaggctccagagagagttggctgccacagcctctgccaagctttgtctttggggcttgctgcagaaacctggcctacggaagatacgacaccactgggagggttgtgtaggtgccaggggaccatcgtggttctctagggcgctgtggaaattgggtcttgggctgggtggcatctggcagtcatggataacacttgcttttccagttaatgtggccatgtgattccaagtgtcatgttgctttgtggcaagattgttgtgtgacttgtttttttgtttttgtttttgtttttttaaaggaaactatttgtgggctataggaaactttctgatgcctccggattgtgttagtagtagccatcaggagggtctccaactaaaacacttgttcctgcttgctcctttcccctctcattgttcagcattcttgtcaagttgcccagcttggagttgtctgtcacgcacatgtgtcctgtggttatagctagaaggacaggagtctcctgctgatgcgtgatagcttaagcttggggagaaggtcttttccactgcctagctaagcagtctggggagagcatggggatcatttctatgtgtgtgggtaatctggtcagtaagattgagacttagttaagattccccttggaaattccttaatgtttattagcttctaactagtgttgtaagtccgatgccagaatttggagatttgagttcttcttttcatggcttttattcactgtgactaataagcttcctaataaatccttgccagacttaa

SEQ ID NO: 408362 - DNA, 1490 bp, Homo sapiens
agcggcgctttttacgacgcggcaggcgcggcgcgcttagttgccggagctgaacggcgcggagctggtctgaggcgagccgagccgagcgagcgcggcggtggggccgagaggacgcgcaggtggcggcgttgccatgtcgcacggtcacagccacggcgggggtggctgccgctgcgccgccgaacgggaggagccgcccgagcagcgcggcctggcctacggcctgtacctgcgcatcgacctggagcggctgcaatgccttaacgagagccgcgagggcagcggccgcggcgtcttcaagccgtgggaggagcggaccgaccgctccaagtttgttgaaagtgatgcagatgaagagcttctgtttaatattccatttacgggcaatgtcaagctcaaaggcatcattataatgggagaggatgatgactcacacccctctgagatgagactgtacaagaatattccacagatgtcctttgatgatacagaaagggagccagatcagacctttagtctgaaccgggatcttacaggagaattagagtatgctacaaaaatttctcgtttttcaaatgtctatcatctctcaattcatatttcaaaaaacttcggagcagttatttcctaagggctggccaaggctcccatagaggcgctgtgtcagtgaagatgtacgactacctgttgggaaggacaaagggatgaggctccagagagagttggctgccacagcctctgccaagctttgtctttggggcttgctgcagaaacctggcctacggaagatacgacaccactgggagggttgtgtaggtgccaggggaccatcgtggttctctagggcgctgtggaaattgggtcttgggctgggtggcatctggcagtcatggataacacttgcttttccagttaatgtggccatgtgattccaagtgtcatgttgctttgtggcaagattgttgtgtgacttgtttttttgtttttgtttttgtttttttaaaggaaactatttgtgggctataggaaactttctgatgcctccggattgtgttagtagtagccatcaggagggtctccaactaaaacacttgttcctgcttgctcctttcccctctcattgttcagcattcttgtcaagttgcccagcttggagttgtctgtcacgcacatgtgtcctgtggttatagctagaaggacaggagtctcctgctgatgcgtgatagcttaagcttggggagaaggtcttttccactgcctagctaagcagtctggggagagcatggggatcatttctatgtgtgtgggtaatctggtcagtaagattgagacttagttaagattccccttggaaattccttaatgtttattagcttctaactagtgttgtaagtccgatgccagaatttggagatttgagttcttcttttcatggcttttattcactgtgactaataagcttcctaataaatccttgccagacttaa

SEQ ID NO: 408363 - DNA, 1055 bp, Homo sapiens
tagaaatgaacctgaataaggactaccgcaatgtgtgtggtgtgggaaaggacagttcttttaatggctggctgacccagcctcaattttcttgcagcttcgccgacacgaggtgaccatctgcaattacgaagcatctgccaacccagcagaccatagggtccatcaggttaccccacagacacactttatttcctaagggctggccaaggctcccatagaggcgctgtgtcagtgaagatgtacgactacctgttgggaaggacaaagggatgaggctccagagagagttggctgccacagcctctgccaagctttgtctttggggcttgctgcagaaacctggcctacggaagatacgacaccactgggagggttgtgtaggtgccaggggaccatcgtggttctctagggcgctgtggaaattgggtcttgggctgggtggcatctggcagtcatggataacacttgcttttccagttaatgtggccatgtgattccaagtgtcatgttgctttgtggcaagattgttgtgtgacttgtttttttgtttttgtttttgtttttttaaaggaaactatttgtgggctataggaaactttctgatgcctccggattgtgttagtagtagccatcaggagggtctccaactaaaacacttgttcctgcttgctcctttcccctctcattgttcagcattcttgtcaagttgcccagcttggagttgtctgtcacgcacatgtgtcctgtggttatagctagaaggacaggagtctcctgctgatgcgtgatagcttaagcttggggagaaggtcttttccactgcctagctaagcagtctggggagagcatggggatcatttctatgtgtgtgggtaatctggtcagtaagattgagacttagttaagattccccttggaaattccttaatgtttattagcttctaactagtgttgtaagtccgatgccagaatttggagatttgagttcttcttttcatggcttttattcactgtgactaataagcttcctaataaatccttgccagacttaa

SEQ ID NO: 408364 - DNA, 462 bp, Homo sapiens
ttttattcactgtgactaataagcttcctaataaatccttgccagacttaatgtttgtattttcttttgagttcttgatagccactgatgcaactttcatttcatggggaactgtactgaactttgaaattttttgttgttgttttggactaggtagattataggaagtgccacaattaaatcaagactggagccgggcgcggtggctcacgcctgtaatcccagcactttgggaggccgaggtgggcggatcacgaggtcaggagatcgagaccacggtgaaaccgtctctaccaaaaatacaaaaaattagccgggtgcggtggcgggagcctgtagtcccagctactcaggaggctgaggcaggagaatggcatgaacccgggaagcggagcttgcagtgacctgagattgcaccactgcactccagcctgggtgacagagtgagactccgtctcaaaa

SEQ ID NO: 408365 - DNA, 1628 bp, Homo sapiens
agcggcgctttttacgacgcggcaggcgcggcgcgcttagttgccggagctgaacggcgcggagctggtctgaggcgagccgagccgagcgagcgcggcggtggggccgagaggacgcgcaggtggcggcgttgccatgtcgcacggtcacagccacggcgggggtggctgccgctgcgccgccgaacgggaggagccgcccgagcagcgcggcctggcctacggcctgtacctgcgcatcgacctggagcggctgcaatgccttaacgagagccgcgagggcagcggccgcggcgtcttcaagccgtgggaggagcggaccgaccgctccaagtttgttgaaagtgatgcagatgaagagcttctgtttaatattccatttacgggcaatgtcaagctcaaaggcatcattataatgggagaggatgatgactcacacccctctgagatgagactgtacaagaatattccacagatgtcctttgatgatacagaaagggagccagatcagacctttagtctgaaccgggatcttacaggagaattagagtatgctacaaaaatttctcgtttttcaaatgtctatcatctctcaattcatatttcaaaaaacttcggagcagatacgacaaaggtcttttatattggcctgagaggagagtggactgagcttcgccgacacgaggtgaccatctgcaattacgaagcatctgccaacccagcagaccatagggtccatcaggttaccccacagacacactttatttcctaagggctggccaaggctcccatagaggcgctgtgtcagtgaagatgtacgactacctgttgggaaggacaaagggatgaggctccagagagagttggctgccacagcctctgccaagctttgtctttggggcttgctgcagaaacctggcctacggaagatacgacaccactgggagggttgtgtaggtgccaggggaccatcgtggttctctagggcgctgtggaaattgggtcttgggctgggtggcatctggcagtcatggataacacttgcttttccagttaatgtggccatgtgattccaagtgtcatgttgctttgtggcaagattgttgtgtgacttgtttttttgtttttgtttttgtttttttaaaggaaactatttgtgggctataggaaactttctgatgcctccggattgtgttagtagtagccatcaggagggtctccaactaaaacacttgttcctgcttgctcctttcccctctcattgttcagcattcttgtcaagttgcccagcttggagttgtctgtcacgcacatgtgtcctgtggttatagctagaaggacaggagtctcctgctgatgcgtgatagcttaagcttggggagaaggtcttttccactgcctagctaagcagtctggggagagcatggggatcatttctatgtgtgtgggtaatctggtcagtaagattgagacttagttaagattccccttggaaattccttaatgtttattagcttctaactagtgttgtaagtccgatgccagaatttggagatttgagttcttcttttcatggcttttattcactgtgactaataagcttcctaataaatccttgccagacttaa

SEQ ID NO: 408366 - DNA, 2018 bp, Homo sapiens
agcggcgctttttacgacgcggcaggcgcggcgcgcttagttgccggagctgaacggcgcggagctggtctgaggcgagccgagccgagcgagcgcggcggtggggccgagaggacgcgcaggtggcggcgttgccatgtcgcacggtcacagccacggcgggggtggctgccgctgcgccgccgaacgggaggagccgcccgagcagcgcggcctggcctacggcctgtacctgcgcatcgacctggagcggctgcaatgccttaacgagagccgcgagggcagcggccgcggcgtcttcaagccgtgggaggagcggaccgaccgctccaagtttgttgaaagtgatgcagatgaagagcttctgtttaatattccatttacgggcaatgtcaagctcaaaggcatcattataatgggagaggatgatgactcacacccctctgagatgagactgtacaagaatattccacagatgtcctttgatgatacagaaagggagccagatcagacctttagtctgaaccgggatcttacaggagaattagagtatgctacaaaaatttctcgtttttcaaatgtctatcatctctcaattcatatttcaaaaaacttcggagcagatacgacaaaggtcttttatattggcctgagaggagagtggactgagcttcgccgacacgaggtgaccatctgcaattacgaagcatctgccaacccagcagaccatagggtccatcaggttaccccacagacacactttatttcctaagggctggccaaggctcccatagaggcgctgtgtcagtgaagatgtacgactacctgttgggaaggacaaagggatgaggctccagagagagttggctgccacagcctctgccaagctttgtctttggggcttgctgcagaaacctggcctacggaagatacgacaccactgggagggttgtgtaggtgccaggggaccatcgtggttctctagggcgctgtggaaattgggtcttgggctgggtggcatctggcagtcatggataacacttgcttttccagttaatgtggccatgtgattccaagtgtcatgttgctttgtggcaagattgttgtgtgacttgtttttttgtttttgtttttgtttttttaaaggaaactatttgtgggctataggaaactttctgatgcctccggattgtgttagtagtagccatcaggagggtctccaactaaaacacttgttcctgcttgctcctttcccctctcattgttcagcattcttgtcaagttgcccagcttggagttgtctgtcacgcacatgtgtcctgtggttatagctagaaggacaggagtctcctgctgatgcgtgatagcttaagcttggggagaaggtcttttccactgcctagctaagcagtctggggagagcatggggatcatttctatgtgtgtgggtaatctggtcagtaagattgagacttagttaagattccccttggaaattccttaatgtttattagcttctaactagtgttgtaagtccgatgccagaatttggagatttgagttcttcttttcatggcttttattcactgtgactaataagcttcctaataaatccttgccagacttaaaaaaaaaaaaaaaaacaaaaaaaaacaaaaattgtgtggggcgccgcccgtggcgccctgagaaaagagtttgttagaaaaccctttggttgtgggcggcgcggggggcccacagatgggttaagggagaaaccggtgggcaaaagcgtggtcccactagagggaaaaccccgggggaacagaagacaaaaggggctgtggagatttctctacccaaagatataaaaaaacgcccgggggggagacacaccggaagctgttcgtggaaacaaaactctccaaaaaggcggaagtactggggagaggacaaaaaggggggactaataacagagcgagggggccccaacgagaaagccggaatacaaaatataaggccagaacagtgggtgt

SEQ ID NO: 408367 - DNA, 2010 bp, Homo sapiens
agcggcgctttttacgacgcggcaggcgcggcgcgcttagttgccggagctgaacggcgcggagctggtctgaggcgagccgagccgagcgagcgcggcggtggggccgagaggacgcgcaggtggcggcgttgccatgtcgcacggtcacagccacggcgggggtggctgccgctgcgccgccgaacgggaggagccgcccgagcagcgcggcctggcctacggcctgtacctgcgcatcgacctggagcggctgcaatgccttaacgagagccgcgagggcagcggccgcggcgtcttcaagccgtgggaggagcggaccgaccgctccaagtttgttgaaagtgatgcagatgaagagcttctgtttaatattccgtaagtatctccttggtgcctacctcaggctaaataggctgtacccagttgcctcagatggattcattcactggtgtcaagagcacacatttgcttctagaaatgggataaattactttggtgggtttgaggaggaaagcatcatagctttcttggtgcagactggaaacagatgtatttgtagaacaataactgagaaattgaggtagatttcttagaattgtagaatgctagaggtagacaggatcttagaaattatctagtacaagttgacagatgagtaaactgaagcccatacaggggaagggtcttgcccagggtcacacaactaaacaggtattcaaactcaggtttgacaaccttctcttttgcattctggcagatttacgggcaatgtcaagctcaaaggcatcattataatgggagaggatgatgactcacacccctctgagatgagactgtacaagaatattccacagatgtcctttgatgatacagaaagggagccagatcagacctttagtctgaaccgggatcttacaggagaattagagtatgctacaaaaatttctcgtttttcaaatgtctatcatctctcaattcatatttcaaaaaacttcggagcagatacgacaaaggtcttttatattggcctgagaggagagtggactgagcttcgccgacacgaggtgaccatctgcaattacgaagcatctgccaacccagcagaccatagggtccatcaggttaccccacagacacactttatttcctaagggctggccaaggctcccatagaggcgctgtgtcagtgaagatgtacgactacctgttgggaaggacaaagggatgaggctccagagagagttggctgccacagcctctgccaagctttgtctttggggcttgctgcagaaacctggcctacggaagatacgacaccactgggagggttgtgtaggtgccaggggaccatcgtggttctctagggcgctgtggaaattgggtcttgggctgggtggcatctggcagtcatggataacacttgcttttccagttaatgtggccatgtgattccaagtgtcatgttgctttgtggcaagattgttgtgtgacttgtttttttgtttttgtttttgtttttttaaaggaaactatttgtgggctataggaaactttctgatgcctccggattgtgttagtagtagccatcaggagggtctccaactaaaacacttgttcctgcttgctcctttcccctctcattgttcagcattcttgtcaagttgcccagcttggagttgtctgtcacgcacatgtgtcctgtggttatagctagaaggacaggagtctcctgctgatgcgtgatagcttaagcttggggagaaggtcttttccactgcctagctaagcagtctggggagagcatggggatcatttctatgtgtgtgggtaatctggtcagtaagattgagacttagttaagattccccttggaaattccttaatgtttattagcttctaactagtgttgtaagtccgatgccagaatttggagatttgagttcttcttttcatggcttttattcactgtgactaataagcttcctaataaatccttgccagacttaa

SEQ ID NO: 408368 - DNA, 1519 bp, Homo sapiens
agcggcgctttttacgacgcggcaggcgcggcgcgcttagttgccggagctgaacggcgcggagctggtctgaggcgagccgagccgagcgagcgcggcggtggggccgagaggacgcgcaggtggcggcgttgccatgtcgcacggtcacagccacggcgggggtggctgccgctgcgccgccgaacgggaggagccgcccgagcagcgcggcctggcctacggcctgtacctgcgcatcgacctggagcggctgcaatgccttaacgagagccgcgagggcagcggccgcggcgtcttcaagccgtgggaggagcggaccgaccgctccaagtttgttgaaagtgatgcagatgaagagcttctgtttaatattccatttacgggcaatgtcaagctcaaaggcatcattataatgggagaggatgatgactcacacccctctgagatgagactgtacaagaatattccacagatgtcctttgatgatacagaaagggagccagatcagacctttagtctgaaccgggatcttacaggagaattagagtatgctacaaacttcgccgacacgaggtgaccatctgcaattacgaagcatctgccaacccagcagaccatagggtccatcaggttaccccacagacacactttatttcctaagggctggccaaggctcccatagaggcgctgtgtcagtgaagatgtacgactacctgttgggaaggacaaagggatgaggctccagagagagttggctgccacagcctctgccaagctttgtctttggggcttgctgcagaaacctggcctacggaagatacgacaccactgggagggttgtgtaggtgccaggggaccatcgtggttctctagggcgctgtggaaattgggtcttgggctgggtggcatctggcagtcatggataacacttgcttttccagttaatgtggccatgtgattccaagtgtcatgttgctttgtggcaagattgttgtgtgacttgtttttttgtttttgtttttgtttttttaaaggaaactatttgtgggctataggaaactttctgatgcctccggattgtgttagtagtagccatcaggagggtctccaactaaaacacttgttcctgcttgctcctttcccctctcattgttcagcattcttgtcaagttgcccagcttggagttgtctgtcacgcacatgtgtcctgtggttatagctagaaggacaggagtctcctgctgatgcgtgatagcttaagcttggggagaaggtcttttccactgcctagctaagcagtctggggagagcatggggatcatttctatgtgtgtgggtaatctggtcagtaagattgagacttagttaagattccccttggaaattccttaatgtttattagcttctaactagtgttgtaagtccgatgccagaatttggagatttgagttcttcttttcatggcttttattcactgtgactaataagcttcctaataaatccttgccagacttaa

SEQ ID NO: 408369 - DNA, 1403 bp, Homo sapiens
agcggcgctttttacgacgcggcaggcgcggcgcgcttagttgccggagctgaacggcgcggagctggtctgaggcgagccgagccgagcgagcgcggcggtggggccgagaggacgcgcaggtggcggcgttgccatgtcgcacggtcacagccacggcgggggtggctgccgctgcgccgccgaacgggaggagccgcccgagcagcgcggcctggcctacggcctgtacctgcgcatcgacctggagcggctgcaatgccttaacgagagccgcgagggcagcggccgcggcgtcttcaagccgtgggaggagcggaccgaccgctccaagtttgttgaaagtgatgcagatgaagagcttctgtttaatattccatttacgggcaatgtcaagctcaaaggcatcattataatgggagaggatgatgactcacacccctctgagatgagactgtacaagaatattccacagatgtcctttgatgatacagaaagggagccagatcagacctttagtctgaaccgggatcttacaggagaattagagtatgctacaaaaatttctcgtttttcaaatgtctatcatctctcaattcatatttcaaaaaacttcggagcagttatttcctaagggctggccaaggctcccctctgccaagctttgtctttggggcttgctgcagaaacctggcctacggaagatacgacaccactgggagggttgtgtaggtgccaggggaccatcgtggttctctagggcgctgtggaaattgggtcttgggctgggtggcatctggcagtcatggataacacttgcttttccagttaatgtggccatgtgattccaagtgtcatgttgctttgtggcaagattgttgtgtgacttgtttttttgtttttgtttttgtttttttaaaggaaactatttgtgggctataggaaactttctgatgcctccggattgtgttagtagtagccatcaggagggtctccaactaaaacacttgttcctgcttgctcctttcccctctcattgttcagcattcttgtcaagttgcccagcttggagttgtctgtcacgcacatgtgtcctgtggttatagctagaaggacaggagtctcctgctgatgcgtgatagcttaagcttggggagaaggtcttttccactgcctagctaagcagtctggggagagcatggggatcatttctatgtgtgtgggtaatctggtcagtaagattgagacttagttaagattccccttggaaattccttaatgtttattagcttctaactagtgttgtaagtccgatgccagaatttggagatttgagttcttcttttcatggcttttattcactgtgactaataagcttcctaataaatccttgccagacttaa

SEQ ID NO: 408370 - DNA, 506 bp, Homo sapiens
atgttcacaagcctaatgaagacttctaaagacttctcccccagtcccactaccatgtcattgaatgtatggaactgtagtcaagataactgtatttgcatgaaaatacagttgggtagtttagatttggacttggtttctggtgagccttgattgaatctacaccctatctctgccttttgttgagccacttgacctagccaagtatcagttttgttttttagctgtaaaattgggataaatagagctatcactagtgtttattgaggcggtgcttagcccctgttcataaattcttgatatgggttggtgccaccatctgacacatgggcacaaaggaggagggaccgggaaggctacacagctgccaacagactctatctgacccagctttagtcaggacctcgcttttgtccttcccagcctcagtagaagtccctgcagtgcgaacctcctcacccttgatgtctgattgagttcctcatcccctggccttgatgtctgag

SEQ ID NO: 408371 - DNA, 2824 bp, Homo sapiens
cgccggcgtcgtttgacggctggaggccaccgagaagaaggaggaagcaggggtggcggctgctgcggcggttgcggcgggggccggggtgggcgccgcggtccgggccgggcagtgaggcgcgggcggccgggccggtgggctgggcggcgggcccggcggccgccctcgcacccttgcccgcgcctggcggcccgatgtggctgcagcagcggctcaaggggctgccgggactgctgtcgagcagctgggcccgccgcctcctctgcctgcttggcctcctgctgctgcttctgtggtttggggggtccggcgcgcggcgggcggcgggcggcctgcacctgctgccctggtcccgcggtgagccgggcgccgccgagccgtctgcctgcctggaggcggccacccgcgcctggcgcggcctgcgggagcgcggtgaggtggtaccgctgggtcctggagtgccggccctggtggccaacggcttcctggccctggacgtggctgccaatcggctgtgggtgactcccggggagcgggagcccgccgtggcgccggactttgtgcccttcgtgcagctgcgcccgctgagcgcgctggctgaagctggagaggcggtgctgctgctgcgggaggggcttctgcgccgcgtgcgttgcctgcagctggggtccccaggtcctggccccgtggccgccggccccgggcccgcctccgtctctggccttgccgcggggtccggccgcgactgcgtgctgctgcaagaggactttctggcgcacaggggccgaccccacgtctacctgcagcgcatccagctcaacaaccccacggagcgcgtggccgcgctgcagactgtggggcccactgccggcccagcccccaaggccttcaccagtaccctggagaaggtcggagaccatcagttcctcctctactcaggccggtccccgcctacgcccactgggttggtgcacctggtggtggtggccgccaagaagctggtgaaccgcctccaagtggctcccaagacgcagctggatgagacggtgctgtgggtggtgcacgtctctggccccattaacccccaggtgctcaaaagcaaagcagccaaggagctcaaggcgctgcaggacttggcacggaaggaaatgctggagctcttggacatgccagcggcggagctgcttcaagaccaccagctcctctgggctcagctcttcagcccaggagtggaaatgaagaagatcactgacacccacacgccgtctggcctcaccgtgaacctgacgctctattacatgctctcctgctcgccagccccactgctcagcccctccctgagccacagggagcgagaccagatggagtcgacgctcaactatgaagatcactgcttcagcgggcacgccaccatgcacgccgagaacctgtggccggggcggctgtcctccgtccagcagatcctgcagctctctgacctgtggaggctgaccctccagaagcgtggctgcaaggggctggtgaaggtgggtgccccaggcatcctgcaggggatggtgctcagctttggggggctgcagttcacagagaaccacctccagttccaggccgaccccgacgtgctgcacaacagctatgcattgcatggcatccgctacaagaacgaccatatcaacctggccgtgctggcggatgccgagggcaagccctacctacacgtgtccgtggagtcccgtggccagcctgtcaagatctatgcctgcaaggcaggctgcctggacgagccagtggagctgacctcggcgcccacgggccacaccttctcggtcatggtgacacagcccatcacgccactgctctacatctccaccgacctcacacacctgcaggacctgcggcacacgctgcacctcaaggccatcctggcccatgatgagcacatggcccagcaggaccccgggctgcccttcctcttctggttcagcgtggcctccctaatcaccctcttccacctcttcctcttcaagctcatctacaacgagtactgtgggcctggagccaagcccctcttcaggagtaaggaagatcccagtgtctgagtgaactaacagtcctgctttcagccaccatttgcacaagacacccagcactgaaagtcccgctgccaggagcaagggatcctttggaagcacccgccctttgtgccttgttgggggaaaccggtgacgcagaagtgagtgtggatacaccagagtttgcattggaaggaatgagtgtcacgtggggagggaaggggccagtggaccttttgtaagctttccactcaataaaatgaacctgtatggcaaatacttgaaatggaactcactccttccactttccccctttcttctgtcccaggaaatagatcatcttttgaaaagactcttgtctaggaaaagttgtgtccttttcctaatttaacgtgttctttcttaatgaagttttaatttatttttgttgagattttgctagatggcttttgcatcccctgtagatggtgagtgttggcggtgatgtccgtctcggcgttcggaggccccacggtcccgaggctgggccggggccccccagggtggctgtgctgctgcctgtaggagggtgcgggttgtgctgtcatcctcgggtttgcacgcccttttttaggagcctgtggacatctgtggttttgtactttggggcttcaggggaggtgtttaactttctagtgattgatgattgtcaggttttgaaataccaaagcttttttgttctgtttttaaataaatatctttcaaacttt

SEQ ID NO: 408372 - DNA, 2858 bp, Homo sapiens
cgccggcgtcgtttgacggctggaggccaccgagaagaaggaggaagcaggggtggcggctgctgcggcggttgcggcgggggccggggtgggcgccgcggtccgggccgggcagtgaggcgcgggcggccgggccggtgggctgggcggcgggcccggcggccgccctcgcacccttgcccgcgcctggcggcccgatgtggctgcagcagcggctcaaggggctgccgggactgctgtcgagcagctgggcccgccgcctcctctgcctgcttggcctcctgctgctgcttctgtggtttggggggtccggcgcgcggcgggcggcgggcggcctgcacctgctgccctggtcccgcggtgagccgggcgccgccgagccgtctgcctgcctggaggcggccacccgcgcctggcgcggcctgcgggagcgcggtgaggtggtaccgctgggtcctggagtgccggccctggtggccaacggcttcctggccctggacgtggctgccaatcggctgtgggtgactcccggggagcgggagcccgccgtggcgccggactttgtgcccttcgtgcagctgcgcccgctgagcgcgctggctgaagctggagaggcggtgctgctgctgcgggaggggcttctgcgccgcgtgcgttgcctgcagctggggtccccaggtcctggccccgtggccgccggccccgggcccgcctccgtctctggccttgccgcggggtccggccgcgactgcgtgctgctgcaagaggactttctggcgcacaggggccgaccccacgtctacctgcagcgcatccagctcaacaaccccacggagcgcgtggccgcgctgcagactgtggggcccactgccggcccagcccccaaggccttcaccagtaccctggagaaggtcggagaccatcagttcctcctctactcaggccggtccccgcctacgcccactgggttggtgcacctggtggtggtggccgccaagaagctggtgaaccgcctccaagtggctcccaagacgcagctggatgagacggtgctgtgggtggtgcacgtctctggccccattaacccccaggtgctcaaaagcaaagcagccaaggagctcaaggcgctgcaggacttggcacggaaggaaatgctggagctcttggacatgccagcggcggagctgcttcaagaccaccagctcctctgggctcagctcttcagcccaggagtggaaatgaagaagatcactgacacccacacgccgtctggcctcaccgtgaacctgacgctctattacatgctctcctgctcgccagccccactgctcagcccctccctgagccacagggagcgagaccagatggagtcgacgctcaactatgaagatcactgcttcagcgggcacgccaccatgcacgccgagaacctgtggccggggcggctgtcctccgtccagcagatcctgcagctctctgacctgtggaggctgaccctccagaagcgtggctgcaaggggctggtgaaggtgggtgccccaggcatcctgcaggggatggtgctcagctttggggggctgcagttcacagagaaccacctccagttccaggccgaccccgacgtgctgcacaacagctatgcattgcatggcatccgctacaagaacgaccatatcaacctggccgtgctggcggatgccgagggcaagccctacctacacgtgtccgtggagtcccgtggccagcctgtcaagatctatgcctgcaaggcaggctgcctggacgagccagtggagctgacctcggcgcccacgggccacaccttctcggtcatggtgacacagcccatcacgccactgctctacatctccaccgacctcacacacctgcaggacctgcggcacacgctgcacctcaaggccatcctggcccatgatgagcacatggcccagcaggaccccgggctgcccttcctcttctggttcagcgtggcctccctaatcaccctcttccacctcttcctcttcaagctcatctacaacgagtactgtgggcctggagccaagcccctcttcaggagtaaggaagatcccagtgtctgagtgaactaacagtcctgctttcagccaccatttgcacaagacacccagcactgaaagtcccgctgccaggagcaagggatcctttggaagcacccgccctttgtgccttgttgggggaaaccggtgacgcagaagtgagtgtggatacaccagagtttgcattggaaggaatgagtgtcacgtggggagggaaggggccagtggaccttttgtaagctttccactcaataaaatgaacctgtatggcaaatacttgaaatggaactcactccttccactttccccctttcttctgtcccaggaaatagatcatcttttgaaaagactcttgtctaggaaaagttgtgtccttttcctaatttaacgtgttctttcttaatgaagttttaatttatttttgttgagattttgctagatggcttttgcatcccctgtagatggtgagtgttggcggtgatgtccgtctcggcgttcggaggccccacggtcccgaggctgggccggggccccccagggtggctgtgctgctgcctgtaggagggtgcgggttgtgctgtcatcctcgggtttgcacgcccttttttaggagcctgtggacatctgtggttttgtactttggggcttcaggggaggtgtttaactttctagtgattgatgattgtcaggttttgaaataccaaagcttttttgttctgtttttaaataaatatctttcaaactttaaaaaaaagggtcgtggcgggaggaacagaggac

SEQ ID NO: 408373 - DNA, 3026 bp, Homo sapiens
cgccggcgtcgtttgacggctggaggccaccgagaagaaggaggaagcaggggtggcggctgctgcggcggttgcggcgggggccggggtgggcgccgcggtccgggccgggcagtgaggcgcgggcggccgggccggtgggctgggcggcgggcccggcggccgccctcgcacccttgcccgcgcctggcggcccgatgtggctgcagcagcggctcaaggggctgccgggactgctgtcgagcagctgggcccgccgcctcctctgcctgcttggcctcctgctgctgcttctgtggtttggggggtccggcgcgcggcgggcggcgggcggcctgcacctgctgccctggtcccgcggtgagccgggcgccgccgagccgtctgcctgcctggaggcggccacccgcgcctggcgcggcctgcgggagcgcggtgaggtggtaccgctgggtcctggagtgccggccctggtggccaacggcttcctggccctggacgtggctgccaatcggctgtgggtgactcccggggagcgggagcccgccgtggcgccggactttgtgcccttcgtgcagctgcgcccgctgagcgcgctggctgaagctggagaggcggtgctgctgctgcgggaggggcttctgcgccgcgtgcgttgcctgcagctggggtccccaggtcctggccccgtggccgccggccccgggcccgcctccgtctctggccttgccgcggggtccggccgcgactgcgtgctgctgcaagaggactttctggcgcacaggggccgaccccacgtctacctgcagcgcatccagctcaacaaccccacggagcgcgtggccgcgctgcagactgtggggcccactgccggcccagcccccaaggccttcaccagtaccctggagaaggtcggagaccatcagttcctcctctactcaggccggtccccgcctacgcccactgggttggtgcacctggtggtggtggccgccaagaagctggtgaaccgcctccaagtggctcccaagacgcagctggatgagacggtgctgtgggtggtgcacgtctctggccccattaacccccaggtgctcaaaagcaaagcagccaaggagctcaaggcgctgcaggacttggcacggaaggaaatgctggagctcttggacatgccagcggcggagctgcttcaagaccaccagctcctctgggctcagctcttcagcccaggagtggaaatgaagaagatcactgacacccacacgccgtctggcctcaccgtgaacctgacgctctattacatgctctcctgctcgccagccccactgctcagcccctccctgagccacagggagcgagaccagatggagtcgacgctcaactatgaagatcactgcttcagcgggcacgccaccatgcacgccgagaacctgtggccggggcggctgtcctccgtccagcagatcctgcagctctctgacctgtggaggctgaccctccagaagcgtggctgcaaggggctggtgaaggtgggtgccccaggcatcctgcaggggatggtgctcagctttggggggctgcagttcacagagaaccacctccagttccaggccgaccccgacgtgctgcacaacagctatgcattgcatggcatccgctacaagaacgaccatatcaacctggccgtgctggcggatgccgagggcaagccctacctacacgtgtccgtggagtcccgtggccagcctgtcaagatctatgcctgcaaggcaggctgcctggacgagccagtggagctgacctcggcgcccacgggccacaccttctcggtcatggtgacacagcccatcacgccactgctctacatctccaccgacctcacacacctgcaggacctgcggcacacgctgcacctcaaggccatcctggcccatgatgagcacatggcccagcaggaccccgggctgcccttcctcttctggttcagcgtggcctccctaatcaccctcttccacctcttcctcttcaagctcatctacaacgagtactgtgggcctggagccaagcccctcttcaggagtaaggctcaagctgggccatgccagagtggagccagtgaacactcagctccagaagggcccaggccactgagtccgtggtaattctgcaaggctgggtcagagccagggtgtggtgccactagggttgtctccgtagcctatttctatagctggccactggggttggcagtgaacagtaatcacacttgttttgtgaattgaacaggaagatcccagtgtctgagtgaactaacagtcctgctttcagccaccatttgcacaagacacccagcactgaaagtcccgctgccaggagcaagggatcctttggaagcacccgccctttgtgccttgttgggggaaaccggtgacgcagaagtgagtgtggatacaccagagtttgcattggaaggaatgagtgtcacgtggggagggaaggggccagtggaccttttgtaagctttccactcaataaaatgaacctgtatggcaaatacttgaaatggaactcactccttccactttccccctttcttctgtcccaggaaatagatcatcttttgaaaagactcttgtctaggaaaagttgtgtccttttcctaatttaacgtgttctttcttaatgaagttttaatttatttttgttgagattttgctagatggcttttgcatcccctgtagatggtgagtgttggcggtgatgtccgtctcggcgttcggaggccccacggtcccgaggctgggccggggccccccagggtggctgtgctgctgcctgtaggagggtgcgggttgtgctgtcatcctcgggtttgcacgcccttttttaggagcctgtggacatctgtggttttgtactttggggcttcaggggaggtgtttaactttctagtgattgatgattgtcaggttttgaaataccaaagcttttttgttctgtttttaaataaatatctttcaaacttt

SEQ ID NO: 408374 - DNA, 3146 bp, Homo sapiens
cgccggcgtcgtttgacggctggaggccaccgagaagaaggaggaagcaggggtggcggctgctgcggcggttgcggcgggggccggggtgggcgccgcggtccgggccgggcagtgaggcgcgggcggccgggccggtgggctgggcggcgggcccggcggccgccctcgcacccttgcccgcgcctggcggcccgatgtggctgcagcagcggctcaaggggctgccgggactgctgtcgagcagctgggcccgccgcctcctctgcctgcttggcctcctgctgctgcttctgtggtttggggggtccggcgcgcggcgggcggcgggcggcctgcacctgctgccctggtcccgcggtgagccgggcgccgccgagccgtctgcctgcctggaggcggccacccgcgcctggcgcggcctgcgggagcgcggtgaggtggtaccgctgggtcctggagtgccggccctggtggccaacggcttcctggccctggacgtggctgccaatcggctgtgggtgactcccggggagcgggagcccgccgtggcgccggactttgtgcccttcgtgcagctgcgcccgctgagcgcgctggctgaagctggagaggcggtgctgctgctgcgggaggggcttctgcgccgcgtgcgttgcctgcagctggggtccccaggtcctggccccgtggccgccggccccgggcccgcctccgtctctggccttgccgcggggtccggccgcgactgcgtgctgctgcaagaggactttctggcgcacaggggccgaccccacgtctacctgcagcgcatccagctcaacaaccccacggagcgcgtggccgcgctgcagactgtggggcccactgccggcccagcccccaaggccttcaccagtaccctggagaaggtcggagaccatcagttcctcctctactcaggccggtccccgcctacgcccactgggttggtgcacctggtggtggtggccgccaagaagctggtgaaccgcctccaagtggctcccaagacgcagctggatgagacggtgctgtgggtggtgcacgtctctggccccattaacccccaggtgctcaaaagcaaagcagccaaggagctcaaggcgctgcaggacttggcacggaaggaaatgctggagctcttggacatgccagcggcggagctgcttcaagaccaccagctcctctgggctcagctcttcagcccaggagtggaaatgaagaagatcactgacacccacacgccgtctggcctcaccgtgaacctgacgctctattacatgctctcctgctcgccagccccactgctcagcccctccctgagccacagggagcgagaccagatggagtcgacgctcaactatgaagatcactgcttcagcgggcacgccaccatgcacgccgagaacctgtggccggggcggctgtcctccgtccagcagatcctgcagctctctgacctgtggaggctgaccctccagaagcgtggctgcaaggggctggtgaaggtgggtgccccaggcatcctgcaggggatggtgctcagctttggggggctgcagttcacagagaaccacctccagttccaggccgaccccgacgtgctgcacaacagctatgcattgcatggcatccgctacaagaacgaccatatcaacctggccgtgctggcggatgccgagggcaagccctacctacacgtgtccgtggagtcccgtggccagcctgtcaagatctatgcctgcaaggcaggctgcctggacgagccagtggagctgacctcggcgcccacgggccacaccttctcggtcatggtgacacagcccatcacgccactgctctacatctccaccgacctcacacacctgcaggacctgcggcacacgctgcacctcaaggccatcctggcccatgatgagcacatggcccagcaggaccccgggctgcccttcctcttctggttcagcgtggcctccctaatcaccctcttccacctcttcctcttcaagctcatctacaacgagtactgtgggcctggagccaagcccctcttcaggagtaaggaagatcccagtgtctgagtgaactaacagtcctgctttcagccaccatttgcacaagacacccagcactgaaagtcccgctgccaggagcaagggatcctttggaagcacccgccctttgtgccttgttgggggaaaccggtgacgcagaagtgagtgtggatacaccagagtttgcattggaaggaatgagtgtcacgtggggagggaaggggccagtggaccttttgtaagctttccactcaataaaatgaacctgtatggcaaatacttgaaatggaactcactccttccactttccccctttcttctgtcccaggaaatagatcatcttttgaaaagactcttgtctaggaaaagttgtgtccttttcctaatttaacgtgttctttcttaatgaagttttaatttatttttgttgagattttgctagatggcttttgcatcccctgtagatggtgagtgttggcggtgatgtccgtctcggcgttcggaggccccacggtcccgaggctgggccggggccccccagggtggctgtgctgctgcctgtaggagggtgcgggttgtgctgtcatcctcgggtttgcacgcccttttttaggagcctgtggacatctgtggttttgtactttggggcttcaggggaggtgtttaactttctagtgattgatgattgtcaggttttgaaataccaaagcttttttgttctgtttttaaataaatatctttcaaactttaaaaaaaaaaaaaaaaaaaaaaacccagggatcctagttagcgggggtggacggaaacaaacagggattgtacatggcgagccattcgccattttgcttgggtgtccttaaccacatgttttcttgagtcacagaaggtggttaaatatgggccggcgttctcccttattacggtgaggctcagcttattacgttacggacaaaggcacagggtttaacccttcgctttataattggatctcgcaatctgaaatcatagtactacgacatactgtgcaagtatacactagcagaggagcacagagcacataacatagctagt

SEQ ID NO: 408375 - DNA, 2350 bp, Homo sapiens
cgccggcgtcgtttgacggctggaggccaccgagaagaaggaggaagcaggggtggcggctgctgcggcggttgcggcgggggccggggtgggcgccgcggtccgggccgggcagtgaggcgcgggcggccgggccggtgggctgggcggcgggcccggcggccgccctcgcacccttgcccgcgcctggcggcccgatgtggctgcagcagcggctcaaggggctgccgggactgctgtcgagcagctgggcccgccgcctcctctgcctgcttggcctcctgctgctgcttctgtggtttggggggtccggcgcgcggcgggcggcgggcggcctgcacctgctgccctggtcccgcggtgagccgggcgccgccgagccgtctgcctgcctggaggcggccacccgcgcctggcgcggcctgcgggagcgcggtgaggtggtaccgctgggtcctggagtgccggccctggtggccaacggcttcctggccctggacgtggctgccaatcggctgtgggtgactcccggggagcgggagcccgccgtggcgccggactttgtgcccttcgtgcagctgcgcccgctgagcgcgctggctgaagctggagaggcggtgctgctgctgcgggaggggcttctgcgccgcgtgcgttgcctgcagctggggtccccaggtcctggccccgtggccgccggccccgggcccgcctccgtctctggccttgccgcggggtccggccgcgactgcgtgctgctgcaagaggactttctggcgcacaggggccgaccccacgtctacctgcagcgcatccagctcaacaaccccacggagcgcgtggccgcgctgcagactgtggggcccactgccggcccagcccccaaggccttcaccagtaccctggagaaggtcggagaccatcagttcctcctctactcaggccggtccccgcctacgcccactgggttggtgcacctggtggtggtggccgccaagaagctggtgaaccgcctccaagtggctcccaagacgcagctggatgagacggtgctgtgggtggtgcacgtctctggccccattaacccccaggtgctcaaaagcaaagcagccaaggagctcaaggcgctgcaggacttggcacggaaggaaatgctggagctcttggacatgccagcggcggagctgcttcaagaccaccagctcctctgggctcagctcttcagcccaggagtggaaatgaagaagatcactgacacccacacgccgtctggcctcaccgtgaacctgacgctctattacatgctctcctgctcgccagccccactgctcagcccctccctgagccacagggagcgagaccagatggagtcgacgctcaactatgaagatcactgcttcagcgggcacgccaccatgcacgccgagaacctgtggccggggcggctgtcctccgtccagcagatcctgcagctctctgacctgtggaggctgaccctccagaagcgtggctgcaaggggctggtgaaggtgggtgccccaggcatcctgcaggggatggtgctcagctttggggggctgcagttcacagagaaccacctccagttccaggccgaccccgacgtgctgcacaacagctatgcattgcatggcatccgctacaagaacgaccatatcaacctggccgtgctggcggatgccgagggcaagccctacctacacgtgtccgtggagtcccgtggccagcctgtcaagatctatgcctgcaaggcaggctgcctggacgagccagtggagctgacctcggcgcccacgggccacaccttctcggtcatggtgacacagcccatcacgccactgctctacatctccaccgacctcacacacctgcaggacctgcggcacacgctgcacctcaaggccatcctggcccatgatgagcacatggcccagcaggaccccgggctgcccttcctcttctggttcagcgtggcctccctaatcaccctcttccacctcttcctcttcaagctcatctacaacgagtactgtgggcctggagccaagcccctcttcaggagtaaggaagatcccagtgtctgagtgaactaacagtcctgctttcagccaccatttgcacaagacacccagcactgaaagtcccgctgccaggagcaagggatcctttggaagcacccgccctttgtgccttgttgggggaaaccggtgacgcagaagtgagtgtggatacaccagagtttgcattggaaggaatgagtgtcacgtggggagggaaggggccagtggaccttttgtaagctttccactcaataaaatgaacctgtatggca

SEQ ID NO: 408376 - DNA, 1307 bp, Homo sapiens
tgcctgcggcttctagtttctggcccaagaccaggacttggaaaaggaagcagaacttgacctgaaagagcagaagagtgggagacagggctgagttcctcaagttcgaagaaaaatcaaaagtcagatcaaaaaggactgcacagaggccttccttgtgagccgcctctgaactagctgcactaggacaggtgccaaatgtgcatcgtgtgggttttgccgtctgtttggcaggcggctgcttttccctgctgcttggtggcttctctgccctcgctcttgagtgcaccttcggttcctcccacagttgggcaaatgagccaaactaccttcatggggtactgaccgatctctccttgacttaggctcaagctgggccatgccagagtggagccagtgaacactcagctccagaagggcccaggccactgagtccgtggtaattctgcaaggctgggtcagagccagggtgtggtgccactagggttgtctccgtagcctatttctatagctggccactggggttggcagtgaacagtaatcacacttgttttgtgaattgaacaggaagatcccagtgtctgagtgaactaacagtcctgctttcagccaccatttgcacaagacacccagcactgaaagtcccgctgccaggagcaagggatcctttggaagcacccgccctttgtgccttgttgggggaaaccggtgacgcagaagtgagtgtggatacaccagagtttgcattggaaggaatgagtgtcacgtggggagggaaggggccagtggaccttttgtaagctttccactcaataaaatgaacctgtatggcaaatacttgaaatggaactcactccttccactttccccctttcttctgtcccaggaaatagatcatcttttgaaaagactcttgtctaggaaaagttgtgtccttttcctaatttaacgtgttctttcttaatgaagttttaatttatttttgttgagattttgctagatggcttttgcatcccctgtagatggtgagtgttggcggtgatgtccgtctcggcgttcggaggccccacggtcccgaggctgggccggggccccccagggtggctgtgctgctgcctgtaggagggtgcgggttgtgctgtcatcctcgggtttgcacgcccttttttaggagcctgtggacatctgtggttttgtactttggggcttcaggggaggtgtttaactttctagtgattgatgattgtcaggttttgaaataccaaagcttttttgttctgtttttaaataaatatctttcaaacttt

SEQ ID NO: 408377 - DNA, 2552 bp, Homo sapiens
cgccggcgtcgtttgacggctggaggccaccgagaagaaggaggaagcaggggtggcggctgctgcggcggttgcggcgggggccggggtgggcgccgcggtccgggccgggcagtgaggcgcgggcggccgggccggtgggctgggcggcgggcccggcggccgccctcgcacccttgcccgcgcctggcggcccgatgtggctgcagcagcggctcaaggggctgccgggactgctgtcgagcagctgggcccgccgcctcctctgcctgcttggcctcctgctgctgcttctgtggtttggggggtccggcgcgcggcgggcggcgggcggcctgcacctgctgccctggtcccgcggtgagccgggcgccgccgagccgtctgcctgcctggaggcggccacccgcgcctggcgcggcctgcgggagcgcggtgaggtggtaccgctgggtcctggagtgccggccctggtggccaacggcttcctggccctggacgtggctgccaatcggctgtgggtgactcccggggagcgggagcccgccgtggcgccggactttgtgcccttcgtgcagctgcgcccgctgagcgcgctggctgaagctggagaggcggtgctgctgctgcgggaggggcttctgcgccgcgtgcgttgcctgcagctggggtccccaggtcctggccccgtggccgccggccccgggcccgcctccgtctctggccttgccgcggggtccggccgcgactgcgtgctgctgcaagaggactttctggcgcacaggggccgaccccacgtctacctgcagcgcatccagctcaacaaccccacggagcgcgtggccgcgctgcagactgtggggcccactgccggcccagcccccaaggccttcaccagtaccctggagaaggtcggagaccatcagttcctcctctactcaggccggtccccgcctacgcccactgggttggtgcacctggtggtggtggccgccaagaagctggtgaaccgcctccaagtggctcccaagacgcagctggatgagacggtgctgtgggtggtgcacgtctctggccccattaacccccaggtgctcaaaagcaaagcagccaaggagctcaaggcgctgcaggacttggcacggaaggaaatgctggagctcttggacatgccagcggcggagctgcttcaagaccaccagctcctctgggctcagctcttcagcccaggagtggaaatgaagaagatcactgacacccacacgccgtctggcctcaccgtgaacctgacgctctattacatgctctcctgctcgccagccccactgctcagcccctccctgagccacagggagcgagaccagatggagtcgacgctcaactatgaagatcactgcttcagcgggcacgccaccatgcacgccgagaacctgtggccggggcggctgtcctccgtccagcagatcctgcagctctctgacctgtggaggctgaccctccagaagcgtggctgcaaggggctggtgaaggtgggtgccccaggcatcctgcaggggatggtgctcagctttggggggctgcagttcacagagaaccacctccagttccaggccgaccccgacgtgctgcacaacagctatgcattgcatggcatccgctacaagaacgaccatatcaacctggccgtgctggcggatgccgagggcaagccctacctacacgtgtccgtggagtcccgtggccagcctgtcaagatctatgcctgcaaggcaggctgcctggacgagccagtggagctgacctcggcgcccacgggccacaccttctcggtcatggtgacacagcccatcacgccactgctctacatctccaccgacctcacacacctgcaggacctgcggcacacgctgcacctcaaggccatcctggcccatgatgagcacatggcccagcaggaccccgggctgcccttcctcttctggttcagcgtggcctccctaatcaccctcttccacctcttcctcttcaagctcatctacaacgagtactgtgggcctggagccaagcccctcttcaggagtaaggctcaagctgggccatgccagagtggagccagtgaacactcagctccagaagggcccaggccactgagtccgtggtaattctgcaaggctgggtcagagccagggtgtggtgccactagggttgtctccgtagcctatttctatagctggccactggggttggcagtgaacagtaatcacacttgttttgtgaattgaacaggaagatcccagtgtctgagtgaactaacagtcctgctttcagccaccatttgcacaagacacccagcactgaaagtcccgctgccaggagcaagggatcctttggaagcacccgccctttgtgccttgttgggggaaaccggtgacgcagaagtgagtgtggatacaccagagtttgcattggaaggaatgagtgtcacgtggggagggaaggggccagtggaccttttgtaagctttccactcaataaaatgaacctgtatggca

SEQ ID NO: 408378 - DNA, 2708 bp, Homo sapiens
cgccggcgtcgtttgacggctggaggccaccgagaagaaggaggaagcaggggtggcggctgctgcggcggttgcggcgggggccggggtgggcgccgcggtccgggccgggcagtgaggcgcgggcggccgggccggtgggctgggcggcgggcccggcggccgccctcgcacccttgcccgcgcctggcggcccgatgtggctgcagcagcggctcaaggggctgccgggactgctgtcgagcagctgggcccgccgcctcctctgcctgcttggcctcctgctgctgcttctgtggtttggggggtccggcgcgcggcgggcggcgggcggcctgcacctgctgccctggtcccgcggtgagccgggcgccgccgagccgtctgcctgcctggaggcggccacccgcgcctggcgcggcctgcgggagcgcggtgaggtggtaccgctgggtcctggagtgccggccctggtggccaacggcttcctggccctggacgtggctgccaatcggctgtgggtgactcccggggagcgggagcccgccgtggcgccggactttgtgcccttcgtgcagctgcgcccgctgagcgcgctggctgaagctggagaggcggtgctgctgctgcgggaggggcttctgcgccgcgtgcgttgcctgcagctggggtccccaggtcctggccccgtggccgccggccccgggcccgcctccgtctctggccttgccgcggggtccggccgcgactgcgtgctgctgcaagaggactttctggcgcacaggggccgaccccacgtctacctgcagcgcatccagctcaacaaccccacggagcgcgtggccgcgctgcagactgtggggcccactgccggcccagcccccaaggccttcaccagtaccctggagaaggtcggagaccatcagttcctcctctactcaggccggtccccgcctacgcccactgggttggtgcacctggtggtggtggccgccaagaagctggtgaaccgcctccaagtggctcccaagacgcagctggatgagacggtgctgtgggtggtgcacgtctctggccccattaacccccaggtgctcaaaagcaaagcagccaaggagctcaaggcgctgcaggacttggcacggaaggaaatgctggagctcttggacatgccagcggcggagctgcttcaagaccaccagctcctctgggctcagctcttcagcccaggagtggaaatgaagaagatcactgacacccacacgccgtctggcctcaccgtgaacctgacgctctattacatgctctcctgctcgccagccccactgctcagcccctccctgagccacagggagcgagaccagatggagtcgacgctcaactatgaagatcactgcttcagcgggcacgccaccatgcacgccgagaacctgtggccggggcggctgtcctccgtccagcagatcctgcagctctctgacctgtggaggctgaccctccagaagcgtggctgcaaggggctggtgaaggtgggtgccccaggcatcctgcaggggatggtgctcagctttggggggctgcagttcacagagaaccacctccagttccaggccgaccccgacgtgctgcacaacagctatgcattgcatggcatccgctacaagaacgaccatatcaacctggccgtgctggcggatgccgagggcaagccctacctacacgtgtccgtggagtcccgtggccagcctgtcaagatctatgcctgcaaggcaggctgcctggacgagccagtggagctgacctcggcgcccacgggccacaccttctcggtcatggtgacacagcccatcacgccactgctctacatctccaccgacctcacacacctgcaggacctgcggcacacgctgcacctcaaggccatcctggcccatgatgagcacatggcccagcaggaccccgggctgcccttcctcttctggttcagcgtggcctccctaatcaccctcttccacctcttcctcttcaagctcatctacaacgagtactgtgggcctggagccaagcccctcttcaggagtaaggtaggaagccgccatctggtcgaaacccgaggccttggccttgctctcagccctgtgtctcggaaggggctagcctggcgagggggggtgaggcctgggcaggaatgggtgtcctgatgccctcagcccttgacaccagagagcgcgcgcaagtgttttgagaggagacgacgaggaagggaaagctggaaatccaggtgtgaattgatggtcttctggctttccagggcagccctcccctcctcccgcatcataaatctcagcatttaaaaataactgcaagctgggtgtggtggcttgtgcctgtagtcccagctacttgggaggctgagatgggagaatcccttgagcccaggagtttgaggctgcagtgaactatgattgtgtcattgcactctagctggggcaacagagcaagaccggctcaaaagcaaaacaaaagcaataagtaaaacaaacaaaagggggcggcaaaatcccagggggcaagagacgaccattgggcaaaggccaagaaggcggaaaagaacacagcgcgcaacgcgagggcaagacgaccgggagcccagcggggccggcaccgcaacccgcaaataaggaggaacatccgacagaggtacaaac

SEQ ID NO: 408379 - DNA, 2532 bp, Homo sapiens
cgccggcgtcgtttgacggctggaggccaccgagaagaaggaggaagcaggggtggcggctgctgcggcggttgcggcgggggccggggtgggcgccgcggtccgggccgccacccgcgcctggcgcggcctgcgggagcgcggtgaggtggtaccgctgggtcctggagtgccggccctggtggccaacggcttcctggccctggacgtggctgccaatcggctgtgggtgactcccggggagcgggagcccgccgtggcgccggactttgtgcccttcgtgcagctgcgcccgctgagcgcgctggctgaagctggagaggcggtgctgctgctgcgggaggggcttctgcgccgcgtgcgttgcctgcagctggggtccccaggtcctggccccgtggccgccggccccgggcccgcctccgtctctggccttgccgcggggtccggccgcgactgcgtgctgctgcaagaggactttctggcgcacaggggccgaccccacgtctacctgcagcgcatccagctcaacaaccccacggagcgcgtggccgcgctgcagactgtggggcccactgccggcccagcccccaaggccttcaccagtaccctggagaaggtcggagaccatcagttcctcctctactcaggccggtccccgcctacgcccactgggttggtgcacctggtggtggtggccgccaagaagctggtgaaccgcctccaagtggctcccaagacgcagctggatgagacggtgctgtgggtggtgcacgtctctggccccattaacccccaggtgctcaaaagcaaagcagccaaggagctcaaggcgctgcaggacttggcacggaaggaaatgctggagctcttggacatgccagcggcggagctgcttcaagaccaccagctcctctgggctcagctcttcagcccaggagtggaaatgaagaagatcactgacacccacacgccgtctggcctcaccgtgaacctgacgctctattacatgctctcctgctcgccagccccactgctcagcccctccctgagccacagggagcgagaccagatggagtcgacgctcaactatgaagatcactgcttcagcgggcacgccaccatgcacgccgagaacctgtggccggggcggctgtcctccgtccagcagatcctgcagctctctgacctgtggaggctgaccctccagaagcgtggctgcaaggggctggtgaaggtgggtgccccaggcatcctgcaggggatggtgctcagctttggggggctgcagttcacagagaaccacctccagttccaggccgaccccgacgtgctgcacaacagctatgcattgcatggcatccgctacaagaacgaccatatcaacctggccgtgctggcggatgccgagggcaagccctacctacacgtgtccgtggagtcccgtggccagcctgtcaagatctatgcctgcaaggcaggctgcctggacgagccagtggagctgacctcggcgcccacgggccacaccttctcggtcatggtgacacagcccatcacgccactgctctacatctccaccgacctcacacacctgcaggacctgcggcacacgctgcacctcaaggccatcctggcccatgatgagcacatggcccagcaggaccccgggctgcccttcctcttctggttcagcgtggcctccctaatcaccctcttccacctcttcctcttcaagctcatctacaacgagtactgtgggcctggagccaagcccctcttcaggagtaaggaagatcccagtgtctgagtgaactaacagtcctgctttcagccaccatttgcacaagacacccagcactgaaagtcccgctgccaggagcaagggatcctttggaagcacccgccctttgtgccttgttgggggaaaccggtgacgcagaagtgagtgtggatacaccagagtttgcattggaaggaatgagtgtcacgtggggagggaaggggccagtggaccttttgtaagctttccactcaataaaatgaacctgtatggcaaatacttgaaatggaactcactccttccactttccccctttcttctgtcccaggaaatagatcatcttttgaaaagactcttgtctaggaaaagttgtgtccttttcctaatttaacgtgttctttcttaatgaagttttaatttatttttgttgagattttgctagatggcttttgcatcccctgtagatggtgagtgttggcggtgatgtccgtctcggcgttcggaggccccacggtcccgaggctgggccggggccccccagggtggctgtgctgctgcctgtaggagggtgcgggttgtgctgtcatcctcgggtttgcacgcccttttttaggagcctgtggacatctgtggttttgtactttggggcttcaggggaggtgtttaactttctagtgattgatgattgtcaggttttgaaataccaaagcttttttgttctgtttttaaataaatatctttcaaacttt

SEQ ID NO: 408380 - DNA, 2749 bp, Homo sapiens
cgccggcgtcgtttgacggctggaggccaccgagaagaaggaggaagcaggggtggcggctgctgcggcggttgcggcgggggccggggtgggcgccgcggtccgggccgggcagtgaggcgcgggcggccgggccggtgggctgggcggcgggcccggcggccgccctcgcacccttgcccgcgcctggcggcccgatgtggctgcagcagcggctcaaggggctgccgggactgctgtcgagcagctgggcccgccgcctcctctgcctgcttggcctcctgctgctgcttctgtggtttggggggtccggcgcgcggcgggcggcgggcggcctgcacctgctgccctggtcccgcggtgagccgggcgccgccgagccgtctgcctgcctggaggcggccacccgcgcctggcgcggcctgcgggagcgcggtgaggtggtaccgctgggtcctggagtgccggccctggtggccaacggcttcctggccctggacgtggctgccaatcggctgtgggtgactcccggggagcgggagcccgccgtggcgccggactttgtgcccttcgtgcagctgcgcccgctgagcgcgctggctgaagctggagaggcggtgctgctgctgcgggaggggcttctgcgccgcgtgcgttgcctgcagctggggtccccaggtcctggccccgtggccgccggccccgggcccgcctccgtctctggccttgccgcggggtccggccgcgactgcgtgctgctgcaagaggactttctggcgcacaggggccgaccccacgtctacctgcagcgcatccagctcaacaaccccacggagcgcgtggccgcgctgcagactgtggggcccactgccggcccagcccccaaggccttcaccagtaccctggagaaggtcggagaccatcagttcctcctctactcaggccggtccccgcctacgcccactgggttggtgcacctggtggtggtggccgccaagaagctggtgaaccgcctccaagtggctcccaagacgcagctggatgagacggtgctgtgggtggtgcacgtctctggccccattaacccccaggtgctcaaaagcaaagcagccaaggagctcaaggcgctgcaggacttggcacggaaggaaatgctggagctcttggacatgccagcggcggagctgcttcaagaccaccagctcctctgggctcagctcttcagcccaggagtggaaatgaagaagatcactgacacccacacgccgtctggcctcaccgtgaacctgacgctctattacatgctctcctgctcgccagccccactgctcagcccctccctgagccacagggagcgagaccagatggagtcgacgctcaactatgaagatcactgcttcagcgggcacgccaccatgcacgccgagaacctgtggccggggcggctgtcctccgtccagcagatcctgcagctctctgacctgtggaggctgaccctccagaagcgtggctgcaaggggctggtgaagttccaggccgaccccgacgtgctgcacaacagctatgcattgcatggcatccgctacaagaacgaccatatcaacctggccgtgctggcggatgccgagggcaagccctacctacacgtgtccgtggagtcccgtggccagcctgtcaagatctatgcctgcaaggcaggctgcctggacgagccagtggagctgacctcggcgcccacgggccacaccttctcggtcatggtgacacagcccatcacgccactgctctacatctccaccgacctcacacacctgcaggacctgcggcacacgctgcacctcaaggccatcctggcccatgatgagcacatggcccagcaggaccccgggctgcccttcctcttctggttcagcgtggcctccctaatcaccctcttccacctcttcctcttcaagctcatctacaacgagtactgtgggcctggagccaagcccctcttcaggagtaaggaagatcccagtgtctgagtgaactaacagtcctgctttcagccaccatttgcacaagacacccagcactgaaagtcccgctgccaggagcaagggatcctttggaagcacccgccctttgtgccttgttgggggaaaccggtgacgcagaagtgagtgtggatacaccagagtttgcattggaaggaatgagtgtcacgtggggagggaaggggccagtggaccttttgtaagctttccactcaataaaatgaacctgtatggcaaatacttgaaatggaactcactccttccactttccccctttcttctgtcccaggaaatagatcatcttttgaaaagactcttgtctaggaaaagttgtgtccttttcctaatttaacgtgttctttcttaatgaagttttaatttatttttgttgagattttgctagatggcttttgcatcccctgtagatggtgagtgttggcggtgatgtccgtctcggcgttcggaggccccacggtcccgaggctgggccggggccccccagggtggctgtgctgctgcctgtaggagggtgcgggttgtgctgtcatcctcgggtttgcacgcccttttttaggagcctgtggacatctgtggttttgtactttggggcttcaggggaggtgtttaactttctagtgattgatgattgtcaggttttgaaataccaaagcttttttgttctgtttttaaataaatatctttcaaacttt

SEQ ID NO: 408381 - DNA, 2551 bp, Homo sapiens
cgccggcgtcgtttgacggctggaggccaccgagaagaaggaggaagcaggggtggcggctgctgcggcggttgcggcgggggccggggtgggcgccgcggtccgggccgggcagtgaggcgcgggcggccgggccggtgggctgggcggcgggcccggcggccgccctcgcacccttgcccgcgcctggcggcccgatgtggctgcagcagcggctcaaggggctgccgggactgctgtcgagcagctgggcccgccgcctcctctgcctgcttggcctcctgctgctgcttctgtggtttggggggtccggcgcgcggcgggcggcgggcggcctgcacctgctgccctggtcccgcggtgagccgggcgccgccgagccgtctgcctgcctggaggcggccacccgcgcctggcgcggcctgcgggagcgcggtgaggtggtaccgctgggtcctggagtgccggccctggtggccaacggcttcctggccctggacgtggctgccaatcggctgtgggtgactcccggggagcgggagcccgccgtggcgccggactttgtgcccttcgtgcagctgcgcccgctgagcgcgctggctgaagctggagaggcggtgctgctgctgcgggaggggcttctgcgccgcgtgcgttgcctgcagctggggtccccaggtcctggccccgtggccgccggccccgggcccgcctccgtctctggccttgccgcggggtccggccgcgactgcgtgctgctgcaagaggactttctggcgcacaggggccgaccccacgtctacctgcagcgcatccagctcaacaaccccacggagcgcgtggccgcgctgcagactgtggggcccactgccggcccagcccccaaggccttcaccagtaccctggagaaggtcggagaccatcagttcctcctctactcaggccggtccccgcctacgcccactgggttggtgcacctggtggtggtggccgccaagaagctggtgaaccgcctccaagtggctcccaagacgcagctggatgagacggtgctgtgggtggtgcacgtctctggccccattaacccccaggtgctcaaaagcaaagcagccaaggagctcaaggcgctgcaggacttggcacggaaggaaatgctggagctcttggacatgccagcggcggagctgcttcaagaccaccagctcctctgggctcagctcttcagcccaggagtggaaatgaagaagatcactgacacccacacgccgtctggcctcaccgtgaacctgacgctctattacatgctctcctgctcgccagccccactgctcagcccctccctgagccacagggagcgagaccagatggagtcgacgctcaactatgaagatcactgcttcagcgggcacgccaccatgcacgccgagaacctgtggccggggcggctgtcctccgtccagcagatcctgcagctctctgacctgtggaggctgaccctccagaagcgtggctgcaaggggctggtgaaggtgggtgccccaggcatcctgcaggggatggtgctcagctttggggggctgcagttcacagagaaccacctccagttccaggccgaccccgacgtgctgcacaacagctatgcattgcatggcatccgctacaagaacgaccatatcaacctggccgtgctggcggatgccgagggcaagccctacctacacgtgtccgtggagtcccgtggccagcctgtcaagatctatgcctgcaaggcaggctgcctggacgagccagtggagctgacctcggcgcccacgggccacaccttctcggtcatggtgacacagcccatcacgccactgctctacatctccaccgacctcacacacctgcaggacctgcggcacacgctgcacctcaaggccatcctggcccatgatgagcacatggcccagcaggaccccgggctgcccttcctcttctggttcagcgtggcctccctaatcaccctcttccacctcttcctcttcaagctcatctacaacgagtactgtgggcctggagccaagcccctcttcaggagtaaggtaggaagccgccatctggtcgaaacccgaggccttggccttgctctcagccctgtgtctcggaaggggctagcctggcgagggggggtgaggcctgggcaggaatgggtgtcctgatgccctcagcccttgacaccagagagcgcgcgcaagtgttttgagaggagacgacgaggaagggaaagctggaaatccaggtgtgaattgatggtcttctggctttccagggcagccctcccctcctcccgcatcataaatctcagcatttaaaaataactgcaagctgggtgtggtggcttgtgcctgtagtcccagctacttgggaggctgagatgggagaatcccttgagcccaggagtttgaggctgcagtgaactatgattgtgtcattgcactctagctggggcaacagagcaagaccctgtctcaaaaaagcaaaaaacaaaaaagcaaataaaagtaaaaaa

SEQ ID NO: 408382 - DNA, 2424 bp, Homo sapiens
cgccggcgtcgtttgacggctggaggccaccgagaagaaggaggaagcaggggtggcggctgctgcggcggttgcggcgggggccggggtgggcgccgcggtccgggccgggcagtgaggcgcgggcggccgggccggtgggctgggcggcgggcccggcggccgccctcgcacccttgcccgcgcctggcggcccgatgtggctgcagcagcggctcaaggggctgccgggactgctgtcgagcagctgggcccgccgcctcctctgcctgcttggcctcctgctgctgcttctgtggtttggggggtccggcgcgcggcgggcggcgggcggcctgcacctgctgccctggtcccgcggtgagccgggcgccgccgagccgtctgcctgcctggaggcggccacccgcgcctggcgcggcctgcgggagcgcggtgaggtggtaccgctgggtcctggagtgccggccctggtggccaacggcttcctggccctggacgtggctgccaatcggctgtgggtgactcccggggagcgggagcccgccgtggcgccggactttgtgcccttcgtgcagctgcgcccgctgagcgcgctggctgaagctggagaggcggtgctgctgctgcgggaggggcttctgcgccgcgtgcgttgcctgcagctggggtccccaggtcctggccccgtggccgccggccccgggcccgcctccgtctctggccttgccgcggggtccggccgcgactgcgtgctgctgcaagaggactttctggcgcacaggggccgaccccacgtctacctgcagcgcatccagctcaacaaccccacggagcgcgtggccgcgctgcagactgtggggcccactgccggcccagcccccaaggccttcaccagtaccctggagaaggtcggagaccatcagttcctcctctactcaggccggtccccgcctacgcccactgggttggtgcacctggtggtggtggccgccaagaagctggtgaaccgcctccaagtggctcccaagacgcagctggatgagacggtgctgtgggtggtgcacgtctctggccccattaacccccaggtgctcaaaagcaaagcagccaaggagctcaaggcgctgcaggacttggcacggaaggaaatgctggagctcttggacatgccagcggcggagctgcttcaagaccaccagctcctctgggctcagctcttcagcccaggagtggaaatgaagaagatcactgacacccacacgccgtctggcctcaccgtgaacctgacgctctattacatgctctcctgctcgccagccccactgctcagcccctccctgagccacagggagcgagaccagatggagtcgacgctcaactatgaagatcactgcttcagcgggcacgccaccatgcacgccgagaacctgtggccggggcggctgtcctccgtccagcagatcctgcagctctctgacctgtggaggctgaccctccagaagcgtggctgcaaggggctggtgaaggtgggtgccccaggcatcctgcaggggatggtgctcagctttggggggctgcagttcacagagaaccacctccagttccaggccgaccccgacgtgctgcacaacagctatgcattgcatggcatccgctacaagaacgaccatatcaacctggccgtgctggcggatgccgagggcaagccctacctacacgtgtccgtggagtcccgtggccagcctgtcaagatctatgcctgcaaggcaggctgcctggacgagccagtggagctgacctcggcgcccacgggccacaccttctcggtcatggtgacacagcccatcacgccactgctctacatctccaccgacctcacacacctgcaggacctgcggcacacgctgcacctcaaggccatcctggcccatgatgagcacatggcccagcaggaccccgggctgcccttcctcttctggttcagcgtggcctccctaatcaccctcttccacctcttcctcttcaagctcatctacaacgagtactgtgggcctggagccaagcccctcttcaggagtaaggctcaagctgggccatgccagagtggagccagtgaacactcagctccagaagggcccaggccactgagtccgtggaagatcccagtgtctgagtgaactaacagtcctgctttcagccaccatttgcacaagacacccagcactgaaagtcccgctgccaggagcaagggatcctttggaagcacccgccctttgtgccttgttgggggaaaccggtgacgcagaagtgagtgtggatacaccagagtttgcattggaaggaatgagtgtcacgtggggagggaaggggccagtggaccttttgtaagctttccactcaataaaatgaacctgtatggca

SEQ ID NO: 408383 - DNA, 1607 bp, Homo sapiens
cgccggcgtcgtttgacggctggaggccaccgagaagaaggaggaagcaggggtggcggctgctgcggcggttgcggcgggggccggggtgggcgccgcggtccgggccgggcagtgaggcgcgggcggccgggccggtgggctgggcggcgggcccggcggccgccctcgcacccttgcccgcgcctggcggcccgatgtggctgcagcagcggctcaaggggctgccgggactgctgtcgagcagctgggcccgccgcctcctctgcctgcttggcctcctgctgctgcttctgtggtttggggggtccggcgcgcggcgggcggcgggcggcctgcacctgctgccctggtcccgcggtgagccgggcgccgccgagccgtctgcctgcctggaggcggccacccgcgcctggcgcggcctgcgggagcgcggtgaggtggtaccgctgggtcctggagtgccggccctggtggccaacggcttcctggccctggacgtggctgccaatcggctgtgggtgactcccggggagcgggagcccgccgtggcgccggactttgtgcccttcgtgcagctgcgcccgctgagcgcgctggctgaagctggagaggcggtgctgctgctgcgggaggggcttctgcgccgcgtgcgttgcctgcagctggggtccccaggtcctggccccgtggccgccggccccgggcccgcctccgtctctggccttgccgcggggtccggccgcgactgcgtgctgctgcaagaggactttctggcgcacaggggccgaccccacgtctacctgcagcgcatccagctcaacaaccccacggagcgcgtggccgcgctgcagactgtggggcccactgccggcccagcccccaaggccttcaccagtaccctggagaaggtcggagaccatcagttcctcctctactcaggccggtccccgcctacgcccactgggttggtgcacctggtggtggtggccgccaagaagctggtgaaccgcctccaagtggctcccaagacgcagctggatgagacggtgctgtgggtggtgcacgtctctggccccattaacccccaggtgctcaaaagcaaagcagccaaggagctcaaggcgctgcaggacttggcacggaaggaaatgctggagctcttggacatgccagcggcggagctgcttcaagaccaccagctcctctgggctcagctcttcagcccagctcttctggttcagcgtggcctccctaatcaccctcttccacctcttcctcttcaagctcatctacaacgagtactgtgggcctggagccaagcccctcttcaggagtaaggaagatcccagtgtctgagtgaactaacagtcctgctttcagccaccatttgcacaagacacccagcactgaaagtcccgctgccaggagcaagggatcctttggaagcacccgccctttgtgccttgttgggggaaaccggtgacgcagaagtgagtgtggatacaccagagtttgcattggaaggaatgagtgtcacgtggggagggaaggggccagtggaccttttgtaagctttccactcaataaaatgaacctgtatggca

SEQ ID NO: 408384 - DNA, 483 bp, Homo sapiens
agtaaaataaaataaaataactcctctaggcagaggctggatgggaggcagggtggagtcatatttgttttcctgtttccaaatccctggggaccagctcacctgtgtcccagagccttcagggtataccagggcattctgggatctcatttaaatcctggcaactcccctgctggggaggggtgaataaactcatcctctatcctgggacaccgaaatggttaggaagatcccacagctgtgaggggtgaagaaaggtgggagggctgtttcctgagcacccctctgaaggtgtgctgggtttgcttgtacattcccaactaacgttgttttgtgctgtgtcagcccctgttctaaatgctggggactcagcagtgaccagaatgatccacccctgctcttacaaatcttataaatcagtggagagatagaccattatcaggaaaataaaattaaaaccatgatcatttaaaatagattgca

SEQ ID NO: 408385 - DNA, 448 bp, Homo sapiens
gccgagtatggcgcacacctatattcccagctactcaggaggctgaagcacgagaattgcttgaagctgggaggtggaggttgcagtgagctaagatcaccccactgcactccagcctgggtgacagagtgaggttccatctctaaataaataaataaataaaataaaaatttcagcccaatatattaggaaccccattttaaatgcaattgtaaacacaattgattttatatcaactttaaatatgaaagctacactcaagtaaaccaaacagcatattacctatgaatctttacatgttcatttaaaaatttcagcccaatatattaggaaccccatttaaaacgccattgtagtaaatgacaagttagtagatttctgtgtgttcttttttttaatagaagaactaatctatgtaatgcattcctgaatctaaaatacccttagt

SEQ ID NO: 408386 - DNA, 554 bp, Homo sapiens
gctcggtacctcggtggaattctggactgcaagccgtgcgtggtggcacatgcctgtaatcccagccaccggggaggctgaagtgggagaatagcttgaacccaggttggggaggttgcagtgagtcgagaccacgccattgcactccagcctgggcaacaaagaatgaaactccatctgaaaaaaaaaacccagaaattatttctaacccaaaacaattgaaaacaggtactcaaacaagcatttttacacgcgtgttcgtagcaccatttccacatagcctgagttgtaaataatagcaatgaagcttttgctttaatgagaaaggaagtttgccataaggtttgttctggggtgtcttgctgaagccctcctgtgttcttgccctggggttcagggactggagggccctctgtggggggcatgagtcacttcattctctgtctctgcaccccagctgtcctctcctagagagaggcaatttctctttcccgaggttagtagagttttttaatatctgagagaggcttatgcatgataatgaacacctatag

SEQ ID NO: 408387 - DNA, 388 bp, Homo sapiens
tatatatatatatgaaacaagttagacaggtttcctcccaagttggtagattcagttcggttgtttaaaactcaacagtagagaattgtgctttcaaccaaaatcaacttctagacacatgggtattgtttaaactttattttccatgcatataaggagtgaagtactctgccaggtagttgaaaacagtatccatttcaaagtcataagtaatgagatgagattttttatattttctctgtgtccctgcaagttattcatcccttgatatttaatttagttaatacatgcctcttattttactttttcttataatattaagccaacttcacatcctggaattgtgaaattgctgtagcaaggataggatgatatgatcgagaagttt

SEQ ID NO: 408388 - DNA, 316 bp, Homo sapiens
tgcagctgcagatggcctgtttgcttaagttgaattaaatgtgttaaaaaacgctcagtaacacatgtatgtcgccttgccctagtagccaagggcagttctgaaggaggacatcctatgctttaaatatgtacctgttcattcatggatttcagtcacattttatttaaaggaaacttcttcctatagttaaaaaaaactgtttgcaaaccaccatcttaaaaagtctagaggaaaggctattgtcctggcttgggttgtgggtattttgagctttgtaagggttttggaattaacatggatgatggtttactag

SEQ ID NO: 408389 - DNA, 184 bp, Homo sapiens
gttcgctggtcttcggaggatgggtgcgtggcaggccttccgctgtgggagccggacaaccgtggaggctccagcgccgcgggcaagaggtggcgtttcctccactcctgcctcagcgccccctgcactcccggaggtgccatcctcctccggcgggcaggatggagagtcagacagtctgcgc

SEQ ID NO: 408390 - DNA, 1241 bp, Homo sapiens
cttttacccattggcgtgagtatttttcctcagcttccctctttctccgtattctgctcctcctcagtcccatcctccacgctttggaagctactgccttactgcccggagcgccgtcgtccccgaacctcccctgcttctccctttccttctgttccggtttctggtcgtaactcaagagcaaaccaccgtactgcaaaggaaccagatattgtgctcgcggttccaaaccgggcatgggcaccgaatgcttctcgataaatccccttatggtctctgagcattaaagaaagcaagggaggaaaacatgcgcccaagctcgttcgcaggaacatgttcgcgtgtctgcgcctgtgtgcgcagccagttttctggctgaggatcgctcgccaactacagacatcacccgcccaggacccggtgccacactcacccagaagacgaaactccacaggagcgagaagaggagtccatttctccgtcggctcggcacggcacggggatgcaggcccctgattcagtacgttctgtgaaagtggagcgagaagccaagacgtggatcgagaagccccgtggggcgggtctcagggtggcccaaaagacccctgttcacgccactaccagcctaactttaggaactgtcgtccacctggcttttattatactgccttaaacatattcacttttttgagactctagaaatttcacaagttttggggtagagcacactgggctttgggtgtgtttctcatgagggcactgacgctgaatggtgcagtgagaaaggacggtagaaaccactgcctttgcttttaccattgaagaaactgaggtcctgtgactttcccgaggtcatcggaatctgccttgcacaggagacttaaaatagttgccagcagataaaagaatgagcaaaaccacatctactccaatttgttaagtctgaaagaaagtaattgaggggggattcctctttggggaaatatttatttcctgcattgaaaatagtttaatgttagtaaacatataaaaagtattttaaattcaagttattctttatttcttatgttacataaggtactgaagttagccaaggttgcttttgtgttataatgatgcagctgctgccaaccagaagtacatttacggtctgtcagtaaagaaaacaaaaactgcctgttggtaaaaatctattagaaaatatttgtcagtaaatttgtcacaatattccagcagaagtt

SEQ ID NO: 408391 - DNA, 1077 bp, Homo sapiens
cttttacccattggcgtgagtatttttcctcagcttccctctttctccgtattctgctcctcctcagtcccatcctccacgctttggaagctactgccttactgcccggagcgccgtcgtccccgaacctcccctgcttctccctttccttctgttccggtttctggtcgtaactcaagagcaaaccaccgtactgcaaaggaaccagatattgtgctcgcggttccaaaccgggcatgggcaccgaatgcttctcgataaatccccttatggtctctgagcattaaagaaagcaagggaggaaaacatgcgcccaagctcgttcgcaggaacatgttcgcgtgtctgcgcctgtgtgcgcagccagttttctggctgaggatcgctcgccaactacagacatcacccgtggggcgggtctcagggtggcccaaaagacccctgttcacgccactaccagcctaactttaggaactgtcgtccacctggcttttattatactgccttaaacatattcacttttttgagactctagaaatttcacaagttttggggtagagcacactgggctttgggtgtgtttctcatgagggcactgacgctgaatggtgcagtgagaaaggacggtagaaaccactgcctttgcttttaccattgaagaaactgaggtcctgtgactttcccgaggtcatcggaatctgccttgcacaggagacttaaaatagttgccagcagataaaagaatgagcaaaaccacatctactccaatttgttaagtctgaaagaaagtaattgaggggggattcctctttggggaaatatttatttcctgcattgaaaatagtttaatgttagtaaacatataaaaagtattttaaattcaagttattctttatttcttatgttacataaggtactgaagttagccaaggttgcttttgtgttataatgatgcagctgctgccaaccagaagtacatttacggtctgtcagtaaagaaaacaaaaactgcctgttggtaaaaatctattagaaaatatttgtcagtaaatttgtcacaatattccagcagaagtt

SEQ ID NO: 408392 - DNA, 1188 bp, Homo sapiens
cttttacccattggcgtgagtatttttcctcagcttccctctttctccgtattctgctcctcctcagtcccatcctccacgctttggaagctactgccttactgcccggagcgccgtcgtccccgaacctcccctgcttctccctttccttctgttccggtttctggtcgtaactcaagagcaaaccaccgtactgcaaaggaaccagatattgtgctcgcggttccaaaccgggcatgggcaccgaatgcttctcgataaatccccttatggtctctgagcattaaagaaagcaagggaggaaaacatgcgcccaagctcgttcgcaggaacatgttcgcgtgtctgcgcctgtgtgcgcagccagttttctggctgaggatcgctcgccaactacagacatcacccgcccaggacccggtgccacactcacccagaagacgaaactccacaggagcgagaagaggagtccatttctccgtcggctcggcacggcacggggatgcaggcccctgattcagtacgttctgtgaaagtggagcgagaagccaagacgtggatcgagaagccccgtggggcgggtctcagggtggcccaaaagacccctgttcacgccactaccagcctaactttaggaactgtcgtccacctggcttttattatactgccttaaacatattcacttttttgagactctagaaatttcacaagttttggggtagagcacactgggctttgggtgtgtttctcatgagggcactgacgctgaatggtgcagtgagaaaggacggtagaaaccactgcctttgcttttaccattgaagaaactgaggtcctgtgactttcccgaggtcatcggaatctgccttgcacaggagacttaaaatagttgccagcagataaaagaatgagcaaaaccacatctactccaatttgttaagtctgaaagaaagtaattgaggggggattcctctttggggaaatatttatttcctgcattgaaaatagtttaatgttagtaaacatataaaaattagccaaggttgcttttgtgttataatgatgcagctgctgccaaccagaagtacatttacggtctgtcagtaaagaaaacaaaaactgcctgttggtaaaaatctattagaaaatatttgtcagtaaatttgtcacaatattccagcagaagtt

SEQ ID NO: 408393 - DNA, 971 bp, Homo sapiens
gtcaggtggaggctttagaccaagttaagcagggtttttaaaacatggtgttaatgtacataatgcagccattctcaaaagtatgacatggggagacccctggaggttttctgagacccttttaaggagtctgccgagtcaaaactatttttgtgatactagtaaaacatttgcttttttcattctgtctctcacaagtgtagagtggaattttccagaggttacatgatgtgtgatatcacaacagattgaatgtagaagcttgtatgaaaatttcatacaaatatattatttgtgttataatgtgcttattgttattttgaaatcaattgttaaatacttttttttttttttttacagtttctcagtttttatttgtattttgggtagatattcgttgatacaacccacatttgggggaatgagtaatctttaaaagtgtaaaagggaccaaaaagtgtgagaatgtttgatgtagagaaactccaagctcattccctggactttggctatagatgctttcttcagggatgggtcttctgggcctgtgtcctgcaggatgcccagtaggaagcacagcctctttgatcttatgggggtgggctcatttgctgttttggagctcaggtgcaaagccgagttacttgatattccctggtcatggcaaagcctctctccacttttcttcccttctattgtcacttccattctttttccatagtccatagaaatcatttttacgtgacagtgatgagctgaccagaagctatagaagctatagtacttcctatatcctaatgggttttaaaaacactggctggggcatactcaccctttctgaacaaaggctgctaggtgaccctgctgttgccgctctgtatattcacttggttagcccacagattggtttggacctaattccctttccttctttaactgcccaaagggcttttctatttaaaaaaaaaaaa

SEQ ID NO: 408394 - DNA, 303 bp, Homo sapiens
caaaaaggaataaagaataagaaatgtgtgggtaaacagatgggcactcactgaatccaataataagagtaaggcaaaaataacagataaatcatgagacagtaatgtaagataacatcttaagattctgtgtttttcaagggaataatgacagcagattttgagaagagaatgtatatgttgtagtttcttgagtaaccactaataggacaggggaaaaagtaatttaattccaaaaataaataaaggcagacaaattgcatgaggaaattatagtaagaagaagaaaagtagaaactaaaa

SEQ ID NO: 408395 - DNA, 187 bp, Homo sapiens
acagagccggcagggatgaacatgtctggcgttctttgcaggagccagatgtttacctatgttagtgggagaatagtggagctcagatgcaagttctcatctgccagactccaaagcccttgccttttctcgatgcgtctatttttttgtaaatgttttagttcagaggtacatgtgcaggtttgtt

SEQ ID NO: 408396 - DNA, 298 bp, Homo sapiens
ttattttttatatggctttaaattattttctgagggtactacataaagaaattgagttgaaaagatttatttaactgccctgaagaaattttgcaaaaaagacagttccattttcacattaattagtatttgaggtttgtttattctcttggtgagagtaccttttttggggagggagtgtggatgttaatgttagaacataagcttaaagtatattcatagattattacaggggttgataatcacttcctatttatttcaacagctaaacattcatggctaactaataattccaaaa
